United States Patent Application Publication US 2026/0191916 A1 - sequence listing, part 35

SEQ ID NO: 94 - DNA, 1996757 bp, Bacteroides uniformis
  source 1..1996757: mol_type = genomic DNA
cggctgcaaagataggaagtttttgcataaaaagcccgaaagtgtgcaaagaaaagggaagaacggcaaaaaatacaccgatcacccactgcaaaactactgcaacgcttgtgcagtgccactgcaatacagttgcagtatcactgcaaacatatatgcagtaacgctgcaccctatttgcagtactactgcaaaaagcatgcagcaggaatgcagtaataatgcactgattatcagtccagggcttcctattctgcaaatacctgatgaaacccgagacagcatttgaacatgagcgcaaaaagccctatatttgcagcaaactaaaaaatagagaaagcaatgaagaagttgattatatttgacctggacggaactttactgaatacaatagccgatttggcacaaagtacaaaccatgccctgcaagcgctcggctatcccactcacccggaatcggactataacttcatggttggcaacggaatcaacaaactgttcgagcgcgccctcccgaaaggggaaaagagcgaagaaaacgtcctgcgcatccgcaaggagtttgtgccttattatgacgtgcacaatgctgataaaagccgcccttaccccggcatccccgaactgctggaacagttgcaggagaaagggatgatattggcagtggcttccaacaaatatcaatcggctaccgtgaaactgatttcacactatttcccccacatacgttttaccgccgtcttcggacaacgggaaggggtcaacgtgaagcccgacccgacagtggtgcatgacattctggacatcacccggatatcccgtgaagacgtgctatatgtgggagactccggagtggatatgcagacggccgccaatgccggagtcactgcctgcggagtcacctggggattccgtccccgcacagaactggaagagtttcatccggcacatatcgtagacaatgctacggacattgccgttatcgccgatctttgagagggcactccctcccccggctatccgagagcgcatatttacattatgatattttttaggcgcggattacgcgaaaaacgcggagtttttctttgtctctccgtgaaatccacgtacttccacgcctaaaaaataatcagaaagagaacagcctcagaacaatttccgcatcgttcctttatctcccaccacaagataggtattcccgtcaatcagtaaagcgcgcccacgtttcttctttcggttttcctcgttatccacattcactccaatcacccgtccatcatagaaagtggaaatatccttaaagatagtatgccccacaatgatatgttcgacgtcataacgtttcaacatcagttgcagggagtcttgtgccaatggatggtattttgcatccgtccgtaccaatccacgataccagatagggccgctattaccatataggaaagccgtgagaggcgatagagccttacgttccttcttgctcatgaacaatgcacggctcatttcctcattcactgtgggaatattcaagtcactgtcataaaactcctttcccaaacctgcatgcacatacagattaggtccgatggtctgcatcgtattacgggtaccaagccatttgccaagttctgtgtccggaccgaacaatgccggataatccatacccagttttcgggccaatgtcttgtacttttctttggtataacgcaaatcatttgccgtcacaagcggttcatggttacccaacagaaacgagacatgaccacctgcatccgccgcctccttctccaatttatagaacagccaaaatatctgcggcacatctttgccacggtcaaatatatcaccgataaccaccagatggttggttccaaaactccaatggtagtctttatcaatgacattgttgccccgcagcaagctcatcacgcaattcagcttgccatgggggtcagacatcacaaacactttatccggttgtctgtattgccattccggacgtttgaccggatgcagcttcacatcaaacggataacgccctttgtggtccgtgacatgaagggtgaaatcctgaggaagtactgtataagtcgtatcttctatctgcccttgggctgtaacgcttatgacgcgcacctttccgtccggttcataaatcacataaggtccgtctgccgacaattcctccttcttctccttatccttcttcttaccgtctaaaccaagagttccggcacttaggccggaactgatgaaggttagaataaatacagtaaaaaaagactttacaatagtagtctgatacttcatattctcgcttttttggaattaatcaccataagtcggattctgctgcatattcggattggaattcatctctgccttaggaatgggcaatactacacgataatagttccaatcaaaagatacgctctcatccaccatcttcagatgtgaagtctcggctatttccggaaattccttggtcgactccttgcgcacgatagtctgatgattacgaagggcgtcgaagaaacggtgtccttcaccgaacaactctttacggcgttccaacagaacatcatccaacgtcaccgtcttaccctgcacggtcttttccggattggcacggctgacaatagcatccagatactttacagccttgtcattgttattgagctttacagccgcttcggcagcaatcagataaagttcggacagacgaagtactggaatattggaatcttccacagccttgccgctttgcggctgatacttggctatgtaagctctctttgtcttaggaacaaccgtatatgcctgattcctgacatcatccggatcttcctgcatcagttcatagaaagaactggtcaggcaataatcatcataacccgcctgccagcaaaggtaagccacactttctttgccaacgccgtccactgtcagattcaccaactcaaacaagacttctcccggatcggaagaggtaaaatcagttccccatatcgtgccatactcatcattggtccacaaacggtacttattcttttccgctcccgcaatggcagcttcagccgtaatcaaggcattctgattatcttccatatacaaataggctctactcagcaacagcattgccgcccacttattaatcttacccttgttgaattcttcatccagcaggtcagcaccttccttcaaatccttgatgattgcctcataacactgggcaacggtattgcgcgacggcttgttttccgtattggatacttcggtcacaataggcactcccaaagaagctcctccatccttggcatacggatagccgaagaaacgggtcaggtcgaacaaggcaaatccacggagagccaaggtctggcctttcaggtcgttgaagtattccgtatcatcctcactgacatccaatccgtctatttgagacaaaatgatattacaattctggataatcttataggcataagaccagtgggaagacggaccggaatcctttgtatagtccagcatatagtagctggtggtacgctttccggtctttatggactgcgtatcgtcacccgtcacgtctccgtaataaatcatacggcccgagtaatagttggtactgcgcatcacgtcgtagataccgttcaagctatattccacatcatccagattctgtatggcggtttcagtcggaatctttgtactggattcaacatcaagccagtcattgccacaggaggcggtcaggctgaccaacatccccatcatcatatattttaatgctttcattgtgtttctttattatgaggttagaaattcaaattaagaccgaaagttactgttttcaaaggaggtgttccccagccggctgtaccagcactgactgattccggatcatagaaatcgtaagcggcccaagtccacaagttgttggcagatgcgtaaaggcgcaggctgtttacgccgattttccgggtccatgttttaggaacggtcacaccgaaagtcaacgttttcagacggataaagtccgtgctgtgcaagcggcgggtagtggtaacgccattcatggctaccgccggcttctctataaacacttcatatttactgatatctcccggttgcttccaattgtcacgataataggccggaatattaagagtaaagtccttgccgccatgttctgttttctgtgcccagttatcatatccataagcaccgaactgataagagaacatgaagctcaaatcgaaccacttgtaacgcaaagtattagagagaccaccggtcacattgggctcggcatgtttcttcagaggaatggctttggcatccttgttattctctgtgatttccttgatatagtttccattctcgtccacgtcgttggtatagaactgaggtgcaccggtctcggggttgattccggcaaattctatcatgtagaatgtacggtaggacttgccaatcatgtgaatctgcgagccgctgataatctgggtctgttcgccgtccagtttcacaatcttattcttgttgtgcgaaagggtgaaagaggtagaccagtcaaagtctttggacacaatgttcttggaattgatttccaattccacaccctggttcttcacctcaccgatattcatcagataggaactgaaaccggtagtcatagatacgggacagtccatcaaaaggttcttagtggtacgggtatagtactccaaagtgaagttcaaacggctgaagaagccgaagtccagaccgatattcaagttgtaattcgtttcccattccaaatccctattttcaatctgcgactgaatcaatgcgggattctccatatagccgccactaaggctcgtcaagcccatatagccgtataagtcggagggcaacgtaccattcacaccgtaggatgcacggagtttcaaatcggtcagccatttggacgtgggtttcatgaaatcctcttcgataatacgccatgctcctgaaacagaccagaaacttccccagcgattatctctgtgcaagcgtgaactgccatccatacgatagctcccacccagataatacttgttcttgtagtcatagttgagacgggtgatgtaagaaaccattcttgacctcttggaagaaccatctatgctctccaaagtctgcccgttggcaatgtcattctttatcggagtcaggaagttagtagcatatcccgacaagaaatcattgtacttggaatcgatttcatatccgacaagggcatctaaattgtggtccttttggatagtagtcttgtaagtcaactggtttgaccacaccaacttgttatattcactatatgccttttcggctccaccattattcttctcaccgtcggaggtacgggagtctttccattctttacccttactgatgttatagtcatagctcaaaatagactttaacttcaagtccttgataaattcatattcggcattaatcgtattgaacatacgggtaacatactcacgctggtaattgtactcctgggcaagaacgggatttcttcttgacaacgaaatcaagtcctggttatagcttccatcttcattgtaaaccggatctgaaggcgtcaatttgcttacgctggagtagaaaggagcagtataaccggttccttcactatatacatcctgattcagattggtaaacatgatgttggcaccgaatttcaatttatccgtagcctgaaaatcaacattcaaacgtccggtaattctttccagccccgatgtttttacaataccttcttggttgagataggacaatgaagaatagtatttgaatttgtcggttcctccggatatggaagcctcataactggaatggcttcctttcttgaacagataatctccccaatccgtatagccgcaccagggaaccggagcatatttgtcgatattcttatcagcataagctatggcatccgcatccgatttgccgctgcgctgttgtccaagcaccataccattgtatatgtattcgcgacgttctgctccgctcaaagtaggacgataatccatagcaaagtcactgaatccccaatcggctttcaaactgatagaagccttaccggttttacctttcttcgtcgtaatcagaaccacaccattcgcagcgcgcgaaccgtagagtgatgcagcagcggcatccttgataatcgtaatattctcaatatccgaagtgttgacggttgacatggcatccagaccaccatccgaactgatggagtttatcgaaccggaagtaacgggcactccatcaataacatacagcggagagttggaggcattgaaagagcccataccacgaatactcaaagaagctgaagaacccggctggccggaagcagaagtaaactgtacacccgtagcatttccctgcaacaaatcctggaaagaaacggaaggcacatcggcaatcttttcattcttcacactggcagccgaacccgcataagcagatttcttgaatgtaccgtaaccagttacaaccacctcttccatcatatttgcatccggcaccaatacaatcttcaatatcttacccgaagtagctttcacttcctgacgaacatagccgacataagagacaagcaaggtagccgatgcatgctccaccttgatagagaaacctccattcaaatcggtaatctgaccgtttgtagtacctttgaccaaaacattggctccaatgacgggctcaccggtctcatccaccactgttccggaaataacattagcttgttctactgccttcacagcattcacttcattggctggacggatagcaatggccccgtcttttacgacataagccaatccgctattcttaagacattcatccagcactgctgcgatttttccattcgtgaccctcaaattacgtaccttgacattctttacgtcatttgtactataaatgaaagtaaaatccgtctggcgttgaatttcccataacacgtcacttaaagtggcgtcctgcacatttacagtaactgttgtctgggcaaacgccgtattggcagcctgcacaaagccaatcataataaaactgaaaaacaggaatgtaatccacatacgtttactaccttcccaaaacctggtgtagctctgttccttagtcataattaaattattaaatggttatttatagaatataatagttttaccgttgattttgacatgtatgttttccgtcgcttccagtagctcaaggaaaggagctatttcctcataacggttcacatagcaaccgaaacgcaggttctttaacgcttcgtctgaatagtccacttcaatattataccaccttgaaaggattctcataatatcttccagccgttgatctttaaaattgatttttcccttcacccatgatgtatagaaggcagtatctactgtacgcacttgtatattcccgctcccgggaattaatgatgcctgctgtgaaggttttaagacaagactctgtccctccccggtgtccaccttaacagaaccactgacaagagtcgcctgatattcttcacccggataggccgaaatattgaaagttgttcccaacacctcaatctgcataccttgagtcgatacagtgaagggatgaccggtcttatttacttcaaaataagcttctcccgccaattccacttcccgcttcccagcttcgaaagtaagcggaaaacgtagactgctcattgaattcagatgtacttttgtaccatcattcagaacaagtgtatactcaccgccttgaggcacttcaactttattatataccaaagctgactgcacaacctgcccgtttgcagcgctgtagttcaaggtcgttgaatctatctgtatttgtttaccagccaactgcaactgccgcccatcggcattctcatccagataaaccgtttccccattatccaatgtaagaatagctttggctccacccggcagtatttgctgggcagccaataattgattgccatccatgacatggggtacagaaatatcctgaagtgcaaaaaccaatatcagcactggtgcaataaaaagagcaacgtaccgtaacagtttcaaatgtctccttctgagctccatcctcttgatacgtgtttcgacacctttccatccagcctgcgaatcaaactccattttacgaatttcgtgctgtgcataatgttcatcactacaaatcttttggaaaagctgctcatggcttttgctctctttgcgccatttatccaaaaaacggctttcttccggtgttacttcaccggataggtgcctggaaataagatgagctatatgaaagtactcttttatcataatttggcatgttttagtctatctttaatgataatacaagccaaaatgaaaacatggtgaatcgataaagacttttttttgaaaaaatagaaaaaaatgtgcttttagataaataacagaaggcaataataataatcggtaaggaatgcacgaagctttttataagccacttttttaagagtatgtaccgtttcgggagagacattgagacgctctgctatttctgcattctttttgccttccaaagccaactgcatgatggctctcatttgggtaggaagtttctctatagcttctgacagaatccggaaagtctcttcttccacaatcgcatcacgaaaaaaagcatctgcttttttggctataatcttttgctcgtattcatgagctaccttcgaatgctcaagttcgttcaaggcatggttacgtacggccgtataaagaaaagctttcacctgatgaagataaaagaaatcgtctcttatctgccacaacttggcaaatacgtcttgtactatatctgctgacatatccgcatcctccatgtattggaacgcgaaagaacaaagcgccgcataatattccttaaaaatattatgaaactcttgctcatccagcttaatgcttacaacagagtgggatttatccttttttatcagatttagcgccatatttatgcttttcgggcgctaatatagttaaattttcagaatataaccaatataactatcaatcctctaaatcttttccccataaatcaatatcggatggagcttatggaaagctccatccgaccaatagtcctattgccaataaaaaaatcaaatatatcattatagtccggtttgtttcaatgtcttataataacacagtaaactggattaaagttcactccacccaaaattgttgtttttcctatgtatacttttcaatgcagagagtgtattatttggttttcgtgtacgaaaacgagcaattttgtgcacgataacgaccaatttcgtccaaaattgtcccatttactaaataattatgcttttcgagtttgattaattgagaaaaggtcttatttttgacccggtttttaattcatactattgcaaaaacaaactcaattacctaattaaatcacaagagaatggaacaagttttcggctatatcatcggcttaggagcagcagtgatgatgcctataatctttacaattttgggagtatgcatcggcatcaaattcagtaaggcgctaaagagtggtctgctggtaggtgtcggtttcgtaggtctgtcagttgtcactgcgctgttgaccagcagcctcggtcctgctctgagccaagtcgttgaaatttacggtcttcagttgaaagtattcgatatgggatggcctgcagctgcggctgtagcctataacacatcggtgggtgcattcatcattccggtatgtttgggagtaaatcttctgatgttattaacgaaaacgacctgtacggtcaatatcgacctttggaactactggcatttcgcatttatcggcgcagtcgtttattttgccagcgacaatatctggtggggtttcttcgccgctattatctgctacatcattaccctgattatggccgactataccgccgacaaattccagggattctacgacaagatggagggtatctccattccccagcctttctgcgcaggtttcgttccatttgccgtagtcatcaataaagcattggacaaaatccccggttttgacaaattgaacattgatgcggaaggcatgaagaagaaattcggtttgctgggtgagcctctgttcctgggtattctggtcggttgcggtatcggtgctttgtcttgcaagaacggtcaggaactggtagacaagataccttatatattaggtttgggtatcaagatgggcgccgtaatggagctgattccgcgtatcaccgctttgttcatcgaaggcttgaagcccatttccgatgctacccgcgagctgattgccaaaaaattcaaaggtgctgtcggcctgaacatcggtatgagccccgcattggttatcggccatcctgcaacgctggtggtttccctgctgctgattcccgtaaccatactgctggctgtcatcctgccgggtaaccagttcctgcctctggcgtcgctggccggaatgttctacctcttcccgctggtactgcccatcacgaaaggaaatgtagtaaagacgttcatcatcggactcgttgtactgaccatcggtctttatttcgtaacagacctcgccccctatttcacacaagcagcccacgatgtatacgagaagacacaagatgctgccgtgaatatccccgccggctttgaaggcggtgcactggattttgcatccagcccctttgcttgggtcattttccacctgacctactcgttgaaatggataggctccggtatccttgtattatgcacattgttcctgatgattatgaaccgtcgtgctatcatcaaataccagaaatcaatcaaaaattaaaagttaaaaattaaatagtaacggattatgaaaaagttagtacttgcatttatgatgggagcagctgccatggcagccaatgcccaagtgaattacaaagtgcagaccgcctgccatccgcaggacgtgaagcattatgacacggaacttctgcgcagcagattcatgatggacaaagtgatggctccggatgaaatcaacgtaacctacaccctctacgaccgattgatttacggtggcgccatgccggtgaacaagacattgaagttggaagtgttccgtgaactgggtccggaaatcacttacttcctcgaacgccgcgaactgggtgtcatcaataccggcggtgacggagtggttactgtagacggtaaggaataccccatgaagtataaggaagccctttacgtaggctgcggaaataaggaagtaaccttcaagagcaacgacgctaccaatcccgccaagttctacatcaactcggccccggcctacaaaccctatgttactcagctgattaccaccgatgccaagcttcagaaagccaaccccaagaaatatgcactgggcatctccgaccattatggaaaaatggaagacagcaacgaccgtatcgtaaaccagctgattgtgaaagatgtactggaaagagtgaaagacggcggtaccaaccagttgcagatgggactcacggaactggctcccggctctgtatggaataccatgcctgcccacacgcacactcgccgcatggaagcttactactacttcaacctgaaacccggcaacgctatctgtcacctgatgggcgaaccgcaggaagaacgtttgatatggctgcacaacgaacaagccatcacttctcccgaatggtccatccacgctgctgccggaaccagcaactatactttcatctggggtatgggcggtgaaaacctgaaatacagcgacaaagacgaaatcaaatacatcgatatgaaataaagttgccctgcaacgtccgataggcatggacttaaataatccatgcctatttttgtcattttctacatcctttttactcaatattacacctcgaacaacacacaaacccctacatttgcatcaaaatataaatctattatcatgagtacatttcaaaacaccgcagggcggatgaccaattaccgttggattatctgcgccatgctattcttcgcgacaaccgtcaattacctcgaccgccaggttctttcattgacctggaaagatttcatctcccccgaattccactggaccgatacacactacggctacatcacagctatcttttccatcgtctatgccttaggcaatctgtttgccggacgtttcatcgactggatgggaacgaaaaaagggtatttatgggccattgccgtatggtctatcggtgcttgtatgcacgccctctgcggacttgccacagaaatgaccctcggcattgaaaatgccgccaacatgattagcgctaccggtgcattggcctctaccatagccatcaccagcgtttactacttcattgccgcccgtatcatactgggcatcggtgaagcaggaaactttcctgccgccatcaaggtgactgccgaatattttccaaagaaagaccgtgccttctccacttccatattcaatgccggctctaccatcggagcactgatagccccattgtgtatccctaccctggcccgctacttccaacgcatgggcgtgggcaacggctgggaaatggcttttatcgttatcggcggattgggtttcatctggatgggactgtgaatattcatgtacaagaaacctgatgaaaatccacacgtaaacgcagctgagctggcatatatagaacaagacaaagacaatgagaaggataaaaaggcgactactccgacaaccaaggatgaaaagagcatttctttcctgcaatgtttcaaatatccgcaaacctgggctgtatttttcggcaaattcatgactgacggtgtatggtggttcttcctcttctgggcacccgcatacatttcggacgtttacggattctcctcagatactcccacggcacagatgcttatctttgtgctctatgccatcacgatgttgtccgtctatggcgggaaattgcccaccatcattatcaacaaaaccggtaagaacccctacgccgcacgcatgcaggccatgttcatctttgaactgttcccgctattggcattgtttgcacagccattgggcaacaaggaagtatttggcgaacaagcctattggttcccgattatcatcataggtattgcaggcgctgcccatcagtcctggtcggccaacatctattctgtggtaggtgatatgtttcccaagagcaccattgccaccattgtgagaatcggaggtatggcgggcggtatcagctcattccttatcaacatgagttccggtttgctgttcgactatgccgacaagacacaaatggtatttcttggattccagggcaagcctgccggatatttcatcatcttctgtgtatgtgcagtgtcctacctgataggctggtgcatcatgaaggcactggttccgaagtacaaaccgattatagtggactaatcagaagtctctatatagatattcagaatcatgcggagtttgcaaactgcattacatgccttgcaaactccgcacaaaaaaagccttttctcacgaaatggcttttcttcgttcaattacagtcaaaaacaaaaaactgtaaatggaacacaatttaagatgaaaaaaagggaagtctcacgacttccacaattcttctaaccttaaatctaaatctctatgaaaaaaacgtgatgcaaagataatggtttatctcacacagcgttattaataaactctataaagaagcagaaaatatttaagatttactaaataagacggttacgaatggcaaactacagacaagagctcggcataaataggattaagtttcaatagttgcggcactcctgtcataaacatctgcctgcgggcacgagtaagggcaacattcaatttccggtcaatccgagtaccgttttcctccgtcatatttgccagaaacttcaactgataagcccggttcacacagaaagagtagataataacatcccgttcgctaccttggaagcgttccacggtgtctaccaatatatcctccaaaggagcaatacccaaagcagcaatctctttcttaatcaaggctatctgactgcgataaggagtgatgacacctaaagtgacagccgggttgaaaccggaaacagctgcatactgccgatagatagccgctgccaaccgtgccacaatccgcgcctccgaatggttcatcttggccgactgtgccggcggttcgactgcggcaggcagaaaagcgacacgacgagtcagcaagccggcaaactcacaatcacacagctcaggagcaagaatcagctctccctgctggtgcggcagaccaaccggttccaacagaccaccgtaaaaagcccggttaggaaacaaagctacctcgatattcatacgaccctgacggcagagcatgtcgtaggagggatgagggataaaagatgaagaatgagaggttgatgcctggcgattggcactttccttggagagattcctataaaggcgttcgaaaagggaatctttcaaattatacaatccgatggcctgcaaagcttcgtcacacacttccgactgctcggacgactgcaagaccactgcgggtagctgcttatggtcacctatcaaaataaatttgccgatggcatccgcgcctgcgggattgcgggtacagagtaaccccagcagttgtggttccaaaatttgggtagcctcatccacaatcgctacatcaaaagtcttcaaccggaaaagttcggtcttggaagaaagcgtggcaaccgtaccgacaaaaacacggcaacgggcaatgcgctcctgcacctgccgccgagtggcacaagattccaacacattctcaatcagatacgggcggaatgagtcatcgcaagacaactcactgcctaaacggataaagtctatttcaggctcaatggaagccagcgccttactgatttcatctacagcacgattggtatacgaaagcagtagaatctgtttcccctcccggtaaaaggcttctaccatgccccgcagcgcgcgagaggtcttgccggtacccggcggaccgattaaaaggaaatagtcgcgggcagcctgcgcttttagaataatccgcgaaaaatcatccggagcggtcgcaataccagtatccaaagaagcatcgaactcgggagggcgctgccccaacaacaaatcacgccgtctttgagtggcagaaaggaaagcggaaagtcccagatacatgctacgaaaggaggtgtccatatagtcgtgctctatggcataaaggctagcagcaggcaatacacccgcattctgctgagtggcacgaagacggatacagacctcgttatcggatatgcgctctatattacctttaaacaccatcttgttggtaacgttgtcggtatccgtattccgttcgtaaagaaccaccgcatcaccctgacggaaattgggcagaacccgctcctgccgggaagcaaccatttgcttcgttctgagtgacaaatacggtttatgcgcatctgccgcatgattctcgcaaatagccaaatcgtacagaatttcacctgcctcacatttctcagccagtgtggaaagccagagggcggcagcaccggtacgtccttcataatccacatctccagatttggaggtatagagttccttggttataaagttatagagcgtataaaaatagctttgttccaacgacgaaagcgaacggatgcgttgcgctacggcatcgatggaggggcaaaggaagcgtttccacaaggtattgtccaaaccgcgctcattcaaggtatccggatggatgtctttcaggcgctctgccgtatactgtgggctattccgtaactggatgccatattcattggctacaatccggttacgcacatccatcacacggcgcaccattgcccacgaaggacgcgccggataaagcaacggataacgggtatagagcagataagcctttacacgtcgatggtccattcccatagaatactccaacacagcctgatagagcaacatctgcaccttattgttttctttaggctccaccttaccacggatggaatactcgtccgccttaccggacttcatttcaatgaacgaggtcatatcccgctgcatgtagtccagacgcccttgcaaacccaatgcttcacagatgtaagagggttccagcacggcatcagtcctatcgagctcatagccggatgcacggaatgtttctgtcaccgtccggtggatattgtcgaaatggcgcttgcaatcggaaaagaattcggcttccttctcccggtcgcgcaggtcggcacatgctgccagctcgatgggataagaacggaaggccttcttcatgcatgccaaataatcgggtgcctccttggcatgaatccattcgtccagaaagaggttggcaatattacctaacagtaacggacgggtattgtctggcgactggagccgtgccaggatatagttggcaggatgatgcccgtaatccttgaagcattcggcaagcgaactgatgtctatcaagtaatcgggctcaagtataataaaggaaggggtgagtatgccgacttcgtccaccgtaacatccagcagattgacctgggcatgccgccacagaatccggcaagtttctgcaaactcttcattaatctgaggtacattataacggacacgcaacggctcatcggctacagtgtctacgggcagtacatataaataagtatcatcggcatactgaaaacagacgcgcgtgcgctttatccgttctttggcgggcggtgccactatataggtggcatccgcacggggtagcaggcgataaagttcggcaggtatctcctcccccgtcaagcgcttgacaaagaatgccagtgtcttggcatcacgcaacaactgttcacgttgcggttccgcctggcggttcagaatagcattggaggtcagccggaaggtatgcagacggttctgttccacggtggaaagtccggccttcgaagccacgaaactgatacgtgcagaaaggtccgtcatctgcaagctgccgtcgggcatctgtgtacggcacaaacgctccagcaactcgcgcaattgccgataggccacgtccaaggagatttcctcaacgtggcaggcttccagcaatatactaaaatattcctttacttcacaatccatcattcctctgtctccacttcttccgcttcatcatcagtctttttatcctttatcatcaggatactcaactcatagagcagataaagcggcaccgccactactatcaaggtaaacgggtcaccggtcggagtaatgatggccgaggcaataacaatgatgacaacagcatgacggcggtatttccgcaaaaaggtcttgtgcaccagtcccagcagggaaagcagccatgtcaccagcggcagttcgaatgccagtcccatgcaaagcaccagcatcatgaaattgtcgatgtacgagttcagggaaatttgattctcgatggctgcgctcaattgataagtggaaaggaaacgcaatgtcagcggatagaccataaaataccccagcaacacaccgatgaagaacatcaccgtacctatacccagcgctttcctcacccctttacgctcgtttggatagagtgcagggcttacaaagcgccagatttcatagaaaatataaggagcagccgttaccaccgacatccagaaagcggtagacatgtggacaaagaacggtgcggcaagattgatattgacgagcttcacatgaaactcctgggtaaagaactcatcctgcaagtccagtctctgccctatccagcgcagcaagtcatagaaaatgaagtcgttatggcaaggagccaatatcacattgtcaaacagataaggcatggcaataaaataaccgatagccaatacaaaccacacaccgagtacacgaaacaacactcggcgcaactcgtccaagtggtcccaaaaggttagttctttttctgacataaagggatttactatttgacaatttactatttactatttgggctgcgctgcggggatttactatttgacaatttactatttgggctgcgctgtggaaaaggcaacaagcctacccatactcctgaacttctcagagtatcaaatagtaaatagtaaattgtcaaatagtaaatactcttgttcctttatttcttttcagccggtttatccaaatcttcctgagccttgtttatctcttctttggcttcattcacgccatccttgaagctcttcactcctttgcccaaaccacgcatcaattcgggaattttcttaccaccaaacaacagtaagatgaccaatgcaataattatccattcggaaccgctgggcagaaagcctaataaaagtaagtttgtcatagttatatctgattaattatagtgcaaagataggaaaattaaggattagggattaaggattaaggattaattttatcgcaatccctaatccctaatccctgccccctatcttcagtcttgataataaatacgttttacccgtgtagaaacgcttgtcaacacctcataaggaatagttccgagtacatcggaaagaacggttataggcagatggtcaccaaaaatttccacactgtcaccctccttgcaatcgatgtccgtcacgtcaatcatacagacatccatgcagatattccctacataggctgcccgttggccgtttacaagacaataggcatgtccatttccaagatggcggttcaggccgtcggcgtaaccgatgggaagagccgctatacgcgacggacgggtgagatgccctttccggctataccccaccgtatcctcttcgggaacatcacgtatctggaggatggtagtcttcaacgtgctcacattattcataatggaattgtctatgggattgacaccatagaggccgatacccaggcgcaccatatcgaattgcgccccagggaaacgctcgatacctgcggaattgcagatatggcgaagtatcttatgcggaaaagcctcctgcaattccatggacgctttctcgaacatttctatctgccggcgtgtaaaactgtcgaattgttgcgaatcgctccctaccaaatgcgagaagacggaacgggcaatcacagcattctgtcccttcagccgttctatcagccggggcatatcctccggagcaaaccccaggcggtgcataccggtatccagctttatgtggatggggaagtttgtgataccttccttttccgcttctttaatcaaagcgtccagcagatggaagctatatacttcgggctccagcttgtaatcgaacatggtcttgaaagcagtcatctcaggattcatgataatgatgttcgcagtgatgcccgctttgcggagttcggagccttcgtcggcaaccgccacggcaagataatcgacatgatgttcctgcaaagtcttggctatctcataagaacctgcaccgtaagcggaggctttcaccatgcagaccatctttgtttccggcttcagcttgccacgataatagttcagattggcaatcatcgctccaagattaacctccagaatggtttcgtgcaccttcttctccaatacttccgtcaaggagtcaaaaccgaacttacgtgcacccttaatcagaattatttcgttttcaaggcgaagttccccacgctgaatggcacgtatcaaggccgctgtatccggataaaaggtcttctctatattaaagcgtgcagcgcaggaagatatttcatttcctacacctatgatgcgttcaatgccacggctgtttaccagctgtgccacttgtcggtaaagtgtcggcgtgttctgaccggtctccaatatatccgaaagaaccaaagtccgcctcaatcccttactttgcgaacggcggtaaagaaaatcgagtgcaatatccaatgagccaaggtcagaattataactgtcgttaatcaacagacagttgttttttccctccttgacttccagccgcatggcgatgggttccagccttgccatacgttctgtaatctgttcggcaggaagcatcagatagaggcatgcggccaggcagttcagcgaattctcgatggaagcatcatctatgaacggtagagtaaacgtattgtccatatccagatagcgataggaaatgacagtacagtcatcccgtttctccactttacttatatatagaggacgttccatatctttccggctccacgcaatctcacgtgcagacagcatggacttcgccacacagttgctgacgaactcatcgtcaccattataaatcactacatcacaattcttgaaaagcgtcagcttctccatgcatttctcctgcaacgagaagaaattttcctggtgagcccctcctatattggtcaggatgcctatggtaggcttgatgatgttctgcaaagcgcgcatttcccccggctcggaaataccggcttcaaaaatagcaagttcggactgttcgttcatctgccacacagacaaaggcactccaatctgggagttataactgcggggagaacggataatggcacgttccggactgagcaactggtgcagccattccttcacaacagtcttaccgttgcttcccgtaataccgatgaccggtatctggaaccggttccgatgctgttccgccagtttttgcaaggctttcagcgggttgggaacaatgagataattgacaattgactgcgcatcatcacgctgcatagcattgtcaattgtcaattgtccattgtccattaatctaaagctttcttcgctaagcacaaaattacgtactccacgggcatataaatctgcaatatagcgcgcaccgtcatttctcttggtggtcaaggcaaagaataatgtttcctcaggaaaattcagggaacggctgtcagtgagcagccagtctatggtagccggcgcgtttcccatacgccgtgcgccaatactttcggttatgctttcaatcgaatacgacatatttctctctctttttggaaatctaagtacgggtattttccgttaagttggtctatttttaacacaatttgtcctaaaaaacgcttatactcttctgaagcgggataaaatggcttatgtgacaacatcttacggatattttcactttcttccataatccgtaacgcatcggcagagatacacgaccgggtaaaccgttcccagacatagcgaatggccgtttcggaaggatgcaccatgtcttctgcatagaagcgatagtcacgaagctcgtcgagcagcaactcataagccggaaaatagaaaacatgttccgggaaagtggcttgcaactggttcacggcaagcagcaaggtagctttactgagctggttggcatgcattccgtcacgcacgtggcggatggggctgacggtgaacaatactttcaaccggggaatccgcgccagcaagccggaaagcaaagaggtgtagtcagatactatttcactgacagaaagcatacggcgggtaaagcaggactcaggttgcttatgacagttggcaactacagttcccgtcttttcattttcataaacccaggcagagccgaaagtcagcaacagacaatccaaccggtccagcctttcatgggcgcttttcaaacgcccgttaatacctgccaatgtttcctctgcagagactgaggaaaagctaccatgatgcatggcactgtgccaaagttcatgaaagaggaaaatatcgttttcattgtagcatctgcccgcaatgatttcacgcaatgccgcagaaatggaaaacggattataaagcacaccataaggattgacgtcacaacggaacttggcatccaccagcctttgccccatctcggacgcaaaacaagaacccatcagcaacagattattctcttgcgaaaaaaggggcatactggaaactacttctacaggtgtataaagattcataagctcggaataaataaaccattcactttctcgaaaaaaatgatgtaccaactgcttgctacgccacaaagatagtaaatttcaatatataacggtcgaaacataaaaaggcaggtgatataacctttcattatatcatctgccttaaataaaaatactatatattctattaataccaattagccgtaggatcagccacccaatctgcaaaacctggatatttatcattaatatcctgacgttcagcagtccattcatatcttgtctctacacgtatcttctgcggagctttgccaatctctgctttcagtgtatatacttcagcattttggccttccactttgatatttacggcaccggtaccgttaactctgtacatcaccggagccttagttgccccagcatccgtatttaccattgtagtattagaaacaccaaagagttcatgaacttcacggctatcaccgcctacctcaatatacaaaggcaaagtaccacccgcagcctgcagggtaatgatagttgctcccccattggtcgctacatcaaacacgacatcgttgaagtcaaaatcatcactgtctccaaggtcttctgctatgattctgtacgcattcgtatatacggccggagagattttcacaatccaatcactataatacccatctgcagccacttgttgatttgggttctgtccggtagcttcaaagtcaaatcccacataataagcacccccaatatattgtatagtataattatagtgcattttaccatccaaagaaaccctatagccaaaagaagacgttccactattctgcattagcattatagccccctcagtagcattaaaattattgatatgctcatctgatgctgcaaccaaaaaatccatattagagtgtgagccacttacatgttgaacaaaaaagtcggtccaatccacaccaatggattgtggattctgatgtgttttaaaccattccgtaaccacttctttttctgtagccgtaataccctcgggtacttccgtaaaatctttccattgattgctattagtgttagcaacacgcgttgtcggtgttaccccaaatccccaatcctgatcaactgcaatttctccatacctctgcacaaaagccgatgcatactgtgcctctttcttagctgccgccttttccgggttgaacagatcgctatcagaaccgcaagcggaaaaaaccactacgcccataatagccaaaactttaaagtcaagctttttcttcatatcattcattgtttattcatttaacaattcgtgattacaccccattccgacacatattacaaccaagaataccatcacatacaattcagaattgtataacatattgataaacaggacatattccacttcgcaatatatataatattatatcaacaacaaccaaagcttctaaaaagttgcaataaataatttataaaattgcatttttcaacaaacatcaagtgtagagcagctcttatcacagacggtcacgtgcgagaataaaagtcaatctttggaaggattaatatccttgtctactaacactaaatcattcctatatgtagaaaaaatcgttccaccatggtggaacgattttttctacaggatggaacaatattttctccatggaggaacgatttaatatcaggcatcttttcccttaactataggcaggcggaacgagaaatgtggcgtatgcaaagagaaagtaaaaacagaagtgaacaaaagaggctttttttccttctaaaacttcccgccatccgttttcttttgctatttttgcattttgtaatcttcagattagaaatgagaacagaaccaacaacatataacttgcttaacaccattacatttcccaaggatttacgccaactcagcgtagaagagcttcctgaagtctgtaaagaattgaggcaagacattataaaagaggtttcgtgcaaccccggacatttcgcagccagtctgggcacggtagagctgaccgttgccctgcactacgtattcaatactccgtacgaccgcatagtctgggatgtaggccatcaggcgtacgggcacaagatactgaccggacgccgtgaagcattctccaccaaccgtaaattcaagggagttcgtccttttccctcaccagaggaaagcgattatgacacattcacctgcggacatgcgtcaaattcaatctccgccgctcttggcatggctgttgccgctgccgaaaaaggcgagaaagaccgccatgtggtcgccgtcatcggtgatggaagcatgagcggcggcctggctttcgaaggactgaacaacgcttcgtctacccctaacaaccttcttatcattctcaacgacaatgatatgtcgatagacagaagtgtaggcggcatgaagcagtaccttttcaacttgactaccagcaaccgctataaccagctgcgcttcaagacatccagactgctgttcaaaatgggacttttgaacgaggaccgccgcaaagcgctgattcgcttcgccaacagtctgaaatcaatggccgcccagcagcagaatatctttgaagggatgaacatccgctacttcggccctatcaacggacacgatgtgaaaaacatagcccgtgtcctacgggacattaaagatatgcagggaccgaaaatactgcatctgcacactgtaaaaggaaaaggattcgaacctgccgagaagaatcccgatatctggcatgcaccgggcaagttcgatccggaaaccggagaacgcctcaaggtggacaccagcaatttgcctccgcttttccaggacgtgtttggggaaacgctggtagaactggcaaaggaaaatccgaaaatcgtcggagtaacccccgccatgcccaccggctgctccatgaacaagctgatggacaccatgcccgaccgtgccttcgatgtgggtattgccgaagggcatgcagccactttctcgggcggcatggctaaagaaggaatgcaacctttctgcaacatctactcctccttcatgcagcgggcatacgataatgtcatccatgacatcgccctgctccgcctccccgtcgtactttgcctggaccgcgccggactggtaggagaagacggaccgacacaccacggagttttcgacctggcctatttccgtccgattcccaacctgaccatatcttcaccgatggacgaacatgaattgcgccgcctgatgtacacggcacagttgccggaccaaggtccgttcgtcatccgctatccccgcggacgcggcgtattgctggattggaaatgtccgctggaagaaatccccgtaggcaaagggcgcagactgaaagaaggcaaagacctggcagtcatcaccctcggtcccataggcaacgtggccgcacgtgccatagagcgtgcggagaaggacaaaggaatctccatagcccactacgacctgcgttttctcaagccgctcgacgaagccctgctgcacgaggtaggactcaacttccagcatgtcgtcaccatagaagacggtgtcaaaaaaggaggaatgggcagtgccatactggagttcatggcggacaatgactatattccccatttcagacgtatcggtgtacccgatgccttcatagaacacggcaccatacaagagttgcaccatctttgcggaatggacgaagaaggaatctataatcaattgataattgatagttgaaaattgacagtttgagcatttaccccatatgtcaactattaattatcaactatcaacgaactaaaagtgaaaataattattgcaggtgccggcgcagtaggcacacacttggccaagttgctgtcccgcgagaagcaggacatcattctgatggacgacaacgaagagaagttgagcacactgaactccaactttgacttgatgacggctacagcttcccctacctccataaaaggcttgaaagaagtgggagtgggagaagccgacttgttcatagccgtcacccccgatgaaagccggaacatgaccgcatgcatgcttgccaacaatctgggagcacagaagaccgtagcccgtattgacaactacgaatacctgctgcccaaaaacaaggaatttttccagaagctgggcgtcgattcactcatctacccggaaatgcttgccgccaaggaaatcgtgtcctccatccgcatgagctgggtacgccaatggtgggagttctgcggaggagccttgatactgataggcaccaagatgcgcgaaaaagccgagatactgaacatccccctccatgagttgggcggaccggagctgccctatcacgtggtagccatcaaacggggaagcgaaacactgattccccgtggtgacgataccatcaagctacatgacatcgtatacttcaccaccacacgaaaatacgtcccctacatccgcaagatagccggcaaagaagattatgccgatgtgcgcaacgtaatgattatgggtggaagccggattgccgtacgcaccgcccaatatgtcccggactacatgcaggtgaaaatcgtggataacgacctgaaccgctgcaaccgcctgaccgagctgcttgacgaccgtaccatgattatcaatggcgacggacgggatatggacctgcttgtggaagagggactgaaaaatacggaagccttcgttgccttgaccggcaactcggagactaatatcctggcctgccttgccgccaaacgcatgggagtcagcaaaaccgtagcggaagtggagaacatcgactacataggcatggccgaaagccttgacatcggcaccgtcatcaacaaaaagatgattgctgccagccacatctaccagatgatgctggatgcggacgtcagcaacgtgaaatgcctgacctttgccaatgccgatgtagcggaatttaccgttaaggccggctcgaagattaccaaacatccggtaaaagacctcggcctcccgaaaggagccaccatcggcggacttatccgccagggggaaggcgttgtggttatgggtaacaccctgatacagccgggtgaccatgtagtggtattctgcctgaacatgatgattaagaaaatcgaaaaatactttaactaattgagaatgagtagttggtaaatgattaacttcaagacaatcatacggattatcggtattctgctattgctggaaacagtcatgtttctggtctgttcgggcgtgtccttctactacagagaaagcgatatgctcgacttctggaaagcaggaggcatcacagcaggggtaggcttattgctggcggctctcggcaagggaggtgaacgacaactgacgcgccgtgacggatatgtactggtcagctttgcctgggtggcattctctcttttcggaatgctgcctttctatataggcggatacatacccgacattgccaatgcattcttcgaaaccatgtccggtttcagcagtacgggtgccaccatcttggacgacatcgagtcacttcctcatggaatactgttctggcgcagtatgacacagtggattggcggcttgggaatcatcatgttcaccattgcagtgcttcccatcttcggagtcagtggcctgcaggtgttcgccgccgaggcaagcggccctacacatgacaaggttcatccccgtatcggtatcaccgccaaatggatttggagtatctatgccggcataaccgctctgcttgtcggtctgctgatgcttggaggtatggactggttcgacagtatctgccatgcatttgccactaccggtaccggtggcttctccaccaagcaggccagcgttgcctactacaattctccttatatagaatatgtcatctccattttcatgtttatctccggcatcaacttcaccttgctattattgttcgtcaaccggaaattcaagaagttcatcggcaatgccgagctgaaattctatttcggttcagttgtgctcttcactgccgtcatagccatcgtgctttactataccagtcccatggggatggaagaatccttccgcaaatccttgttccaggtaatctccctccagacctccaccggttttgcgacagatgactatatgcaatggacacccgtcttgtgggggctgcttaccatcatcatgctgatgggagcgtgtgcaggcagtaccaccggaggcttgaagtgtatacgtatggtaattcttaccaaagtctcacgaaacgagttcaaacacatcctacaccccaatgccatacttccggtacggataaacaagcaggtaatctctccctccattgtctccaccgtactggctttttgttttatttatatctccattatagtcatcggcacactgctcatgatggctatgggtgtcggggctgaagaatcaatgggctgcgtcatttccagtatcggtaatatgggacccggattgggtgaaaccggacctgcctattcgtggaatgccctgcccgatgcagctaaatggctgttatcctttttaatgcttctgggtcgtcttgagttatttaccgtactgctgcttttcacaccggatttctggaaacggaattgatttaggataaaaagtgtaaaaataatcattttttgttatgcggggatagcaaattgaacaatacttattatatctttgcgtccttgaaagagagaattgtggtatgaagcaatgcattaaatactgtttaatcataatctttgcagccctattgcacgacagtgcaaccggagctgcagatattttgtgcgttcctgccacccgacaagcagaatgctgtacgctgtcacaagctcctaccacccaacaagcagtccagaagttctacgacttgttttcaccaaactccctctgcatagaacatgtggaccatacgcaagtaccaaccaacaaaagcgtactcctgcgcatgtacatctacaagatgcagcagcatgcctatgcaccggaatgcgaccgtttgttgaatctgtctcctcatcccgtacccgacgcgaattattacgtgttcgggctaagaaagattatcatttagaaggcctgcaagcgcagacgcttgcccctgacctcgccggacaacaaatcagaggttttgtcctccggtgcgatgtatctattattatatatctaaaatcttatcaggtttatgaactttactttgttagtggtcgtcttattgacggcaatcgctttcgtgggtatcgtcatcgcgctctccaatgcgatagcaccccgttcgtacaatgcacagaagatggagccgtacgagtgtggtatccctacccgcggtaaatcgtggatgcaattccgggtaggttactatctgtttgccatcttgttcctgatgttcgaagtggaaacggtatttctgttcccttgggcagtcatcacccgcgaacttggcgtggcaggacttttcagtgttttatttttcctgattatattgattctgggccttgcttatgcctggaggaaaggagctttggaatggaagtaacaaagaaaccgaaaattaaatctatcccttatgaggagtttacagacaacgaaacgttggagaaactggttcgggaacttaatgccggaggcgccaatgtcgcccttggcgtactggacgatttcgtcaactggggacgcagcaactcactgtggcctcttacgtttgcaaccagctgttgcggtatcgaattcatggccctcggcgcagcccgctacgatatggcgcgcttcgggttcgaggtagcccgtgccagtccgcgccaggcagacatgattatggtttgcggaacaataaccaacaagatggctcccgttctgaaacgtctttacgaccagatggccgatccgaaatatgtagtagccgtaggcggctgtgccgtcagcggaggcccgttcaagaaatcctatcacgtggtgaacggtgtggacaagattctgccggtggatgtctacattcccggttgccctccgcgtccggaagcattctactacggcatgatgcaattgcagcgtaaagtgaaaatagagaaatacttcggtggagtaaacagaaaagaagagaaccactaatcagtacttaaaaatatggaaataaaatacatagagccctcagtcctgcacgacgaaatgctgcgtctgcggaaagagaaacaaatggacttcctggaatgcctcagcggtatggattggggaatacccgacgagaaagacgcaccggacaccccccgcggactcggtgtagtctatctgttggaatctactgttaccggcgaacggatagcggtacgcaccgccactctaaaccgggaacatcccgaacttccttccgtcagcgatatctggaaagctgcggatttcaacgagcgcgaagtctacgacttttacggcatcgttttcatcggtcatccggatatgcgccgactctatctgcgcaatgactgggtaggctatcccatgcgtaaagacaatgagccggaaaaagataatccgttgcgtatggacaacgaagaaacggtggacaccaccatggaattggagctgaatcccgacggtagcatcaaaaataaggagatgcaacttttcggtgatgaggaatatgtggtgaacatcggtccccaacatccggccacccacggcgtaatgcgcttccgtgtatcattggagggtgaaatcatcgacaagattgatgccaactgcggctacatccaccggggtatcgagaagatgtgcgaaagcctgacctatccgcagaccttggctctgaccgaccgtctggactacctgggcgcacaccagaaccgccatgccttgtgcatgtgtatcgaaaaggcaatgggcgtggaagtaagcgaacgcgtgcagtacatacgtaccatcatggacgagttgcagcgaatagactctcacctgctgttctattcttgtcttgctatggacctaggtgcattaacggccttcttctacggtttccgcgaccgcgaaaagatactcgacatctttgaggaaacttgcggcggacgcctcatcatgaactacaacaccatcggtggcgtgcaggcagacattgctcccggcttcgtaaagaaagtgaaggagtttatcccctacctccgcggtatcctacacgaatatcacgacgtattcaccgggaacatcattgcccagcaacgtctgaaaggtgtgggtatactctcacgggaagatgccatcgcctttggagctaccggaggcaccggacgcgccagcggatgggcctgcgacgtgcgtaagcgtatgccatatgccgtatatgacaaggtggactttaaagaaatcatccgcaccgaaggcgattcatgggcacgctaccttatccgtatggatgaaattctggagagcctgaagattatcgagcaactgatagacaacatcccggaaggagcctaccaggaaaagatgaaacctattatccgcgtaccggaaggcacttattatgcagccgtagaaggtagccgcggtgagttcggcgtcttcctcgaaagccacggcgacaagatgccttaccgcctgcatttccgcagtacgggcttgccattggtatcgaccgtaaatacgatttgccgcggagctaaaatcgccgaccttattgccattggcggaacattggattatgtagtaccagatattgacagataaaaggatttacgatttgacaatttacaatttaccatgcggaattacagcgcagccaaattataaattgtacattgtgaattgtaaatcaaaaagcgcctcgtaaattgtaaatagtaaattgtaaatagtaaatgaacaacgtgtttgactttagtatagtaaccaactggatacaccagatgctgacttccctgatgccggaaggtctggcaatattcctcgaatgcgtggtgattggcgtatgcatcatcttgatgtatgccgtgcttgccatcaccctgatttacatggagcgtaaaatatgcgccttcttccaatgccgcctcggtccgatgcgcgtggggaaatggggattgctccaagtgccctgcgacgtcatcaagatgttgacaaaggaaatcattgatttgaaattctctgaccggttcctctacaatctggcaccgttcatggtaatcatcgcttctttcctgacatttgcctgcctgcccatcaacaagggattggaggtattggacttcaatgtaggagtgttcttcctgctggctgcatcgagtatcggcgtagtgggtatcctgctggcaggctggagttccaacaataaattctcgctgattggagccatgcgaagcggtgcgcagattatcagctacgagttgtcctgcggattgagcatactgacaatggtagtgttgatgggaaccatgcagttctccgaaatagtagaaggacaagctgacggctggttcatcttcaagggacatatccctgcattgatagccttcatcatctacctcattgccggaaatgcggaaaccaaccgcggtcccttcgacttgcccgaagccgaaagcgagttgactgccggataccatacggaatacagcggtatgggcttcggattcttctatctggcagaatatttgaatctgtttatcgtagcctctgtggcagccaccatcttcctgggaggctggatgccgctacacatcgtaggcctggacggcttcaacgcagtgatggattacattccgggatttgtatggttcttcggaaaggccttcttcgtagtcttcctgctgatgtggataaagtggaccttcccccgcctgcgtattgaccagattctgaatctggagtggaagtacctggtacccatctctatggtgaacttgattttgatggtattaattgtagtatttaaattgcatttctaaccggcgtagcgccggagcaagatttccttgcggataattttaataaaggcaaaagtaatgaaagaaaagaactcttatatcggcggactcatacacggcgtcacttctctgctgacgggtatgaagacaaccatgaccgtattctgccgacgaaagactaccgaacaatatccggaaaaccgctcgacattgaaactctccgaccgtttccgtggcacgctgaccatgccccataatgataaaaatgaacatcggtgtgtagcttgcggtttgtgccagatggcttgtcccaacgacactatcaaggtgaccggcgagatggttgaaacggaagacggcaagaaaaagaagatattggttaagtacgaatacgacctcggttcgtgcatgttctgccaactctgtgtgaatgcctgccctcacgatgccatcacgttcgaccaggattttgagcatgcagtgtttgaccgcacgaaactggtcatgacgctgaaccgtccgggcagccatgtagaagaaaaaaagaaacccgctgctcccaaagaagagacaacaaagtaattcgttaatagtaacttgtaattaaacaacatggaaataactcttgaaacagtagtattctacttccttgcggcctttatcaccgtattttccatcttgacggtaacgacccaccgcatggtgcgctcggccacctacctgctgttcgtgcttttcggtacggcaggcatctactttctgctgggttacaccttcctcggttccgtgcagattatggtctatgccggcggtatcgtagtgctctacgtcttctccatactgcttaccagtggcgaaggcgatgtcatcgagaagttaaagcgtagcaggttccttgccggactgggtgccaccgtgggcggtgccatcatcgtagtattcatcactttgaagcataagttcattgccaccaccgacgtggaacctttggaggtcaacatcaagaccatcggtcaccacatgctgagcggtgacaagtatggttatctgcttcccttcgaagctgtcagcatcttgttattggcatgtatcgtaggtggattattaatagcacgtaaaagataagaattatgatacacatggaatattatctgatagtttcggctatcatgtttttcgcaggcatctatgggttcttcacccgccgcaacacgctggcgatacttatcagcatcgagctgattctgaatgccacggacatcaactttgcggtgttcaaccgtttcctattccccggaggactggaaggatatttcttctctttattctccatcgccatctcggcggccgaaacggctgtagccattgccatcatgattaacatctaccgtaacatccgcagtatccaggtgaacaaactggatgagatgaagtggtaagagcaagaatcgccaagcgatgtttcttgaatagtaataattgataaacatagtatatatggaatatacaatattaatccttctactccctttcctctctttcctcgctctgggacttggaggtaaatggatgtcacaccacactgccggccttatcggaactgcggcactgagtgtggtcgcagtgctttcctatctcaccgcaggaatgtacttcagcgctccccgccttgccgatggtacgtacgaggcgctaatgccctataacttcaaatggctgcctttcacagaaagcctcagtatcgacatgggtatcctactcgacccgatttcggttatgatgctcgtggtcatcagtaccgtttcgctgctggtacacatatactctttcggctacatgaagggcgaacgcggtttccagcgttactacgccttcctgtcgctcttcaccatgtccatgctcggactggtagtagcaacgaatatcttccagatgtatctgttctgggagttggtgggcgtgtcctcctatctgctgattggtttctattatacgaagccggcggctattgccgcttcgaagaaggcttttatcgtgacccgttttgctgacctgggattccttataggtatcctcgtctatgggtattatgccggtacatacaccttcagccctaatgagatggcgctggcaaagggcggtgcggcaatgattccgcttgccttgggactgatgttcatcggtggtgccggaaagagtgccatgttcccgttgcacatctggctgcccgatgccatggaaggtcctacgccggtcagtgcactgattcatgccgccacgatggtggttgcaggtgtctatctggtggcacgcatgttcccgttgttcatagaatatgctcccagcgtgctgcacatcgtggcatacgtaggagccttcacggcattctatgccgccagtgtggcatgtgtgcagagtgacatcaagcgtgtactggcattctccaccatctcccaaatcggtttcatgatggtggcgctgggtgtatgtacatcagccaacccacacgaagggggactgggctacatggcaggcatgttccacttgttcacacacgccatgttcaaggcattgctgttcctcggagcgggtagcatcatccatgccgtacacagcaacgagatgtctgccatgggcggactgcggaagtatatgcccattacacatatcacgttcctcatcgcctgccttgccattgcaggtattcctccgttctccggattcttctccaaagatgaaatcctgacggcatgcttccagttcagccccatcatgggatggattatgacagtgattgcaggtatgacagcattctatatgttccgtctttattatggtatcttttgggccggctctgagccgggacaaaagtcggcaagcgatgggggcgacagccacatgcctcacccccacgagagtcctctggcgatgaccctgcccctgatgctccttgctgtggttacgatagttgccggtttcattcctttcggacacttcatcagttccaacggtgaagcatataacatccatctggattggagtgtggcaggtacaagtatcgccgtagcggtggtttccatagccattgccacctacatctatgcaggtagccggcaacccgttgccgatacattggcacaccgtttcaaaggcttgtggacagcagcttaccaccgcttctatctggacgaggtctaccagttcatcacccaccgcatcatcttcggctgcatctgccaccccattgcatggtgggaccgccacgtggtcgacggtttcttcaacttccttgcctggggggctgaagctaccagtgaagagatacgcggcctgcaaagcggacgcatccagcaatatacatttgtattcctgctgggcacgctggcactgatactgctactattgctataacccgagatttttcaatcgtaaatcgtaaatcgttaaatcgtaaatataaagatgaactttttatcattattcgtactcatccccttgctgatgttgctgggtctttggctcagccgcaacatcgcacaaatacgcgcggtgatggtgaccggtgcatcggctctgctggttctttctgcagcattgaccgtgatgtacctcaatgcacgccacgctggtgccacggatgaaatgctgttccgtgccgacatggtctggtatcctgcactcaacatccactattcggtaggagtagacggtatttcggtagccatgctgctgctttcggccatcattgtctttaccggaacattcgcctcctggaggctgcaaccgctgactaaagaatatttcctttggttcaccttcctctccatcggtgtgttcgggttcttcatctcgatagacctgttcaccatgttcatgttctacgaggttgccctcattcccatgtatctgcttatcggtgtatgggggtcgggacgcaaggagtactccgccatgaagctgacactgatgctgatgggcggctccgccttcctgcttatcggtatcctgggtatctactacggtgccggagccacctctatgaacctattggaaatagcacagatgcacaatattcccatcgaacagcaacgtatctggttcccgctcaccttcctcggtttcggtgtgctgggcgctctgttcccgttccacacatggagccccgacggtcacgcctccgcaccgactgccgtatccatgctccatgccggtgtattgatgaaactgggaggttacggatgtttccgcatagccatgtacctgatgcccgaagctgcacaagaactgggatggatattcctgattcttaccggaatctccgtggtatacggtgcattctccgcttgtgtacaaaccgacttgaagtatatcaatgcctactcttccgtcagccattgcggcctggtgttgttcgccatcctgatgatgaaccagacagcttgcacgggtgctgttctgcagatgctctctcacggactgatgacagccttgttcttcgcccttatcggtatgatatacggacgtacccatacgcgtgacgtccgcgaactctccggtctgatgaagattatgccttttctggctgtctgctatgtaatcgccggtcttgccaatctgggactgcccggactcagcggtttcattgccgaaatgaccatcttcaccggttcgttccagcatcccgatacgttccaccgcgtgtggacggtcattgcatgcagctccatcgtgattacggcagtctatatcctgcgactggtaggaaagattctctatggcacctgcactaacaagcatcacctcaccttgagcgatgcaacctgggacgaacgtacagcggtcatcatcctcatcgcatgcgttgccaccctcggtatggcaccatggtggattagcggcatgattggagacagcgtgctgccaataactgatttatttacgatttgacgatttacgattgataaatgacttgtaaatcccaagagtaacctcaatcgtaaatcgtaaaatcgtaaatcccaagagtaatttcaatcgtaaatcgtaaatcgtaaaatcgtaaatagatatggattattcccaattcctcctgctcaaagaagagctttcgctgatattggtcatcgtcatcctttttgtcgccgacctcttcatgagtccggatgcacacaagaatgacggcaaaccggtgctgaacacaatgctgccagttgttctgctgaccatacatacacttatcaccatcgtccccggtcctgtggcagatgctttcggcggcatgtatcacaatcagccgatacagagcatcgtgaaatccatcctcagtataggtacactgattgtattcctgatggcgcacgaatggatgcgccgtccagacactgccatcaaacaaggtgagttctacattctgacactttccaccctgctgggtatgtacttcatgatttccgccggacacttcctgatgttcttcatcggactggagacggcaagcatcccgatggcagccctggttgccttcgacaaataccgccaccactctgccgaggcaggtgccaaatatattctcacggcactgttctccagcggattgctgctatacggattatctttgatttacggtacggtaggcactctctactttgccgacataccggcacgcctcaccggcgacccgttgcagattatggcattcgtattcttcttctccggcatgggattcaaaatatcactggtgcctttccatctttggacagcagacgtttacgaaggtgctccaagcacggtgacagcctatctgagtgtcatctctaaaggctctgccgctttcgtgctgatggctattctcatcaaggtattcgctccaatggtggaacaatggcaggaagtgctgtactgggttatcatcgcctccatcacaattgccaacctcttcgccctacgccagcagaacctgaagcggttgatggctttctccagtatctcgcaagcaggttacatcatgctgggtgtcatcagcggaagcgcacaaggtatgacgtcgctggtatactacgtgctgatatatatgtttgccaatcttaccgtatttaccgttatcacgattgtggcactgcgggcaggcaagttcacacttgaagactataacgggctgtataccactaatccgaagttggcgttcctgatgacactggcactgttctctctggcaggcatcccgccgtttgcgggcttcttctcgaagttcttcatcttcgcggcagctttcgaaggcggcttccatctgctggtattcattgcccttatcaatacaatcatctcgctttattactatctgaagattgtaaaggcaatgtacatcaacaagagcgacgagccgattgcagcattccgcagtgacaactatacacgtgccagcctggccatttgcacgctgggtattgtggtactgagtattgcaagtgtggtatatcaatccatcgataagttctcattcggattataaccggagggtatcatcacttaccacaaattacgcagattggcacaaattatctttagaagttctgataatcaagagctttgagttgtgttaatctgcataatttgtggtgagtgtgtattttagcacatttccatactatacaatcggcagcacaaaccaaaagcatgagcctttccccggttcactgtccacaccgattgtgccacccaactgctctataatgctcttgctgatagaaagccccaggccggtgccatgcacaaacgtattcagctttataaaacggtcgaatatctgagcctgcatttccggctcaatgccaaggcccgtatcggccacataaaaacgcaaatgagtttcatccaccttatcatatcctacacgtatacttcccgcagtggtgaacttgatggcattgttgacaaagttggctatgacctgattcaaacggttacggtcactgacaatccggcattccggcagatgatggtcgaagagaacttccacacccggtttagccttcatcttcatgaagcgcacaatgtcctcacatagtacgttcacgtccagctctttttccacaaagtcaaatgtcccggcctctatcttggacaaatccagtatgtcggaaatcagctgcaacagcaggtcattgttttcttcgataatcgccatatactgccttttttcctccatgtccccggtctctcccatcagactggagaaaccgacaatcgcattcaggggcgtacgtatctcatgactcatattggcaaggaaggcactcttcagacggtcggcggtttctgccttctccttggcttcaatcagcatagcctccgtctccttcaattccgtaatgtcatagttgacgcctatcagctctatttgtccgttctccggttcgaacagattgacaaccacattggtacgtacccagttccattttcccttttcgcccggacgctcaatgcgcatctctccctggaaatgtttggcttcgcccacacgggccttactgaagaaatcaagcatcctcctgcggtcactggggtacatcttgctgtatattcccacgacatctgccaattgggtattctcgtcctctcccatattcttataccattgcttgatggcatagcctttccggtcgagcaggttcagcttggcataacctaccttcgcataatccgatataagcaggaagaaattctcgaaatcacagatacggctcatggcatcaatccgttccgtattgtcgatgttaatcatggcatagccggtaaagttacctttactgtcatacaccttgctcactttcgtataaagatgtatcacatccttcggctgtttggaagtggagtaatacccttcagtccggtcgaaagcataattcaggcggaagtcgaccatatcctcggtctgtatacgttctgccaattgggcggacacattcgggttctcgaataagttcactccaatgacatcctgtttgtcacggaccccgaatatctccatatccttattgttgatgtctaccaggaatccgtctttgtcatagatttccaccccggccggtatattggcaaagatattcttgaacagtttttcgctatggtccaaagccagatgagtctgtaccgagtctgtcgtatcgaggaataacgccaccacttcattcttttccggagagtatatcaccacgtggcagtgcttgttggtgagctcaaaacacatgtccatttccttatgtgtcccggtgttcactatatcaagcagatattccagtctgggggccgcctcccttgaaaaagacgaggcagtcttgccgataaacgtcgacgcgggttttcccagaaaatcggcaaagatagaattcgcatctgtcacataatacccgtagggattgtccttttcatcacagacaatggacatccgcacataccccaaaggcatatagcggaacaaattgctgaggaaagtacgttcacgcacagcctcatccttcgttttgcgcaactctatgcaaatgctgatgacatttgccaacgaactaaaccattggtaatcctcgttagtccacattcgggtacggtccaccaaatcaatgcccatatatccccacacctggtcattggcaaccagcggagttaccatcaaggactttatattctgtctcgccagaatttcatattcggcgtaagcgtgctccggcagttgccccagcgtttccagcagaacgggcttttgtgccataatctgtgacgtccaccacggcaagctgtcagcctggactccctgaagcatttctttctcaggagccactcccggagccaccacctcgtatgtgcagctctggtaccggcacttctcatcgtattggaatatatagacacgcccgccgcgaaagaaatcgagaatatctttcagtatgtcgtaaatgcccgcactgatatcctcgtctttcaggaaacggaataaggaatgggatattgaggtctgccgataaagcaaattgttcactctttgcaaagcctgcttcgcagcttcctccttcggcatctctacgcgctgcaacactccgaaagccttcaacgtaccatccggcaaatgctccttataccccacgcgcgagtagacccagaccactccttcagtagaatagataggaaacgtctgttcatagacctccatattctgaatggcaaggaactcccggctgatacgcgtccgatagtcttcgcgtatcattttaccgaaatcctcaaagctcaggtattccccttccaagcctaacaacttacagacatattcggagcagagatactgccttgaagaaaaatcagcctcccaccaacctatccggccaagaatggaaaggcgccggaaacgttcactatcgtcacgatgaacagccatatatttatcaatattggtttgagatacaaaaatagccataaaactctaataagcaaccattagaaacctttttcgtcccaagcagcctatatataaggataacaaacaatccggaagaatgtgcggtaaccaaatcgtaatagatttgaaaatgaaacgtatgttccatgtatcaccggtgtaatgtcattgcctcatctttgcagcggattaaaaaacgtacaaagaaaagagatgagcatgaaattagacttgggaaagattttcttccttattttattcctcacactttccgtcatggctgccacggcgggaaccatcaaagggacaatcaccgaccgacaaaccaaagaaccgctgacgggagccaccgtgcaagtgagcggaacggcacaaggcgccgtcgccgatttggatggtaactatacactggagctgaaaaacggaacctataccctcaccgtccgttacatcggctacaaagacatgacgataaatgccgtagagataaagggcgaaaccgtgctgaacttcgacatggagccggacacgcaaaccctgggcgaagtgcaggtcaccgccaagaagaaccttgagggcgaacgcgccttgcagatggaacggcaaaaagcgaccctcgccatcgagaacctcggttccaaagagatgtccctcaaaggcatcggcaatgtggaagaaggagtaaagaaaataacgggcatctccatcgccagcgccggacaacttatcgtccgcggactgggcgaccgctacagcaccaccacgctgaacggactgcccatcgcctcgcccaacccggacaacaagctggtgccgctcgacctgttcccctcgtccaccgtacagaacatcaccgtcagcaaggtgtatgacgcagccgcctttgccgactacagcggtgcgcacatcaacatcagcaccaaagaaaacataccgcaagatttcttccaactgagcctcaacacgggcgggaagttcaacaccttaggcaaagaccgctatcagatggaccgcagcggctcgctcctgaagacacccggagtggacgcagccgccctcggcatgcccctgatggagtttgacaaatacgtgaagacccgcaatatcttcgatacctccttcagcgccggcaagaagagttcgttgcccgaactgggcgggaacctcggcttcggcaagaacttcggtataggcaaccagacactcagcctgctcgcctccttcagcgccagcaacggctaccaaaacatggaagatgccttctacaagacactcgaggccaccggcaccgtgcaggacgacttctcctacgacagctttgcgcaggaactgaagctcgccgccctcggctacctgggctacaccctgcgccggagcgaccgcataggctacactttcttctacgcccgcaacgccatcgacacctaccagcgccgcgaaggtactgatgccgaaggacacgagctgaccggcagcaacaacatcatgcacatatacaccctgcaaaaccatcaactgaacggaatccataacttcggcgagagcgacaggtggcaactgacctggggaggctcgtacagcaagaccggtagcgaagaacccgaccgccgccaagtgatgtacgtcaaggacaacgacggcagcctcaggctcttcaagctgaaccgccaagagaccatgcgctacttcggcagcctggacgaagaagagtggaacgccaacctcgccatgcgctggaagtggaacgacaccagccacctcaagctcggcttcaactacaaggacaagaaccgcgactacagcgctacccgcttctactacaacctgaacaagctggaccccgtcatcaccgacatctacaacaccgacggcttcctcaaccagcagaacattgccgacggacaaatcatggtacagcgtgtgatgcagcccaaagacagctaccgcgccggaaacgaaatctactccgcctacctgctgaccgacttctatcccaccgaagccctcctggtgaacctcggcctgcgctacgaaatgagcaagcaatgggtgcgctacgccagcgacggcggcgactggtactcccgtcggcgcaatttagacaagaacgacctcttccccgccctgaacctgaaatatgcggtgaaccccgccaacagcatccgcttctctgcctcgcgcaccgtcacccgtccctcgttcatcgagatggcacccttcctctaccaagagtcctacggttcggcacaaatccgcggtaacgaagagttgcagaacggctacaactacaacttcgacctgcgttacgaacgcttcggcaaggacggcgacatgctctccgtgaccggctacttcaaatacctagacagccctatcgaacgcatccaagacctgcagggcggcgccacgctgcacagcttcaagaatgccgacaacggcatggctgccggcgtggagctggagatgcgcaaacggctcgtcaaagacctgcgcctgggtaccaacatcagctacatgtacaccaacgtgaagctgccccaaagcggtgcctacaccaacaaggaacgttcgctgcaaggcgcatcgcccatacttgccaatgccgacctcacctactcgccccgcttcggcgaagacaggcagctcaacctcgccctgctctacaacctgcaaggcagccgcatccatgcggtaggcgtgtcgggcctgggcgatgtcacgcaacagacgctgcacacgttgaacttcagcgccggatatagcctgaacaagcacttcaacctgaagctgcaagtgaacgacctgctgaaccgcgatgtcatcttcaagcaagatgtgcccaccacggggcaggagatggaagtggaacgctaccacaagggaacgaactttgaggtgggaataagctacaacctataaagtcccccgccctccccctgaagggggacggagaacactctttgacaaacaagctctaaaagaatcaatctgaatgacagacagatgaattgaatataataactaaaacaattgaattatgaaagcaatgaaatggaaattctactctctggcctttgtagccggaatgtctatcctcaccgcttgcagcagcgacgacaacaacgacaatgacggcaacggcggcaacggaaacggcaatgaaatcgaaaacggtacgatactgaaaggtaccatcacctccgacgtgaccctggctgccggaaacacctacaagctgagcggcgaatacatcgtagaagaaggtgccacgctccacatagaggaaggcgtgaagattatcgccgtctacgatgacatcgcagactacatcctcgtgaagcagggcggtaaaatcaacgccgtaggcacgccggacaaacccatcgtaatgaccagcgaaaaagaagagccgggcgcatggggaggcatacacatctgcggacgcgcccacaccaatgccgaaggcggcaagggaagttctgaaataggcggcgccgtttacggcggcaacgatgatgccgacaactcgggcacgctgcaatacattcgcctggaatacaccggctttgccttcgatgaagagcacgaagccaacggtatctctttctacggcgtaggcaacggtaccatcgtggaccactgccaagcctacaaaggttccgacgacggctttgagttcttcggcggctcggtaaacgtgagcaacctcgtagccgtaagctgtagcgacgactccttcgactggaccgaaggctggaacggcaaaggcaccaacctcgtggcttaccaagaggacaaatccacactgggctacgactgcgactgcctgatggagtgcgacaacaacggcagcaacaacgccgccactcccgttgcccaccccgtattgaagaacctcatcctcgtcggcaacggcggcagcaagcaaggcatccgtctgcgtgccggcacggaagtggaaatagacaacgccaaggtatgcggcaaaggccagcccctgaccgtggaaaccgcccttaccgaaaacgccctgaagaacggcacctccaagctgaccaacatcaccctcacctccgagctgagcagcaaagaaggcatctacacccatgccgacttcatcgccgtgacaagcaacaaggtggacgccaacctgagctacagctctttcgaggacatcaggaaagaatgcagctggatgaacggaagctgggtgaagtaaaaaaaagaagcactcgcaaggctataaaaaaacacacaacttcttcaacagcgtgcccctcgaatgccttccggcttcaaggggtacgcgctgtttcaagaaagaaactaaaagtaccgtttacttcttcttcagctccttcttcaattcctgaacctgaaagctgaacaagtccagatgacggcaaacgcgctgcatgaaactgcctgccgccctgaagcagatacgcgaaatgcgcactttatctgccgtacagtcctctatccgttccaccggttcgctggtgatggagggaaaaaagtttccaagtcccttgatgttcaccgtgcgtccactggccagatagtccgctataatatccggcagttgcaccagcacggactgggcatcgcccacctgcagggagctgacaaaagccagcctcttggccagttcgtcattgctcaccggttccggctgaagcacttttgacgccgcgtagtagcgcaccacttccttgtctccactcttgtccaccttcttgcggaccacataattcattgacataccaatctttctttataattaggttcgtaaaaaacgaaagatattcccgcccgacgcgaggcacacctacaacttgcatacacaaagcctataccttacggtaaagactccgtgaccgaatacctttcactatatgactgaatacctaaaacacccggatgtattgccccaaaacatggggatgttttcacccaaaacacccggatgtaataccccaaaacatggggatgttttgggagaaaagatggggatgttctgacctttcagtatagggttcaaaggtaatgactccctatgagaaatacaatagatataggcctttttgatggtcggaatcaagctcctttttcttcggaagcagcaggcagtacccgctggaaatctctgccggacggagactggaatacctgcaaatcgaattcggggatgattgccagcacatggtcgaacacatccgcctgcaccccttcatagggcacccaatccttcagcgcacagaagaaataaagttctatcgggataccgcggtcggtaggctggagttggcgcaccatgcaggtcagttcctgatttacgtcgggaagacttttcaaataagccgtcagatacgcccggaacacccccagattggtctggcggcgtccgttgacgaggatggagttatcgatgccgttttccacattgtacttttcaatcacttcctccgtctgctccacataatctttcagtagctgtatcttgcgatattttgccagcatctccggggtgcagaaacggacgctggtcatgtcgatattgatactgcgcttcactcgccgcccaccgctctcgcgcatgccgcgccagttctggaaggagtcgctgacaagcaggtaaggagggatggtggtaatggtattgtcccagttgcgcacttttacggtgttcaacgttacctctatcaccgtaccgttggcaccgtacttgggcatctcaatccagtcgcccaccttcagcatgtcgttggccgaaagctgcacaccggagacaaagcccataatggaatccttgaataccagcatcaggatggctgccgaagcacccaatccggcaagcagcgaaagcgggtcgcggcctatcagttcgcccacgaccacaatgccgcccaccagccataggatgacttgcatagtttgcaacatcccctttaaagggcggtcacgaaattgctccttctcactgtatacactgtaaacagccttcaggaacgagttgacgaaactcaggaaagtaatgatgatgtaaataaggcagatacgccggataaaatccattgccgatgaaccgacttcgacaaatgccaatgggacaaacagatagatgatgacgggagccaccatgcggctgaggtgcaccatcactttgcggtcgaatacgatgtcgtcccatgtagctttggtcttcttcaccagttgtgccactactttcagcagaattttccggcatagggcatccgccagaaaagcaacggcaagtatcagtgcaaaggctatgaactggtcgaacatgtcggcacgggaaggggatatgccccacccgattaaaaggtcgtctatcttcttcaatatctccataatcgtatgtttatcataacggcaatcttatctacgcgactgctcctcccgctcaaggaactccatgatatcttctttcaaccactgataaagataaaggttcttgtagccgctgttttttttcagcatcacggatacattgacctgactgttctcataccccgtcagttcgttgcggaactgttcgttatgctctgccaggcgctttatctcctgctcgcgttcacgacgcagcaccgtacataccgggataaggattttcagcactacacaatccatgatatggtgtccttggatataaagataggtattgtccggagtcagtcccaaacgttccaactccgtgcccagctgctccacccggtcgatgtagcgggggaaacgggcttgcagttcggacagctttgccgacaccgtcttttgcatctcgtccagactacggtaaggatgacgcaggtttatctcctgcaggcgcacgcaggcgttgaagtcgtacatcgggaaagtgtgtgtgtcgtgctggcggtagaaccagacattccacagaaacagcggataggcaatctgagaataacgcttcagaaaagcggggaagtccaggatatgccggtcgttcagcgtggcctgcacacagacttcatgcagactgtcggcaaagcagtggaagttctcgatggcatagccataagtctggaagatatagggattcttgtttatcttatgcgacaccttggtggcaccttgcagcaggaagtcgtagtcgctgtctacacacgctatcaggctgcgccccagttccgatgtgttcaacgtattcatcagcaccatcttcttgccctttgccagggaggtggccgagggaagcatcacttgaaaataacgttcctcattctcgaactcagacagcagcgtccgccagaaagcgatgtcgtcatagctttccacatacgccactatgcgcctgcgtgctctcttgggggacaacttgcgggcggcatccagataggcggaagtaaggttatgtcttagggaagtgggcacttgggtaggaattaaggattagggattagggatgagatttcgctgacttcggtgacggcatccagccagccttccatgatgactgcgggcgaatgggtggtgaggataagctgcacattgggattcagattgcgtatcatgccgataagcttctgctgccattcgatgtgcagggaggcttccggctcgtccatgaagagtacgcagtggtcatcgtcacgcaccagcacggtcagcaggatgaccagcatctgcttctcgcccgaagacagtttgtagggcagcaggcgttcaccgttctgatagaaaacgatgtcgttgcttttgcggtctatcgtcttatgggtatagctgaaaagctcgtcaatcatatcctggaacttccgcttggggagggaaagggagggagccaggctacgctgctcttcatcaccgctgagcagttctatcatcttgttgccgatgttcacctgatagtccagataacggcgctggagcagatagagctgccagtccagttccgacttcacgttggcatcggccatgcgtgccgtaaagtcgcccatgataaggggacggtcgtagctgcggattacatcataggggataaaggtggctgcagaattgtcgaagtagacgtgtacgccgttcttctcgtcactcttcacttcacccgatgtctgttccagatagttgaccgaacggttcaggatagtggttttccccactccgttgatgccggaaagtatattgacgtcaggacgcaggtcccaggcaatatcgtaccgatgccacaatccgtgtatttcgatacgcttgatgtaattggcttgtacttccatggtttcttgctttaattagaagcaaatatacacgataatctcttatttctacgcccatgaaccagaaaaatcatataatgaaagattttctcttttcagaaaatagttgttcttttgcacccgcaaagaacaaaagagtatgaacaagaacattcaagggcatctgttcgcccttaccgcaaatatcttatggggcttgatggcacctataggtaagtcagccttggtagagttttccgcgttgtcagtaaccacattccgcatggtaggcgcagccgcctgcttctggctcctctccttattctgcaaacgcgaacaggtggaccaccgggacatgctgaagatattcttcgccgcactcttcgcactggtattcaatcagggtgtctatatcttcggactctccatgacttcgcccatagacgcctccatcgttacaaccacgctgcctatcgtcaccatgatagtggctgcaatctatctgaaagaaccggtcaccaacaagaaagtgctgggcatctttgtaggggctatgggagcatttatactcatcatgagcagccagaccaccggtgccggcaatggcagcctcatcggagaccttctctgcctgctcgcccaaatcagcttctccatttatctgaccgtattcaaggggttgtcgcaaaaatactctcccatcaccctgaacaaatggatgtttgtctatgcctccatgtgctacatcccgttctcttaccacgacgtggctgccatacagtggagcgaaatatctacagccgccctgctgcaagcgggatatgtggttgtgggaggaagcttccttgcctatatcttcataatgagtgcgcagaggctgttgcgccccactgtggtgagcatgtacaactacatgcagcccatcgtggcctcaaccgttgccatcatcttaggattgggagtgttcaatttggaaaagggaatagccatagccttggtattcctgggagtgtacatcgtgacacaaagcaagtcacgcaaggatttcgagaaagaagggaaagccgtataaaacagccgttccaccgtcacagtactccggcacgtacccggctcagagactcgggagtcattaacagataagatgctatgtgattgactgaggcacgccgggctatctccggataatccctgacgaagcgcgcataccgctcgcgtgaggtttcgaaacgccaagagtctgctttatattgggaaagcattaaagacccctccaataaatggcgaagcagacgggctatatgcagataacgctcagagagttcgaccagtcctgcatacgaaatgctccagatgacgccttcctccaaggattccagctgaaggcaattacggcgtccggtgaaaaggctgacgatacacatagcgccgtcaccgtcgcaggcaaagttctctgtaatgtcccggccttctttgaaatagaactggcgaagcagtcctttctctacaaaaacaatatccctggctatatctttttcactaatcaacagttctcctttgtgcacctcacggcgtacaaacaaaccggcaatgagctccagctcctcagaagggagttcatgaaggcggcgggtaaaccgccgcgccacttccatgttgttttccttagtcatcgatatagagaaagggatatgcccctatttcttcagttctgcaaaataggtgtccagcaagttcttggcagccacaaaagaagtcaagttgccctgtagcacttgtttttccttgccagtcagcatcgcttcaatctgcggattgtggtagaagctgtcgcgcagctgttcgttaatggtctcgtacatccagtatttgctttgctcattgcggcggtattcaaaatagccgttatctttcacaaagtcaatgtatttgtagaccatatcccacacttcttttacaccaagattatagaaaccggaataagtcagcacttggggtgtccaaccgctctccggagccgggaagaggtgcagcgcattacggaactgcgttgctgccagtctggcccgctccagattgtcgccatcagccttattaataacaatgccatcggccatttccatgatgccgcgtttgatgccttgcaactcatcgcccgtacccgccagctgtatcagcaggaagaagtctaccatagaatgtacggcagtctcactctgccccacccctaccgtctctacaaatatcttgtcgaaaccggcagcctcacaaagcacaatcgtttcacgcgtcttgcgtgccacgccacccagcgaaccggcagagggactgggacgtataaaggacttgggatgaacggagagcttctccatacgcgtcttatcaccgagaatactgcctttgctgcgttcactgctcgggtcaatggcaagaacggccaacttgccgccgtgttcctccagtacatgcaagccaaatacatcaatagaggtacttttaccggcaccgggcacaccactgatacccacacggacggagttgcccgaatagggcaaacacttctctatcacctcctgcgccacagcctggtgctccggtttcacactttccaccagtgttacagcctggctgagtaccgtaacatcacctttcactataccctccacatagtctgatacggaaagctcgcgtttcttccgcctgggacggttcttcaagtaaggattgaccgatgaaggttgctcaatgcctgcattgacaaccaagcctttatatgcttcattattttcgggatgttccatggctatttgtgagttataagttatgagttatgaaggactttacgacttcttattgttttgctttaatgttgatttcaactttcggctgcatcgggtcattggtaatcatcagcagacgcagatgacggcgcttcttgcctatattcttcttcactaccgttacccgcaggcgggtgctttcaccgggttgcaatacactcttcttgaggttaactcccactgccgggtggaatacctggagtttgtttatctgtaaaggagaacgcccggtattggtaatggtaatatcctgacgtgcttttgacttctttgccaatatcgcactcatatcaacttctttggtagaaaggctgatgacaggagcatttgccttctccacttccgtcattccggagaaatccggtaaaagaatggcagaaacgggaatctcgttttcatcgcccaccttgtcaccggagaagcgagaaagatagaccgacgtttgagtcagtccgaggccagtcagtctttccgaattcaatgtaagtgtaatcactcctttttctcccttttgcagcacgttaggttctacttttgtctgcaaataagggggcagatgcatcagtaccggttcataaggacggtcggaaagattgaccacgccgatatgaatcaccggctgctcaccatgctgaatatcggggaagtcgaggctgttcttgtcaatacgtatctgaccgataagatagggatgcgtcttggtaaagtccttgatttcctgtactacttcaccattgaacttcaaatagaccagattgggttgcgcattgctgtaaatagccacagatttctggaaatgtcccaatgccttggcgtcaaaagtcacatttactgttccttttgcccccggagcaataggcgtttttgtccactgggccacggagcaggcgcaatccggctctacttctgtaagcactaaaggctggtcacccgtattggtgatggtatattgcacagtcacgggatgcttccattctatctggccgaaactgtacatctctgtattcgaggtaaaacgagcttgcgctacagcagtcaataccacacttgcaagcacatataaagttatcaatatccgcttcatctatttttcttaatatcaagatttcctaattctgccactctcattcaatattagtcggacaaaaataggtgtttttagcgagagtacctaaaatagcggagcgcaatttgtacaaattgcgctccgctccatactctattgttactttattacaattatccctcccgccgaatgcgaagcatactccggagcatacgcacactgtatcgtggccagccccgtttcgtatgttccgccacgggctatgcgataactgtgctctaagacataaacgcctttgcccaaatggtcgaagaagaaattggttgcggcatcttccacttctgcataataaccgaggccattactccaacgataaccggaaagcgagcctataggttcaaagcaggcaccccgctggtctttcaactgaacaaaatccatagtacggtccaagcggatagtcaaacgggccactattttatcaccgacggataatacggtcccttccgtaaccggttgcaaggacttgctaccaccggccgatatacgctctacataaagtttcttctctacattcaattcacccccctgctgctttacatcagatatgggtgacagatactgggcataaacagctccccaggcaatgcctgcatcccgtttctctacggtgacggttttagctttcagctccggacttccttgagcgaaggtttccttgacataacccaaacccgggattatggtctttgtaggcgacaatgtttccaaaactttgttacctaacgtgatacgtacgtctccccgactttccagcagattagtaccttgacaaagcaatgcataaacagcatcagccgttgcaaccggagaattccaactggtagtctgcttctgtttcagcagccagagtttcatttcctccaccaaagcatcgttgccacctgccatacgcagggcttccattacttccacatgggcagggatgggcagcataccccagttatacggatttgcttggaaagcaaagtatgcacccagttcatccgtctgtaccagatgttccttgagggaagcgatgaattcattcgcctcggctgtacgccctactgctttcaggatgatggcagactgcgccttgctgctcatggttccatctttaagattggcacctacttttgataggaaatagcggtaagccgcttgattgtctgccggcacttgttcgccgctaagggctatcagatacagatatgtcattgccgattcggagttggcagtaattctggcgccatttttttcggctttacggatattgcgatactcttccaaagcctgccgattcaaatagccgaaagctttctgccgcatggcggcaacttcttcaggcagttcatttttcgtcagcagaggaagacgaacaagtaattctgtaatatagccagttatatagcggctaccggacattcccttataccagctccatccaccgtcttcaccctgcaattctttcaatttggtaaaagcggaaagattgcggttattcagttggttgatatcaaacagcgtggcaatacgtgcctgctgttcggcttcagtagtagcttccagtacccacggagactcgctgagcaggatattcttcacatcctgattcttctccaactggctgaggaaggtttctttcgtgccaccggcagccttccaactgtcaaatacagtcttaatgcggggctggctgttggcaatgaagcctgccagactattggcataccaagctgtagcccaagaaatggcattatcattggcaggcaggctcaatgccggcaacgcttgtacagcataccaagccggattcccggtaaattctacagtcagacgacggtctgtcgctgtacggctattacggttgaaaaggctgtctaatgagaacgtacgggtctcctcgccacggataggcatagcaagcgtttccgtaatatactccttattacttaatacgggcaacagatgctgctcgccatcgctaaacgtacctccatcggcaaccatacgaataccaagcaaatcatagcggtcggacacttcgaaatggaagttgacagcagtatttcttcctgcttctaccaagaatttctgacgttgagtagcaataactttctccgtcatagggtcgaacagtgtgaatactgctgttcctttcaccgctttacccgtcagattggctattgttccggctatctgcgttttatctccaacgcggacaaaccgaggcatattcggagtcagcataaactccttggcagttacaacggaagcatccaacatcccagtcagcatatccttagtatgtgagtaaccacggaaattccaacgagtcaagctctgcgacatcgtaaaagaaaacgcaagctccccttgttcgtttgtacgaagttgaggataaaaaaaggctgtttcggcaaagttggtgcgaagcccctcaataggttgcaaggcctcgccaaccggtatcgtttccgattcaaaaacaacatcttccaccgcgtcttccgctacttgtgcaggaacatatttcacttcaacagcattcccggagtcttctttggcagcaaacatcggctggttggcaccacgtattctaagattaccggtcaaagagctattccgggtagtcccataccccacaacacttacttcttccaaaagcgcattgtcttctaccatcactatccgcatcctcccatccatataaggagaacagaagtagtcaaacgaccacaccggaaccctccaagccttcaacgggaaataaacggagaagtaattgctattataacggctcgcaccacggaatgccccatacagattatccggatagaaaacccgtagtatctggttactcttataaatcttatccagtgaagcgtcgtacatcgtagccaacatctcagccgcagcaggcataccttgaggcgtctttatgacgagcttccactcttcttcctgtccgggacgcaaacggtcacggaacacttcccatttcatgtcgagagcacgttccggctcccgcttcttcagttcaacctgatgactgtacatctcgccagctttcacaaaactgaaaagaatggtgattcccttgccatatgcttccttataagggaattccatacgaataatagtatcattcaactgcaacacacggctttcaatgcgttttctgtcacaaaagacatccatcagcacatatgcatcccgataagaagtccccaaaagaaaagcggcagggtactgtacatcaaattcctcattttctttataataaaagaaatctgtaaacgcagccggacgcttgtcactctttgaaaagagcatgaaactgtcactgccatatgccccgttattctcttcacgtcccaaactatcacgtacagaaagtttcaagcgatagttacctgaaggaagcttgttccaagccgaaaaatcctggagccgattggctgtgaaggtaccctccaatacaacatcatccaagggttcagaacctgcaatattccttgccccattttgttctgcaaatggataaaggcaataggaaccttcaatgtgctgaggaatattcattacattattcactccaaaagtgaaaagcatactgtcttccttacaaacatattgaggcaagcgaatatcaaaggaataagccttaggacctgccaacaagttatacgaagcggattgcgtttcaccggcctcatccgtcaccaccgcctccacatgataagtatacacactcccatacccgtctgtatctacagccggagcttccaaagtcaagggtatggaaaaatccccgttggtatccaattgtatggtgtcagacaataatggtttatcagcattgctccaataaccaggtctcggattccggcgagtcaccgtatatgccaatggcacatcctgcaccatcatgccattgaaggccttgacatttcctttcaacacaaccttgtcacccagccgataagcttccgaaaccggagtgaaggcaatctcgaacgtaggtcgcttgtactcctctaccctaaaagtgacggtagattgaggctctttggttcgtatgctgaacatgccattcaggcaagctgccggaagtacaaactccgtagcaaaagagccgaaatcattggtccgccccttcctggtggcaagttccttgcggttggcatccaacaagacaagctcataatcaactccttgtagtacctgggcactatcactattctgcttgtaagctatcccttttacatgaacggtctgcccgggacgataaagcgaacggtctgtcagcaatgccatctgcctccaatctgtatccttaataccgtaataaggatgattcatataaacgttctgcggcatcatggctgtgtctctgcctttacgcgccacataacttcggatttcactctgccagggtaatacagctttccccccggcatcagtcagtacctctgccatcgcttttctattcttctcatcataagaagagtagaaactcaccttggcaccagcaatcggctgtccactacgggcatccaatgtagccacttccatacggttgtcacccaaatccaatgtcagcaccttgaagcgggtagataccagaaatttatcatctgtacgggccgtttcagtatcaggtactatttgaagaatatagactcccgtttcccgaggaatcatgaacttaaatacagtgtccgaggcaagataagggacatcttcaggcaatttatccttgcctggcaacggctttaagccaaaatgcgtggaagaaaacttccgggcatactttctataagtatctttatttataccatggtccatccaaggtacttcacttaaagtagtggtatataagttgagagtgaagccctcgacattacgataatgcagcctcatattcaccgaatcgccgggataaccgctttcattcatagtcagaatgagttcaggctgtaaaatctgttcacggatatttttcaactcattgatacgcttatacgcaggatagcgcttcaagccttcttcacagacttttagagcctcatcagcgcgtttcggttccaaacggcgcaggtggttggctttatgaatgtaaacctcggcacaaacctctcgtgaaccgtattcctttatcaatttattcaaaacctcaagatattcccgattagccttttcctgacgcattcggaaagtaggataaggctgctggctgataccaccggtcaacttccagttccaataatcaagagaacagagcaacatagcatcttccgaaccggcacgatggcgataagcattcatcatatccagataaatcctttcgatacggatctgtaccaaagaatccacgctgaaaccatccagctgccgataagcatcaacagcacggcttaccaatagatggtacatatcgtgcccatagaaccagctaccgtcttccaacaccacaaaaggcacatattgttctgcagatgtattgagcaagcggatggaatcctgcaaggatgcacggttacacctatctattttatccacaaactggctgatactccactcacggatatcttctggaacctcgtcaacagtcagtaaagtacgtgacagcaagacacggcgattcttccgcatcaagtcagcatattcatatgccaacaaagaatgtagaatagccttgttcaccagattcctctccgattgtgcccaagattccatatatttcagactggagtaaaggctgtccggagtcagcccctcttgataagtctccctacaaatgtaggctttcaacatttgcggagcattctgctcttgccgacctttccgatagatttcatcagccagttttatcactgtttgaggcaggcttttcttttgagcctgctccacctgcttccacaacttatcgtacgtctgcgcatacaatgccgaagccccaaatgtaaccagcagcaacaatatgctacaaattctttgaattactctcataattattcgtttgttagtctttgtattaatccttaattccgcaacactattacaaatataactttttaagtacctgagcaacaaaaagttgctcaggaatttgccatgtcagatttttcacctatcttagtgttgcaaatcaaaatatgtatcaaacccgacagacatggcaaaggtagcaattaaatccgagaaactcactccttttggaggaatattttcaataatggagcaatttgactccagactctcatctgtaatcgactcaaccctcggtatgagatgcaggctgtatggttatcaatacagcgaaatcatccgttcgcttatgagcgtttatttttgtggcggctcatgcatcgaggatgtcaccactcatctgatgtaccacctttcgcttcatccgacacttcgcacatgcagtgccgacacgattcttagagccataaaggaactgacccaggataacatttcctacacatccgacactggcaagacctacgacttcaacacggcagacaagctgaatacactgctcctcaattgcctattgtccacagggcagctgaaagagggcgaggggtatgacgttgacttcgaccaccagttcatagaggctgagaagtttgatgcgaagcctacatacaagaagttccttggttatcgccctggcgtggcggttattggcaacttgattgtcggcattgagaacagcgacggcaacacaaatgtccgtttccaccagaaggacacgctgaagaggttctttgaaaggtttgaacaaaacaagcttattatcaaccgtttcagagctgattgcggctcgtgttctgaagagatagtggaagagattgctaaacactgcaagaccttctatatccgtgctaaccgatgcagttcgctctacaatgacatctttgccctcagaggttggaagaaagtggaattgggcggcattgagtttgagctggcctccattctcatcgagaaatggaaagggaaggcataccgtcttgtgattcaaagacagaagcggatagacggcgaactcgacctgtgggaaggagaatacacctaccgctgcatccttacaaatgactacgagtcttccgagaaagagattgtcgaattctataacctccgtggagggaaggaacgcatcttcgatgatatgaataacggattcggctggaacaggcttccaaaatcctttatgggagaaaacacggtgtttcttctgcttatggcactcatacgcaacttctataaattcatcatggcgaggcttgacgtgaagaggttcggactcaaagcaacaagccgcatcaagacgtttgtctttaagttcatctctgtgccagccaaatgggtcaggacatcaaggaagtatgtgctgaatatctattcatgcaacaatgcttatgccaatgtgttccagaatgactttggataacaccgacaacttatagtcgtgattttgcgtattgcctcaagtcgcatggtggggtaaggggcatttatatgtctttatggtgacattcgatgcactgtgccccctttttactaacgatgcagattcttttcgcttctgtatcatattaggcgcgtagttgcggatttgaggttaataacaaaggaagtgaataaagttcaaacaaatgtacttttggacataaaaaatcttattctactcctacaaaaaaacaagggatatgtttgcaaacatatcccttgtgctatacttaaatgttagtgtactcacatttggaggctataatatctcattgcctccatccaattcttaccagctgcggtaaaaatgtgcttaaatgaatttgcaatcttctttttcataatcttaaaaaattaaactaatacctgaaaactaaaattcaatacttcacgaaagggggggggggaatgcttaaagcattacgtaaccccaaatgttcttatcggcttcgccgacatgcttaaaaaaactctttaacattttcattttgttatcctcctaaaatcaatcttgttatccttaaaaaatctactagttttctattgttttcatgttttacaacacaaaaatagagcctttgttcaagataacaagcaaaaaacggatagaaaacatgttttataacacatttcttgacttaggtcaatttttagggagaaagtgcaaggatattgacataccattgtaataagtctgggacattctggcagaaagaggacaaactgtcacagacaaaaaaggcaggatacttaataaagcaccctacccctattcattacataaagtattctctacttttcaggagtctgctccaatgtagccaccaagaaatcatagaacttggaaacagtaggaattaacgcacgctcgtccggtgaatgcggagaacgcaaagtgggaccgaaagaaatcatatcgagtcctggacaattggcaccaataataccgcattccagacctgcgtgaataaccttcacggcaggttccacaccaaactgctgcttataggacagcttcatggcatgcagtataggagaatccacattaggctgccatccagaatagccaccactcaattccaccttcatacctgccatagcgaaacaagctgtcaggctgtctgccaggaaatccttcatcgtatcgcaagaactacgcgccaaaatacgaacttcggccttaccgtctgcaatgattacgatagccaaattggaggaagtttctacagtatcgggaacagtaggaatcatacgcatcacaccattctggcaagtcatcaacacgttaatcatattatcctggatttctgaaggaacaacggcagtgggtagagttacctcttctatactcagggtaataccactttcaatcggagcatattcgtcattcagttgtgcctcgtattccttcatataatcttccaaaccgtccatatcctcaggattgaacaccaataccgcatgtgcttcgcgagggatagcattacgcatattaccaccttcaaaacttgccagctgggagtcaaactcaatcagcaaatcatgtacgatacgtgccagcaatttattggcattaccgcgcccttcattgatttccaaaccagagtgaccaccacgcaaacctttcaacgtaatcttacgagctacgaaatcggccataggcgtctcctccttatattccaaagtggcagtaatatcaagaccaccggcacaaccaatatagagttcgccttcgtcctcagagtcaaggttcagcagaatttccccttgcatagtcccgggtttcaagccgaatgcaccatacattcccgtttcttcatccttggtaatcagggcttccaatggaccatgcttcaagttattatcttcgagcaccgccataatggcagccactcccaaaccattatctgctcccagcgtagttcctttggctttcacccaatcaccgtcaacataggtttcaatgggatctgttgtaaaatcgtgaatagtatcgttgttcttctgaggcaccatgtccatatgcgcctgaaggatgatgcctttgcggttttccatacccggagtggcaggcttacgaataataacattgccgacctcgtcgacaaatgattccaaccccaagccttttccaaaatcaataaggaattttgtaatcttctccatatgtcctgacggacggggaatctgggtcagtgaataaaagtgcttccatacattctgtggagctaactgtaagattgtactcataattctaaaaagttagttttcgcaaatataacggtttattctcggaaagtacaataaaccgggatttttctaaagtactaaatcatcagctatcttaaacatggcttttacatcttcacatattgcgatagaacatctgcacctaatatagctaccatatttaggaatttctcccacttctatatccaagcaacaatatcgtttaaagaaaccaatcttccaacaacctttaggcttcagtacttataaggaagtactgaagtacttgcaaagaagtattacagtacttttaaaggagtactctctataagtactgtctctgtcctctaacacaagaagtgacaatataggaacccaccacaagaaacgtctatttctttgccctattcgccaatgccaggtgcaacgacccgtagatgcctaacactatcaccagcaacgtctgtatgccatgcactatcagagcaaatatacccgcatccgtagcatttaccccataaagcatcatcatagtgatgacagcaaagtgccagggtcctgccccgttgggcgtgggaacaatgactgcaaacgttccgccgacaaacatcaccagcccggcaaggaaactaaggtgctccgtaaactggaagcaatagaaagttatatagaaatgatagaaatagcatagccaaataagtaaagtgtaaagaacaaacaaaggcacattcttcacattcttaagcgacatcacaccttcccatatattcaagactactccctttaccttttcaaaaaaagaaagcatacgcaacagaaaatagagaagtaccaaaacaccaataatagaaaaaaaagccacataaaaccaaggggaagtcacaagatgcaccagcgaaggaatcttggtgcccgtctcctcgaaaaaacggaaaaaaacgggcatctgcaccaaaaaagtaatccccgtaatcagcagaatgcaaagcgtatctaccaaccgctctgtcaccaccgtccccaaggacttcgcaaaggaaacattatcatatttggcaagtactccacaacgtgaaacctctcccacacggggcagtaccagattggtggcataagatacgaaaatggcatcgacgcaatcgcttgttttgggatgagcatccagtggctccaaagtctgcttccaacgccagcctcgtaacacatggctcatcacaccgaagaacaaggacaacaacatccaccaccagttcgtctgatgaaggagaacttcttctgcctttgaaaagtcaaaatcacgatatacccaatagaggataaaaccacctaataaaatgggtaagatgattttcaatgtcttttttagcagcttattcatacgatattcccaaattcttcattcttcattcttcattcttcattgaaaagaactacctttgctccgtataaagacaggttgttgttcacacgacagcctacgtttacggagcaaaagtaatgatttagttgatacatgagagtagttaaacctaaaaagtttctcgggcaacacttcctgaaagacctgaaagtggcacaagacattgccgacacggtagatgtctgtcccgaaattcccatcctcgaagttggtccgggaatgggagtactgacccagtttcttctgcccaaagagcgcaacgtcaaagtagtagaactggactacgagtcagtggcctacctacgggaagcctatccgcaactggaagacaacatcattgaggacgacttcctcaaaatgaacctgcaacggttgtttggcggacaagcttttgtattgacgggaaactatccttataatatctccagccagatattcttcaaaatgctggaatataaggacctgattccctgctgtacgggtatgatacaaaaggaagtagccgagcgcatagcagccggaccgggcagcaagacatacggaatcctaagcgtactgatacaagcatggtacaaagtggagtacttgtttacggtacacgaacatgtcttcaacccgcccccaaaagttaaaagtgccgtcatctgcatgatgcgcaatgaaacgcacgatttaggctgcgacgagaaattgttcaagcaagtagtgaaaaccacgttcaaccaacgacgcaagactctacggaactccataaaaccgatactcggcaaagactgtccactgacggaggacgtattatttaataaacgcccggaacaactgtccgtacaggaatttattcagctgaccaaccaagtggaacaggcattgagaacgattaatgattaatggttagtgattaaacacgaacaatcatggaaatagacgaagaatacatagacaaagtcaaaagcctgatagaacagaaagacgcggaaaacgtcaaaacacttttgaccgaccttcacccggcagatattgcagaactgtgtaatgacctcggcttggaggaagcccgcttcgtttaccgcctccttgacaacgaaacggcagcggacgtactggttgaaatggacgaagacatccggaaagaattcctggaacttcttccttcggagaccattgccaagcgtttcgtggattatatggacacggacgatgccgtagacctgatgcgcgaacttgatgaagacaagcaggaggaagtactttcgcacatcgaagatatagaacaagccggtgacatcgttgacctgctgaaatatgatgaagacactgccggtggtttgatgggtacggaaatggtgactgtcaatgaaaactggagtatgccggagtgcctgaaggaaatgcgcctgcaagctgaaaagctggatgaaatttactacgtatacgtcatcgacgatgaagaccgtctgcaaggggtattcccattgaagaaaatgataacttccccttctgtctccaaggtaaagcatgtgatgcggaaagatcctatctccgtccatgtagatacccccattgacgaagtggtacaaatcatcgaaaagtatgacttggtggcagctcctgttgtagacagtatcgggcgtctggtaggccagattaccgtagacgacgtcatggacgaagtccgcgaacagtcggaacgtgattaccagttggcatccggtttgtcccaagatgtagaaacggacgataatgtcatgcgccagacttctgcccgccttccatggttacttatcggtatgttaggcggtataggcaactccatgatattgggtaacttcgacacgactttcgccgcccatccggaaatggccctttatattccgttgattggtggtacggggggaaacgtgggaacccagtcgtctgccatcatcgtgcaaggccttgccaacagctcactggatgccaaagacaccttcaagcaggtagccaaggaagcagtagtggcggtcatcaatgccaccatcatctccctgctggtatacatctataattttatccggttcggagctacggctacggtcacttattccgtctccatcagcctctttgcagtcgtcatgttcgcctccatcttcggaacgctagtccccatgactttagagaagctgaaggttgacccggccattgccaccggcccgtttatctccatcaccaatgacattataggcatgatgctgtacatgggtatcactgtcttactgtcataaaaacaagaaaatagaaaaaaatcaaggcaaattgtatgaagtaatcattttatttcattaatttgtagcctaatgtaacccgaacgggaggaacccgtttctaaaaaagtaaatacaatgacggacactcatgacactaatctccccgaaaagccggtggaattagaagaagaaaagaagacagcagaggtttctgaaccggcaacaacagaaactcccgctgaagaaatcgtttcggaaaagccggtagagccagttcagaagctcacgaaagaggaaatacttgccaaactcaaagaggtggttgcagacgtggagaacgtggcaaaacctgaaatagacggtttgaagcaatctttctacaagctgcacaatgctgagcaggaagcggccagaaaactgttcattgaaaacggaggcgccgcggagaactttgttccacaaacagacagtgtggaagaagagttcaagaatatcatgtccgtcatcaaagaaaaaagaagcgcactcacagccgaactggagaagcagaaggaaatgaacctgcaggtaaagctttccatcatcgaagagctgaaggagctggttgaatctccagatgacgccaacaagagctatacggagttcaagaaactacagcagcaatggaacgaagttaaactcgttccgcaagctaaggtcaacgagctttggaaaaactaccaattgtatgttgagaaattctatgaccttctgaaactgaacaatgaattccgcgaatacgatttcaagaagaatttggaaatcaagacacatctctgtgaagctgccgaaaagctggcggatgaagcggatgtagtttcagctttccatcagttacagaagctacatcaagaatttcgtgatacagggccggtagccaaggaactacgcgacgaaatctgggcacgtttcaaagctgcctctacaaccgtaaaccgacgtcaccagcaacatttcgaagcgttgaaggaagtggaacaacacaatcttgaccaaaagaccgtaatttgcgaaatcatagaagccatcgactacaaagaactgacaaactttgcttcttgggagagcaaaacgcaagaagtcatcgcacttcaaaacaaatggaagaccatcggtttcgctccgcaaaaaatgaacgtgaagattttcgaacgtttccgcaaagcgtgcgacgagttcttccgtaaaaagggagagttcttcaagaccctgaaggaaggtatgaacgaaaacctggaaaagaagcgtgccttgtgcgaaaaagcagaagctcttaaggacagtaccgactggaaagtaactgccgatgaactgaccaaacttcagaaagaatggaaaaccatcggtccggtagcaaagaaatattcggatgccgtatggaaacgtttcatctccgcttgtgactacttcttcgaacaaaagaacaaagccacttcttcacagcgcagcgtagagcaggaaaatctggaaaagaaaaaaaacatcatcgagaaactgaatgctattgatgaccaaatggatacggagggagctacccaattggtacgcgacctcatgaaagagtggaacggcgtaggacatgtacctttcaaagagaaagaccgaatctataagcaataccatagtcagatagacaaattgtttgaacgcttcaacatcagtgcctccaacaagaagctaagcaatttcaagtcgactatcagctccattcaggaaggtagtccacaagccctttaccgggaacgtgagaagctggtacgtgccttcgacaatatgaagaacgagctccagacatatgaaaacaatctcggcttcctgaccacttcttccaagaagggaaatagtctgctgacagaaatcaaccgcaaggtggaaaagctgaaagcagacatcgagcttgtgaaagaaaagataaaagtggtggacgagaacatcaaaaaccaaggataacgtaacaagataagacttaataaaaaaggaacccgcccctacagctatgcagccgtgggggcgggcctacttttataccccttatcaatgatggaacagacggatacccgtgaacgacatggcaatgccatatttatcgcaagtttcaatcacatggtcatcgcgtacagaaccacccgcttgggcaatgtaatctactccactcttatgggcacgctcaatattgtctccaaaagggaagaatgcatccgaacccaaagaaacacctttcaatgtatccaaccaagcccgtttttcttcacgggtcagcacttcaggtttctccgtaaagaactgctgccaaacaccgttagccagcacatcgtcatggtcttcactgatatagacatcaatcgtattatcacggtcggcacggcagattttctctacccatggcaaattcaacaccttcggatgctggcgtaaataccaaatgtcggccttgttgcccgccaagcgagtacagtggatacggctctgctggccggcaccaataccgatagcctgaccgtccttcacatagcatacagaattcgactgcgtatatttcaaagtgataagggctatcatcaaatcacgtttcgctgcttccgggaaattcttattccgagtaggaatattcgcaaagagttcatctccattcagctttatctcattacgtccctgctcaaacgtgataccaaagacatccttatgttcaatcggggcaggcttatagccgggacttatctgaatcacattgtaagttcctttacgcttttccctcaagatagccagtgcttcgtccgtataccccggagcaataacgccatccgagacctcgcggttaataaaacgtacagtagcctcgtcgcacacatcactcaaagcgataaagtcaccataggaagacatacggtcggcaccgcgggcacgcacatatgcgcaagcaagcggagagagcggaagattatccacaaaataaatcttcttcattgtctcgttgagttccaagccgatggcggcacccgccggactgacgtgtttgaatgaagttgcagcaggcataccggtcgcctctttcagttcctttaccaactgccatccattcaaggcatccataaaattaatataccccggacgtccattcaaaacctcaataggtaactccccctcctgcatgaaaatgcgagccggcttctggttagggttacagccgtacttcagtgctaattcttttgccataaaattctgctttaatgttgaaatgctacaaatttacagaatatttccggcttacagaagccttgtcactgaatttgccaccgaatgcctacactgaaattttcgtacatggtcgaaaagcaacaaaaaaccactaaaacttgcgattttagtggttttttgacttaaataaggtaagttcgttgggctacctggattcgaaccaggaatgacaggaccagaatctgtagtgttaccattacaccatagcccaattgttattatttccgttttgcggttgcaaagatacaaagatttctataaatcaaaacaaaaacgagtatttttttcgcaaaaaactgataagataccgtaatccaaaggattatataactaaaaaaaatcaaaaattgaaagagttttcctcttttgcgtgtttgatatgagaaatcaacgtatatttgtcaactgttttaatataataatgtataatgaacgaaacgaagaaactgattcaactgataacagaaggtattcaagataaaaaaggaaaaaaaatcgtcatcgcagatctgacaaaaatcgacgatacaatatgcaattatttcgtcatctgccaaggaaactctcccagccaagtgacagccattgtagaatccatcagggacttcacacgcaagggtgccgataccaagccctttgccgtagacgggctgcgcaatgccgaatgggtagctatggactactcggacatattggtgcatgtcttcctgcctgaaacaagggaattctacaatctggagcacctatgggcagacgccaaattaactcaaattcctgacctcgattaatcaaaacgtatggacaataataccaacaagaaacccaataaagtgaatatgcccaagttcaacctgaactggctgtatatgattatagcgatgatgttgctggggttgtacctgaccaatgaaagtggtacggcaactaaaaacatctcttatgatgaattccagcaatatgtacgagacggttatataagcaaagtcatcggctacgacgacaattccgtcgaagcatacgtcaaaccccagcacgtaggaaacgtatttcgccaggactccagccgcgtaggcaagaatccgcttattacgaccgaggccccctcacgcgagagcctaggtaatttcctgcaaaaggaaagagacgacgcccactttgacggctccattaactacgaaaaaaagcggaactacttcggtgccattttgtggcagattctcccctttgcattccttatcggtttctggattttcatgtcccgccgcatgagcggtggtggaggcatgggcggaggtggaggcatcttcagcgtaggaaagtccaaggcccaattgtttgaaaaaggttcccccatcaagattacattcaaggatgtggcaggacttgctgaagccaagcaagaggtagaagaaattgtcgagttcttgaaagagccccagaaatataccgatttgggaggtaagatacccaagggcgccttgctggtaggccctccgggaaccggaaagaccctgcttgcaaaggccgtggccggagaagccaacgtacctttcttctctttggcaggttccgactttgtggaaatgtttgtcggcgtgggagcttcccgtgtccgcgatttgttccgccaagcaaaggaaaaagcgccttgtatcgtgttcatcgacgagattgacgctgtagggcgtgcccgtgccaaagcagccgctatgggtggcaacgacgagcgcgagaacacattgaaccagttactgaccgagatggacggtttcggctccaatagtggtgttatcatcttagccgccaccaaccgtgtggacgttttggataaggcattgctgcgcgccggacgttttgaccgccagatacatgtagacctacccgaccttaatgagcgtaaggaagtattcggtgtacacctgcgccccatcaagatagacaatagtgtggatgtagaccttctggcacgccagactcccggattctcgggggcagacattgccaatgtatgtaacgaagcagctttgatagccgcccgccacggcaagaagttcgtcggaaagcaagacttcctggatgccgtagaccgtattgtggggggattagaaaagaaaaccaaaatcactaccgaagccgaacgccgttccattgctatacacgaagccggccatgccagcatctcctggttactggaatacgccaatccgctgattaaagtaaccattgtaccccgtggacgcgctttgggcgcggcttggtatctgccggaagaacggcaaatcaccactaaggaacagatgctcgatgagatgtgtgccaccttgggaggacgtgccgccgaagacctattcttaggtagaatatccaccggagccatgaatgacttggaacgcgtgacaaagcaggcgtacggtatgattgcctatctgggtatgagcgaaaaactacccaacctctgctattataataatgaggaatattccttcaaccgcccgtatagcgaaaagactgcggaattgattgacgaagaagtgaagcagatggttaatgaacagtacgaacgtgccaagaaaatattgtccgaaaaccaagaagggcacaaccggctggcacaactgctgattgacaaagaagtaatctttgccgaagacgttgaacacatctttgggaaacgtccatgggcttcccgttcggaagaaatcagtgcaaacaagactgctgccgaactgaaaaaagcggagcaagaagaagagcaaaaagccatagaagcagaaaaggaagttaaggaagaagaaaagcatgaaaaataactttatccaacgtgccgttaccggcgtgttattcgtcatagtattggtgggctgtattctttacagccccctttcgttcggtatactgttcaccattatcagcgcactgagcgtacatgagtttgcccaattagtcagcaagagcggcgaagtaagcataaacaagaccatcactgcattggggggagcctaccttttccttgcattgatgagtttctgtacccagcagtctgtaggagcacgagtattccttccttatttgggactattgctctacatgatgattacggaactttacctcaagaaaaagaatccgacgggtaactgggcctactccatgctaagccaattgtacgtggcactcccctttgccctgctgaacgtacttgcttttcagaattccccggaaacgggcagtgtgacctacaaccctattctaccgctttccattttcgtatttatctggttgagcgatacaggtgcctattgcgtaggttcgctgataggcaaacaccgtctgttcgaacgtatctcacctaaaaaatcctgggagggcagcatcggcggcggaatattctccatcgcttcctctcttggctttgcacatttctttccttttatgccaggatggcaatgggtaggtttggcaatcgttgtcgtcattttcggcacttggggcgatctgaccgaatcactcatgaaacgccaattgggcatcaaggattccggtaacattctgccggggcatggagggatgctcgaccgtttcgacagtgccctgatggcaattcctgcagcagttgtttatctatatgccttgacgatgttctaacgacggctcacatgaccaaacttacataaaacagatataaaaagagcacccgggcaagatgaatgacatcaaaatcacgggtgctctttctaactatatactctcgcaaactctttcttacttcaactgcatattggacaaatccacattagtagtcagcttttcattactccccgcagttttcaaatcaaaggttacttccacctctccattctcttctgaattgagtttcaacttgatgcctttggtttcagaggggatgtccagactgttcaagttataggagacagcaccaggactacgacgtcccgtcaggtcatcatagtcgttatagcggagttccaaatggacgtatccatcttcgccatacaaagtatcatcttcttgcggacgcaccaggctgatacggtgtttattatcagtcgaagatggcaggttctgcatgaaaaaaatgttcatatagccaccactgatggtaatatcacctttatatatacgcacggggtcattaccgaattcctcttcggtttcgggagtcagcgtctccacctctttcgtcaaaacgttctgcagacgcagcagcttcacagcatgatcatatcctgcatagtcgtcccacaaaggattgaacacggtaatcacacgctgcccatccacggcatcataccaccctatgtccgtattcaccggccagagcgtcccccaaacatcgcagtttaaataaaaggcatttcccgtaacacgcacagtggcccacaaaggcggggtaaaatcacccaaagaatatccgtcgttatcatcacatgattgcaaagcgggcatcactgccaaacatattgccataaataaccaatgtagctttttcataatccttaattccgcaacactattacaaatataactttttaagtacctgagcaacaaaaagttgctcaggaatttgccatgtcagatttttcacctatcttagtgttgcaaatcaaaatatgtatcaaacccgacagacatggcaaaggtagcaattaaatccgagaaactcactccttttggaggaatattttcaataatggagcaatttgactccagactctcatctgtaatcgactcaaccctcggtatgagatgcaggctgtatggttatcaatacagcgaaatcatccgttcgcttatgagcgtttatttttgtggcggctcatgcatcgaggatgtcaccactcatctgatgtaccacctttcgcttcatccgacacttcgcacatgcagtgccgacacgattcttagagccataaaggaactgacccaggataacatttcctacacatccgacactggcaagacctacgacttcaacacggcagacaagctgaatacactgctcctcaattgcctattgtccacagggcagctgaaagagggcgaggggtatgacgttgacttcgaccaccagttcatagaggctgagaagtttgatgcgaagcctacatacaagaagttccttggttatcgccctggcgtggcggttattggcaacttgattgtcggcattgagaacagcgacggcaacacaaatgtccgtttccaccagaaggacacgctgaagaggttctttgaaaggtttgaacaaaacaagcttattatcaaccgtttcagagctgattgcggctcgtgttctgaagagatagtggaagagattgctaaacactgcaagaccttctatatccgtgctaaccgatgcagttcgctctacaatgacatctttgccctcagaggttggaagaaagtggaattgggcggcattgagtttgagctggcctccattctcatcgagaaatggaaagggaaggcataccgtcttgtgattcaaagacagaagcggatagacggcgaactcgacctgtgggaaggagaatacacctaccgctgcatccttacaaatgactacgagtcttccgagaaagagattgtcgaattctataacctccgtggagggaaggaacgcatcttcgatgatatgaataacggattcggctggaacaggcttccaaaatcctttatgggagaaaacacggtgtttcttctgcttatggcactcatacgcaacttctataaattcatcatggcgaggcttgacgtgaagaggttcggactcaaagcaacaagccgcatcaagacgtttgtctttaagttcatctctgtgccagccaaatgggtcaggacatcaaggaagtatgtgctgaatatctattcatgcaacaatgcttatgccaatgtgttccagaatgactttggataacaccgacaacttatagtcgtgattttgcgtattgcctcaagtcgcatggtggggtaaggggcatttatatgtctttatggtgacattcgatgcactgtgccccctttttactaacgatgcagattcttttcgcttctgtatcatattaggcgcgtagttgcggatttgaggataatcaaagtccttttcatttgtttctgtatggggcatagaacgaagcggttttttcaatggtcgggaaaaatgggcgaaaggttttgaaaaccaaagggtttaggcatgatcgggaaaatgggctgaatatttcgaagcggtttttctctttacatggcttacatctgctttacgtttgaggggcttttcttcggatattcgggggattgctttacatcgggcttgcagatggggctaaaacggcctggaagggttttattttcggctgtgtggccgttttatggctgggttgatggattttgttatatgatggtgtgaacggctgtgtggccgtttttttgtgcctatttttaaagatgttgccttaaaattcttccaaataagtattatttggtatatttgcagcataatagaaacgaatatggcaaaagtgattcatgtgcatttgctgcataaaatagacgggacgaagcagaaagattggtatttcagcagtatatcggctgtttatacggttctgacggcagatcaggtgggggcaaccaagaattacctgcttcatgccgggctgtctggtaacggcacaatatgcacgaaaaaggctataattaagcaatctacgctcatctcgggtggtagtaagggaatggttagaacgatataatagcgccgttagaaaggcttgtaggcgttatttctttgaatgctgattggggagcttatggctccctttttttatgcccctacggttggttttatttggttaggggttactattggggttactgttaggggttactacttctttaagttaggggttactttaggggttactttttcagttctcagagggtacgcccgaaataggaaactatgttataaatgaaagcaagtgccgtttttctctgttttcagagaggaaaaacgacacttgtttgtgtgatataccttattataataaaataaatcctttgatttacagtgtatttacgagtttgcttcaggtaaattccttcaaaagtgtgtgcgtgcgtccttttttagccttctgtaggaggcatgcgtgtaccacttagaagaacttgctgatacttccgattacttcaaagacattgatgatgcgtgatttgtcgaattcctgttcatcgtagtcattggtgttgatggggatgaagcgcagcttgtccggatccggcgacctgcggaggattttaatggtgcggatggtatccaacaccactgcatagatttcgccatattggatgtcgttgagtgtgcattggtgcagggcaatgatgtcgccatggtttattttgggttccatggagtgcccggtgacattgcaccaaaggctggctttttcgaatccccttattacaatgttggtggcaggtatgtttacctgtgaattaaacacttcatcaaagcccccgataaagtccacatcgtagtatggtgtaccgatggatgggttcatagatgtggtaggcagagtcgaagaatttgcttcgtctattgttttaatgccgttcaaatcatctttcaacatgcttcctgcaccagtaagtaaccaatcggcagataattccggataggctaatagaattttttcaatattcattgagctcatgcctttgccagacacctttgctttcccaataagtccaacagaaagaccggcattaacagtcatttgattgtcatttatgccctttttctccatgaaatattgaagtctttctataaaattcatatccttatattgattttcttccatatttagtttgatgtattgaaataattctatatatttgcagcgtgtttaagatgtaaacagcgcgccaaatatacaaaaaaggcgtgtgattagcgaattttaaggattaaagaaaatgaaagcaaaagtaattatagctcaagcaacagccgagaccgccgaagctctttacggactggtcaagaagatggtagatacaacagcaatcaaggcttatcccagtgtagattatcaggcagttttcttttcagctgatagatacgacttagactttgtaaaaagagtattggcggataagtgcttttctttcaaaattgaagatgcagaataatacaataaaataagtgagtttatgacacagcaagaatttatggaacggacggggataacccctacagcagaggattttgattacatccatgcggtttatctgaacacttcgatgaacaaggatgagttctgcaaagatttcaagaaacatggggacagccggattatccgcgatgttcatgtgcgagtgctgaactatgaaatgaaatgtgaacgtcaaaaggaagttatcgacaacctgaccgattttctgattggcaaggcacatgcgtatgacgataccgatttccgcaaagaagcggtagggctggtcggtgagatggaagtggtgaaacggaccattgaattggggcttccgctttgggatgaagacaggatggttgtcctttcgatgatagaagaacaaggcaaatagattgccggataactggcagcccggaaagacgggcaggggcggcaggcacggccggagagttggtaaatcgaaataagaaagcgtagaaagccgtcggggttcgattccccgcgccccacgatataaacttttaaaatttagagttatggcaaagaatttcaatccgagaacagcagagagtctgttcaaacagaagttgcgcacgatgataggcagtacggcacatacgcagaatattgccgaccaggcgatggagctggctggacaattcatgacggaggatgagataagcaactcggatgcctaccgggtgatagagaatgtgagctgtgtgtgtgaggaagcgatgcaggtgctggtcgaagaactgcagaaagggacacgccttcatgaaatactgacgggtgattaggaaatagcggaagccgttgaaaacctttgaacgaacgataacgattaaaaagtatgacgatatgagaaagcagattttgacagataacgagaccaagaccttcttgatgaagacattcggatgcagccgtcaggctgtgtggcaagcactgaattttgtccgtgacagcgatcaggcgcgccggatacgcactcttgccctgaagcgaggcggcaaactgactgacgggaacttcatcccgaactgcgaaaccaccttcgaggagtgcgagaagaccatgacctgcactttcggtccccgtgtaaaactcgtggtccacagaaagaccaatgatgtggatgtgtacgtggacggaaaacggactgaaacctaccaatgtgaatttgtatcggatttcatgcagctgcagcacgagacccaacagatggcatctgccttataaatagaaatgaaatggagtattatggaaagatattgtgcatatcctacaatgacctgacttacgatgaccgaccggtgatggtgaacggaaaggcagactacagcagaagccgcacgctgaaaggagttcatccttccactctttccgaagaagaacttgctcccatcatgtcgatacccaattacaagaagttagcggcaaaggagaaaatcaatgtagttcgatccggaagaggtctgggaggttacgttttggtagaaatagccaccatgcccctacggtttcaggaaaggataaaactaaaatacggagatatgaaagaagacgtaataagaaactggctcggcagccattaccacatcgatgcgaaagcccgggaattttacacccggttccgttttgacaacggagatacactgccaccggaacacatccaagaatatacggtaaacgcttcggtaattgaggcagtgatgcgtgccatggaggatgccacgtttatgcgaaaggccatgaaggccgggccggtgaactggggcgaactggcaggagccatcagttactaccaagcagagttcggacataccttgcctgtcagttccaaccgcttcaagaagcgtgtgaatgacttcaaggccaacggctatgaaagccttatcagccgcaagttcatgaaccagaaccgccggaaagtgacctatgacattgaacgcctgctgctgagcatcgatgcccaaccggagcagcccttcaataccaccgtgtgggaacagtacaatctatttgtgcaaggagaactggagctatatgaccccgaaaccggcgaggtgttgaatccggcagactttaccgacaaggatggaaatccgctggtattgagcccggccacagtagccaactacctgaacaaccccaagaacaaggcccttcgcggtaagctgcacatgagccaatgggatttcaacaatgcctaccgtccttatcatctgcgcagcatcggtgaatattccttgagtaaggtttctcttgacgaccgcgacctgccgcgcccaatgaaggatggcaaccgagtgaaagcctattatgcctacgatgtggtgagcggtgctgtggtgggatatgcctacaaccggtacaagactaccgagttatttttagactgcatgcgaaacatgttccagaccctggaccggaacggcatgtatatccccgccgagttagaagtggaacaccacctggtaagcgactttgccgacggattgatgcaagccggtaccgtcttccccctgatccgctggtgtaaccccgggaactcgcgtgaaaaacgtgccgagcacaagaaccgcgaaaagaaatacggtgtggagaaacgcacgcaggtaggtatcggccgatggtatgccaagctggaggccaaccgcccgaaggaagaaaaggtgtatgacgaaaagaacaacacctacaaggtgaagacctatagttatgaagaattggtagccgatgatatacgcgccattgagaccttcaacgcacagcctcaccccaaccaaaagcgctatccgggcatgagccgttgggatgtgctttgcgcccatcagaacccgaaccttgcaccttgggacaaggccgttctttaccggttcatcggacagcacaccgaaacaaccatccggcagaacacctactgcacggtgatgtacaaccaatacggactgcccagcccggaaatcatcgaaaagctggagccgaggaactacaaggtagatgcctattatctgcccgatgccgacggaaccatcaacgaggtatatatctaccagaacggacgatatatcgccacctgcaagcccgtagcccgttacaatgagaatacagccgagcagaccgagtacgacaaggcagcctataccgaacagtccaagtatgtagctcaattcgacaagatgatgaaggacggcaagatcaagcgtgtgggcatccttgccaaagaggaggcaaagctgataacagaggtacaggcggaagccgttccccttcctgcacaagccgaggaagaagattactcagcctatatggacatcagtgccttcgagcatgatgcagtagccaagatataattaacgacgttagaacgaatttaaaacagcattcaaatggaaataacaaatgaagtaaagcaacgtattgtggcagcgatagccgccgaccgtgaaaattatcccagtgacaaccgccatgccacggcactgggcatagcccccagcgtttacaatgccatcaagcggggcaattatgaaaagcaggtcagtgatgccaactgggtaggtatagcccgaagattaggcgtgcaactgcgtacagaaataccttggctggcagcacagaccccgacctacgtgtttgtgagcaagcagctggaagtgtgccagggaagcgggctgagtgccatcctgtgcgatatgcccaatatcggcaagacctttacagcgaaagcttacgtgaagcagcacaagcacgccgtatatgtggactgcagccaggtgaagaccaaactgaagctgatacgctacattgccaaggaattcggtgtgaccagcaacggacgctatagcgacgtgtatgaggatctggtggcctacctgcgcacgattgatacgcccctggttatcctggatgaagccggggacctgcagtatgaagccttcctggagttaaaggcgctttggaacgctacggaacgctgctgtgcctggtatatgatgggtgccgacggattaaaggagaagatcaaccgcgccatcgaaggcaagaaggtgggctataccgaaatgttgagccgctacggtgactcctacagcaaggtgaccccggacgatgcgcaggaacgcgaaaagtttctgaaggcacaggctgccatcgtcgcaaaaatcaatgccccggacggtgccgacattgccaagattgttcatagcaccggaggcggcttgcggcgcgtatataccgaaatcgaaaaattaaggaggatgcaggcatgataagcaagatagaaatgcaagcgatggatgctgttatcggtatccatcgcgagatgagaaaagcgaatgagatagactgggaacagcgcagatatgaaattgccaaaagcatgcttccggtagtaagaagcaattcatcaggtataatgtctataaaacaagttgccagacttgctgtggactatgctgatgctcttattgaagaattgaaaggaggtaaccgtgaaactgaagagagcctacagtcccggtgaggtgctgaacatgaagattccccggttcgagttttccggggactggcaaacctcgataggcaacccggccaagagcggcgtgtggattatttggggagccagcggaaacggtaagagcagctttgtgatgcagctggccaagtacctgtgtagcttcggacgcgtaatttatgacagtttggaagaaagtaccggtttgtcgttccagatgagcctgaaacggcacaagatgggtgaagtgaaaaagaagctgattatccttgaccgggaaccgatggagcaattggaggaacggttacggcgcagaggcagtcccggaatcgtgattatcgacagcttccaatacagcggcttgaactacaaaacctacaaggagttcaaggaacgtcatcccaagaaactgtttatcttcatcagccatgccgaggggcttcatccggcaggtagaagcgcccgcaaggtggaatatgatgccgatgtgaaaatcatggtaagctgtttcaaagcctggtgcaaaagccgctttatggagcggcccggtgagccctacgtgatatgggaagaaggtgctgccaaaacattgaaggacgataatatggaggattatttgaatgatggaatgggagaataagctgtaccagatactcctgaaagaacaggaagcggaggccgtggtggacgattgggtagaacgtaacatacaaagcgacctccgtctgcgcagggccaagacaaagggacacgtagtgatagaaaccagggatgtgatgtttgctcggaatattcaggtatggcatccgtcctgccaaataaacattaaagatttgaagtgatggaaaagaaagaagaaaagaaagtgtgctgcatctgcggcaaagagtatgagggctacggatacaatccgttcccggtgaaagaagaaggctgctgctgccaatcgtgcaactacagtgtggtggttccggaacggtgggaacgacacaaggcttttcaacgtggtgaagcgaccggtgccgggaaagtgtacatcagcggagccatcgcgcactatgatatgaatgagcgcaaggaagccttcagccgtgccgaggagaaactgatggcacaaggctatgatcctgtaaaccctttcaggaacggattgccggatgaagctcattggagagcccacatgcgggccgacattgccctgttgctggcttgtgactatatctacatgctgaaggactgggaactgagcaagggagccaaactggagcttgacgtagccagttcgtgtggcattaaagtattgtttgaataaccttttaatagtgaatgtatggaagaaaaacagaaagttcaggtcgtatttgaatttgaccgttccgagtatgacgcgtatctctttttgatgaatcaaaagaagacgaaagaggtagagcaaatatggaacaccatgagcggtgagcctgtggttgcggatattgatttgtttgaagaggacagccagtctgtaaaacttatgatgataagtttggcaattctttcagtggagaaaaaagtgaaaggatgatatggcacaggaagtaaccaatttcgcccggttctatgcattgttcaacaaactgccttatcagggcgatcgggaggaattcaaaaaacaaatcgtgctgcagtacacgtggaaccggacagacagtctgaaggaaatgacggccaaggagtatgaagtttgttgtactgctctggagaaactgagcggacaagacgaatggcggcagaaacttcgcgaggaactgcgacggaaacgcagcgtctgcctgaagctgatgcaacagttgggtatagacaccaccgactggaaccgggtgaacgaattctgcaacaacccccggatagccggcaagccctttgttcaggttagtacagccgagctggaacaactggccatcaaactgcgggctatccaacgaaaaggaggtttaaccgataaatagagcaatatggataaaaaagcacatgaagcgcttgagcgcataagaaaagacgtgacccttacgacatccgatatggagaaccaggatgcagcggagtttttcaacgaactggccgactgggcgtatgccaatggggaggccatgctgatagacgatgaaccggaaaagcaggatgattatgaggatagatgaccaagacaagctgataaaagcggggttctgtataatacgaaaggatgattatccaggcccgaggataaagatgtgtaccggcataaacggtggctggaagacatacaagaagtttgaaaccaaagcagaaagagacaggacattcgctttgctgctgaaggatgacaaagtaatagctgattaacaactaaaatgatttaaaatggaaaagaacaatcaaagtgtggacatcaagtccctgagtaaagaacagcgagcagccctcatggcccagctgcagcaagaagagaaagaagaccgcatcgcccgtcgtgaaacttacgaggcattacgcggtgagtttatgcacgaagtaaagaccaacgttcttgagatggtgaatgccgtgaccgggttccgcggatggctggaaaaagaagccgatgcctttaccaaggtgatgaaggaatacggccaggtgaaaagcgacgaacagcgcagctataccattacggacggagacttccgtctggaagtgaaaagcaacaaggtgaaaggcttcgatgaacgagccgacatggcagccgaccgtctgattgactatttgaagcgctacatgcagaacagcgagaaaggttctgatgatccgatgtatcagatggccatgaccctgctggagcgcaacaagatgggcgacctggactacaagagcatttcaaagctgtatgaactggaagataagttcgatgaagagtatgcagacatcatgcgcctgttcaaggaagctaatgtagtgcagcgcaatgccaccaactactacttcagccgccgcaaccctgaaaacggcgtatggacccgcattgaacccagtttctgccgtttgtagccgaaacccgttaaccctataaacagaaagcgccgcagttgttataattgcggcgcttttgttcttaaaatagatggaaatcagttatttttgtaagagaaataaaatgtatgggcaaaggacgggataaagaactgatcaagctgcgtgacgaggcactatgccgtcgttactactattggacagaaatacagcggttgcggttcgacgatgctttaaaagtgttgtcggagcgcgaattctttatatccgaggaacgtatcatgaccatcatccgccggaaatcacgtgagggaacagactacaatctgaagcctgttcccaaggtgaaagccccccgtctgactgccgcccagctggaactattccccataagatgacggcatggccgattcatcgtgcagtgtgaatgagaacgtcatttcatagaccttgatgtaatgcggcatggcatacgaacggcttttctcgcgtaccagcggcgaagcgttgtccgtgcattgcagacactgcagcgacttgtataatttcttggccagctgctgcctttccctcaccttgtcatacgtgccggatgcgtagcttgtatcgtcgtaacaatcgatggccagccggacggtcagtgcggattcgcttttctgtgccccgtatccgaggtcgtgccagtcggagtttgtatttccgattaatacacaagggaaagtgaccgggtactggtcttcttctgctcccatttccaattgtccgtagtcctcgtcgatgagagagagttccggcatttcctgtgcaatctgttccatgattgcgataaaaatttcgtccatatcgttattggtttaaaatgttggtaatttcctggtccaccttttcccggatacgccggttcaattcttcgctttcgcccatgaactggcgctgcgggatgcggatgtgcagtttctttttttgggtaagcgccatgttcctccagaactgtgcctgcggattcagttccttcggcttggaacgtcgtttgacgcgtttcttttgccctgtgccggttttttttctttttcccgaagccttgtagaacttggcccatgcaaagcgcctcatgcggtctgtgacggtgacatcgatttccccgccccagttgttgatgggtgcatagaccacctcgttgaatacccttacccggtagtctgcaggtgtatatccgaccgatttgaacagatgtttcctgccggagagcagcgttccataattgctggcggcatcggaacctcccgaggacagccgtttggctttgggccaagggtgaagaccgccattgacaaatccaccctgccggaagttatcctgaaaatggtctttggccattcgtcctaccatgactggcattttgcggcgcatcatactgtccagcctgtcacgtttccgctttatcatttccgtaaaatcttttatgtccataatcatcagtaattcaagaataatttataactttgcaaccgaggcttccaatatgccttttatgcgttatgaatataccggaacaagtaaagaacgaggcccgtgtacttattgagcaatacggtgacaccttcgaataccttggtatttatgaaggccaggaagcctatgtgttcaagtttccgggggactcctgtaccggttatcctttcgtctatctgtatgacggtaaagacgcaaccgaaataaccggtccgttatcccttgacgttatcgattcatgtatcgaaaatatcgaggaaggagacatcgaatagcttattgtcaattctcaggactcccctgcagttgtgggaagtcgcagctcctatttcacataaatattttacgtctttccattccattcctgaaccggcagaattatcgctttggggttcgatataccttagttcaccatccgcaaaccgttgcaggattgtagcatgacctcctccacttttccagccgatgcacaattcatacacgccttcttccttacatacctcattgaaatactccatgtaccttttaggggtcattttcaggtatcctttgtgcgcaagccagctgtttatacttatatgttgcgccggagtaccgtcggtgtttttccagacttcaaaagcacgtccattactcagatattcaagtttagaccctgcgacattgcctttggcggtaatatcccatccacgtaatcgtaaagcgtatgccggtgcgcaagtctggcagttgatactgtatggagtatcccgttttttatcgtaatcgctgttcttccggtatctgtttccccttttatcgcggtatattcctttggaatccaaaatatactcttccacatgtttgggatttgcattctgtttgtccgccttatccacatccataggttttccttttttgattttaagagccttttccatttcgaggttgttccgggcaatggccattttttcctccccggtaaggtagtccggcatttccgcaatcatctcgtcaatacgggccataagtttatccaccgctttttgggcacccttgtgggcttctgcctgatatggatgattgtcggaaaacagtttgccgtccgttcccggattgttatccagtccgggctggggcttgttcttgtcgtcttcgtccggaagtggtgtcggctcctcgtcggtggcagtgaggtcgcacttgcagttccaccggtcgcccggtcggtggatgttccagaacgtgtcatcaatcggccggatggtattccagaacgggcggtggtcagcccccggatgaatggaggtggacggtagccatttgaggttgggcagaatatcgcgttcgcgcaggaactgttgccagtcagccgcctgatgcgcccggatgaccgccgtatcatactccgtccgcagccagtgacgaacctgatgggaagcaatgggcaagacttcctgtacccatttgtcgaacggttttaaaatgccgtttgaatccaataaaagtcgtgccatgtcattctgcatacgatgtaccttgaatgccgagaatacggcattgttccggagtatggcatttctgaaatcctcgtccggagtaatggccttggatttgctgaacccttcctttgccgccttgtccatctttgcccatatttcattgaacaggttgatttcgatttcggttgccggatgaaagtccctgctgtatatgttcagcaaggcacgccgcagcacctcttcggagaagtcaaactccatggagatgctgccattatcagccgcatacagtctgtcgactaccagtctaaagctgccccgtctgccggggctttcacgaaaaaacctttgagccagttccggaagtttcttttctgtttcggtgtcggttcatcatcccgtcccttattcgctggctccggctccttcttcgggcttggaatctggtcggcttgttcagccgtcttttgttccgccttcagctgctcgtaattggccggtttgtcgataccgaattcctcatagagatagtcgtcgtcgatggggatgttgaagttcttcttcagctgcgtgaggatggatattttggtaccggcatccgtttccttcggttcggggaaacagaacgtacccccttcggtgttgatgcccatgcgcagcagaatgtccgtcatgtcgtaattcagcacgttgagcacgtacttccggtcggcctccagtaccttgtcctctactttcttatgaaccgtacccaaagcctgcgtgcctttttcggacgattcggtggtcagcgtattgcccagtatcagtttggaaatttcgttgttgcaccgctcgcagaggcgttcatagacatcggcagaccctgttttgtttccggcttccgtgagtttgagttccgtgtccttggcatggaagaactgcgccagacttccggcattggccgcatcctccatggcccgctggcgtgactcgtcgtcgtcggaatcatagatatattcctggataggcatgccgaatacctcggagaactgtgcccagtcgcccgtagtgttacgtttgtagatgacccaaggtgcagccttggccaacagccccaaatcggacggtgaacccacaaacagcaggtcggtatattcattccaggaatggccggtaatgtccgtctggtggcgcaggatgagttccctgaccggatccacatgcttgcgtggtaccaggtcataatccacccactcctgcagcttgtagaactggcagagcgagaagccccagaatttcgcatcaaggatgtcacccaccagccggttgaaccagggcgactgtatctgttcgttgattttatcgtcgggcttcccgtccacccggaattccatgttggagcacagcacggcattctttcgcttttcgagcacacaggaaaggtgggtatccatcagaatgtcctcgtagaggtcataaagtttgtaacgtcgcgagaaatcgacattctcggccacccttacggctgccatgtagtcggaaatgtccagcccgaagcgtttgggctgtgtgagcacaatcacattcggtctcttttgtcccggcaacgtgaagtttccccctacggtgatgatgccggctttgttgttttttctgtttttctttttcatgatgcttgctttttaccagtggttcgttcgtttgcggttgctttgaatgcggaaatccgacctgcccgccctttgttcctcgggcagcagcggagccccttcgattgaaatgtcctcgtcggccaccgccttcatccattccaccgcccgttcgtaacgatccttgcgtacctgggaaagtttctgcgggttgtggatgcagaagatgtgatagaccgccatgtcgatgaccatcatcagcacgagctggttacggttctcgccggtggctgcaaaaatcttgttgcagtcgtagcgtttgcccagataacaccgcatttcggcaatggccctgtcctcgcaaacctcaatgaccgtttcgtcttcgcgaaccagtgcgtcgaggatgtctcggtggatgctcgcatcgtaatcggtaagttcaacaaatttgctcatagtcctattgttttagagttgtcataatcttttcttattccgttttcttacatccttccgtgatcggaatacgggcggttcaatgcgcctgatcagttcgtcaatgatacggttcgccccttcgaccgcatccggtccgtcggccggatagcgcatggtcagggtgaacaacttgaattgatcctccagttccttcatgtgcggattgtcccgttcagcctcgttgaggatgaggttcccctcgcggttgagcggttcaaggttggcctcgatgcgcgtagccttgtccgtcttcttctcctcgtcgccccggatgaacagcgcaatcttctgttcgcggcgtacttttgccaccagcggtttgaacacctgttggaagaaagggtcctgcagcttgttgttctccatgtagcaatagacattggtcttgcccccgacaaattcaagcatccggacataccagtcaatgaactccgcattgagcgcctgtgccaggaaagtcttgatgacgtaaagcctgccacccaatttgccacagagcgaaaccgtcttgaaggatttgcctttcttacccttgctttcgcccggtgccgggtcgccatacaccacgaggaacttgaatttggagagtgccggaaccttgccgtatgcaatgttttcgaatacctctcccacggaaatcgggttgttgaaatattctccctgtgccgcctttttggatattttggacagtgtgcggtcgatgtcctcttccgagttcttttccggccatgtggaaaaaccgtttttgtcgcggatgttcacgatgtcccaggagtcggccatttcgcccgccctcaccacgcagcagtccttggcgatgatgtttccgcagaagatgaccagtgtaggttcggaaatggaccttgtgggatacagcgcattttcccaccagtcccagcgcttctggatgatgtccgggttcttggtatcctcgtccgtatcaaagtcatcgaccagcagtacgtcgggacgtatggcctcgtttcgcgaaccacgcggagattgtccggcacccagtgcgcggaaagagaccttccctttggtggtgaattcatcctcggtccatgagcccggcagttcctgtttgccgtagtatgccatgatgcgtccgttggcttcgagattggcccggtagggatcgagcaggcgcaccgcattgtccttgctgttggaggtcagaatcacattctttttgcgtccggtaagcgtgagattcatgacgatgaacatggtgacggtggatttggccagctcacggctccaagaaagcacctcaaaccattcatcgtgtgcaatgatccgccggatagcctttttctggaagtcggcaaattcatatttgacataattcggaaaaaagaacttgatccattctatgggatgtttctcaagatattcccggtgtttttcccgttcggctgccgtcatgttcctatcgaccggtgtagcccttgcgatgtcttctttgtacttctcccaatcgaggagagcgagtctgtcagtctgtttcattgtctatccctttataatttgtctttaatgtacgcatcggccaggcgtgtaatttcctttgccttttcgaggtcggccgcccgtacccagtcgatgagcccggtgaggacactgatgatgtcggcaatgcccacttcctgctccatgttgcgtatggccgccgacagtttcccgaggatgtcagcctccttggatgaggggaaccgttccccttcgggccgttcggcgatggccttgtttatttcggccacctgccggtagaggttagccacctgttcctgccttgtgagcgtaagccccaccttctgttcctcccacttcccggcccgtacccagttggacacggacacccgtgacacgcccacccggtcggcgatttcctgctgtgtgaggttttccttgaggtacaaagtttttgcccattcctttttctgggcattcgtcaaatctgccataaatcgtcctttttagttgtaaatcacgttacaaaattgcatgaaaaagcggggtttgtaaaagcgcgtacgcatgatgacgggttacagcgttatgataacgccagaaaacgttatgatgcggacgcggtttcttggtgccatgggaatgttctattttcgcaccatcgaaaggcggggaaaccgctggtaaagacatgacgatgagcagatttttcaatattacaacgagtgacgacggcaccagtacgatattcctgtacggggacatcggagactatacggaggtgcaaagcgggcgcatagcccaggaactgatggaagccgaacgcgtgagccgacgcatccatgtgcgtatcaacagcaacggcggggaagtgtacagcggcattgcgatattcaacgccctgcgccatagccaggccgacatccgcatttatgtggatggcatagccgccagcatggccagtgtgatagccctttgcggcaagcccgtagaaatgagcaaatatgcccgtctgatgctgcacagtgtgagcggcgggtgttacggcaacaagcaggacctgcagcgttgcatggaagagatagaaagcctggaaggcagcttgagtgaaatctatgccgagcggctgggcatgagcaaggaagaagtgaaacagacctattttgacggcgaggaccattggctgaccgccaaggaagccctggaccttggtttcatagacgacatctatgatgcagaccccgtgccggcagacagtacaccggcgcagatatatactttattcaataaccggctcgttgagccacaaaaaaacagagaagacatgaatctggaagacgtaaagaaacgcccgcgcttcaaggactgcgcgagtgatgcggatgtgttccgcctgatggaccaactggaggaagaggcaggcaaggtacctatccttacgaaagagaacaccgacctgaaggccaaggtgaagacctacgaagacaaggctgaagccgaagaccttgccgcccgcaagcagctgcttgacgcagccgagcaggacggtcgcattgatgcgactacccgccccatctacgaaaaccttttggccaatgaccgcgagaacggcgaaaaggccctggcccaactgccggtaaagcgccgtgtgatggaagacctgcatctggaaccgaatggtgaagaaagcccctggaacaggcgtatgcgagaaattaaggacaaacgtaaaaagtgattgaactatggcaataattgtaagaaacacgaattacagcggcgaggtactggaacagttgctgacgcttgccgctacgagcaatgagattgtggaaaaggggctgatcatggtgattcccggtgtggagaagaaaatcagcctgccgcgcctgaagaccggcaagatgctccagaagcgcaaggagaaccccggcgtggaggattcgaagggcaacttcaactacgacgaaaagagtcttgacccggtggacttcatggcctttacggtgtttaacccccgcacgttcgagaacatctggcgcaaatggcagccgaagggcaacctggtattctcggaacttccgcccgaagcgcagaacgccctgcttgccgagttggccaagcgggtacagtttgaactgggtgaccactatgtgaacggtgaatatggggatgatgacgaccacttgtttaacggcatcctgacccagatggccaaggatactgaggtgattgtggtggacagcgcagaatcgaccatgctgggcagactgaaagccatgcgtgcgaagattcccgtggccatccgcaacaacccggacctccgcattctgatgagcgtgaacgactttgacaagtatgatgacgagctgacccagcgcgagtccaagaacacgagcgaaaccgatgtgaatgcccgtcgctacaagggcattaccattgagacgcttgcggcctggcccgatgatctgattgtgtgcaccctctgttcgcccgatgccggcggcaacctgtttgcggctgtgaacctgcaggacgatgaagacgtgattcagattgacaagatctcgaacgcgagcgaactgtacttcttcaagatgctgatgaaggctgacacgaacattgccttcggtgaagaagtggtggtgctggacaagcgaagcaaccccgtgttcaaggcgagcgagaagaagatttcagttgaccctgccagtgtgacccttgaggcaaccggtggcagtgaagaagtgaccgtgaccgccagcggagaatatgagataggcagtgcccctgccggcttcaaggtggaagcgacggataaaggcgtgaagatttcggccggtgcaaacagtggcagtcagaaaaccggtacactgacccttacgctcaatgccgaccgcagcaagacggccaagattaccattacccaaaaccagaaaggataagatggtatggcaaaattgaagtatctggtaattcactgtacggcaaccccggaggggcgtgaggtatcatcggcggacatccggaagtggcacacttcgcccgtaagccagggtggcagaggttggaaacaggtgggctacaccgacctgttccacctgcagggcggtgtggaacgcttggtgaacaacaacgaggatgcgcaggtggatccctgggaagtgaccaacggagccaaggggtacaacagcgtgagccgccacattgtgtatgccggcggtgtggccaaggacggcaagaccccgaaggacacccgcaccggctgccagaaaaaggcactggagaagtatgtgaaggacttccatcgcagattcccggatgtgcgcattgtgggacacaacgagctggcggccaaagcctgccccagtttcgatgtacagaaatggctgaaagaaataggtattaaccaataataaaagaagcaatcaatgaaacgaattatgctgtttatgatgctgatgctgggaacagtatcggctgtgatggcccaaggggccgatgttccggcaacggactatgacgcaatgattggcacctttgccggtttcgtcggcggtgtggtggtgcttactgaagggttgaaaggtttgttccccaacatgaaaggctgggtgacgcagctggtgagctggtgtgtgggcttggtgtgcgcgatgctactgtggtggcttgatgccggatttgtgagtgatgtgagctgggacattgccttgctctatggttttggtgcctcacttgtagccaatggggtagccgacacgggactggtgcaatgggttatcggactattccgaaagaaacgcgaggaagcagaataaaaggttgactgactaaaaaacgggtggtatggactttagcgagatcatgaacattattcttagcggcggccttgtgggcactgcagcagccatcggttccctgcgtgctacggtgaggaaagcgaaagcggaagcgatgaaagccgaagccgacgcagagggtgtgcgtgtggataacgcagaacatgccacccgcgttttggtgagcaatattgtggtacccttaaaagaagaactgaatgcaacaagaaaagacctgcaggccaacaagcgcgaaatggcgcgactgcgcaaggccattgacactgccaacagttgccgccatcatgatgactgtcctgtgcttggcgggctgcgcaagcagcaggaagagcacgacggtggagaagatacagacggaatcggcaagcaccgacagcgcgagcggaagccgacgggcgggactggtgatggcgggtataccggcgagttcggtgaagctgtctatacctgcggacagcctccgtaaacttcctgaaggtgccgtgtaccgtggcaagagcggacaggcgaatctgaccgtaggcagcgacgacagcgggaacatcgtggccgaagcctcgtgtgacagtctgcagcagctggtgctatggtatgaagaagagctggcgcgcatccgtagcgaaaccaagagcgaaatttcaaatgacgttcaaacagtagaaaaacgccctccgaaccggatgcggacgtttatcacaggtgtattggccggcttattggccggtgtgttattaaccatcaaactttataaacgatgaacaagaatttcatgtacggcataggagccgtaaagtataaggatttcacaatcgggtatattgaaaagaactcgtttgacctgggcggcaagaaacccgaggccgcgaagatcgaggccgaacaggtgcagggtgccccggtgctggtcatcccacagagtaacggcggcatcgccccgacgttcaatgtgatccagatgaactattcgaacctgcacaaactgcttggcggcagcctgcattataagaaagaagactcggaaaagaaaactccgatcggctggacagccccgtcggaggtgcttgtcatgcagggaccatgggaactctccctcgtgtccggacagagcgtactgattcccaacgccacgctgctttccaatcctgcaggcaagctgacccttacagaaacctccaagatagaggttacgctcgaagtggcgatgccggaggacggttcgcagccttacggcgtgttcgatacggaagcaataccggacgagtgggggcagtacaagctgccgccggcggaagccgcggctgcagcatcgctccaaagtgaggagggctaacgtatggctgaccgtttggaacaactgatagagatggagtgtgcggacgcgctgcttgacagcggcgtgtccgtacctcttaaaaggtggaagcttccgtggctgaaacgcccggtggaggtgcgtgtgacgatgaagcgtccgaggctgcggggtcagattctgctggcgcgggaatacctgaagacgggtgtcaaacccgattggcaaccgaaggacaagaccgaggaactggcctttgtggcggagcatggtaaggctgtgagccgcctgctggcctatacggtatgccggggatacgtgtcgcggcacgtgggcatcggggtgacagcgtgggtactgcggaactttgtggagtggcgttatctgacggccatgttccgaacattcgagcgtctgatgggcacgaaggattttatgcgtattatcagctcgacagcgcgggcgaacccgatgactccgagactgagccaggcaaggaaggggagttaagaacccggtatgaaggttcccatagccctttcggcttcgtgtggcagattgcatcggcgaccggctggagcgtggattacatccttgatggggtgaattaccagacgctgatcatgatgctgagcgacgcgccgcggtatgtgcggaaaaagcaaggcggcggaaacggtgctcccagaccggaacacagcgccgaggatgaagcgaacgatatagtaggattttttcaaagcaaactggaatgagcaaacctgtagaagttgaatttttgatgaaggacaaactcacgcccggcatgaacaaggccgagcgtgaggcgctggaactgcgtaataccgtcaggctgctggaggctgaactggaaaggctgcgccttgccggggagacggctgcccccaatctggaccagagtgccaatatcgcgcagatccatgcactggagaagcagcttgaggaattgcgcggcaaactgaaactgctgcaggaggaatcggaatccgtgcaggtcacccctgcagatgtacccaacgcgcagcgccagttgggcgggcttcacaacagtatccagcagatcgcccgtgaaatgccttctttggccatgggaccgcagatgttcttcctggcaatcagcaacaacctgccgatttttacggacgaactggcccgtgcccgcaaggaatacgatgagctgcagaagtccggcaagaagggcacaccggtatggaagcaggtcctgtcctcacttttttcctggcagacggccatgaccaccggcatcatgctgctggtaatgtacggtgatgaaatctgggattggacgaaaaacctgttcagtgccaaaaaaggcgtggatgaattcaacatatcactcaaggaaatgaccgagatagagaaggacggccgtgcccagatggtgcgtacccgcttcgaactgaaatcggtcatcgatgaaataaagaacttcaccggcagcaaggaacaggaaaaggcgaaggtggaggaactgaaccgcaagtacggggaatctttcgggtattataaaacactttccgaatggtatgatacccttatccaaaagagcgaggactatgtacaggttctgctgcaccagaccaatgtccagaaccttgtaaaaaaagctgcagaagccgatgaagaggtgaataaaatcaaggcgcagaaaccggaagaggcggaaagcgccatgggttttttcgggaaatggggacaatatatcatgcagtcaagcatggcagaatccgggcagttctatgacgcacaggctgccatcaagaaacatgatcaggaagcttatgacgtactgttgaaaaatgccgaaaacaaacgtgacggttatctgaaaaaagcggaggaagaggtaaagaaagccgcagaagcagccaaaaaaggaaatatcggtgggcatatcgaccccaagcagtccgggaagaatccggaagcggaagccaagcaacggcttgccacagagcgtaggctggcgcaggatcttgccgccctgcaggctgaaaaccggaaggaagagatagaccgcatgcaagccggtaccgagaagaaactggcacaaatcgaatatgactataacgcccggaaagaagagataaaccggcaggaagccgactggaagcgtgagaacaaggaagccggtctttctaccggagataacggacttacccgggagcaacaggatgaacttgaaaaagcccgtgcctcaaacaccgagtcaaggaaaaaagcggaggcggacgtgtacagggaagaggcggaagccatgcgtgactatctgaaggaatacgggaccttccagcagcagaaactggccatcgctgaagaatatgccgagaaaatccgcaaggcacagtcccagggcgaaagactgactttggaaaagcagcgtgatgcggctgtgcacaaagtggacatggaatcccttacccagaagatagactggggagcagcgttcggggatttaaccggcttgcttgcagaccagatgaagaatctgcttggcgaacttaagcagtatgtcaagacggatgagttcaaaaaatcaggagcagcggatcagcaggtcgtttacgatgccattgaacgtattcaaagcatgctccccggtggcaacggcacattggattttgcccggctgcaaacgcagatgcacgctttgggggatgccgtaacacgtgtgcaaaatgcagaactgcagcaggaagcggcattcatccggttgaaagcggcgcaggccgattacaacaaggctcttgaaagcggtaaccaggcagaaatagaacgtacccaaattgctcttcaaacggctcaatcgtccagcgtttcagctgacgaagaatacctgaacgccacctctgaaatgaaggcgcttgccggggaggtgaaaagtgcctcccgggacacggttgacggattgaacatggtatccaacgggttgcacggctttgcgagcggaaccttgcagggatcatttgaaggaatccagaacatgcttaccggtctttcaaaactgaatatcggaggcaaggtcggcgatgccatcagccggatgtccgaaaccctgtcaagtgccggagtcatcgggcagatcatatcggccattctctccatactggatttgctgaaagacggtattggcccgattatctcatcattgatagacaccattttcaatgcgataaccggaatactcgacaatatcctcagcggagacctgttcaaacagataggcggttcccttgtgaaaggtatcgggggattgctgaacacggtgtctttcggaggtttcaacaaactgttcggcatcggcgggaacgccaaggaagtgcaggcggctatagaccgtcttacagaccggaacgagctgctgcagacctcgatagaggatctgaccgacaccatcaagcagagccaggggacgaagagtgtggcggcttaccgcgacgcgtacaagatgcagcaggaaacgaattcgaactacctgcagatggctatggcgcaagccggctaccacggaagtcaccacagctggaactactactggggcggtttcaaccaggcacagatagacaaactgagcggacagatcggccgccagtgggacgggaacctgtggagcctgagcccggaggaaatgaaggcactgcgcagcaacgtggatatgtggacgcaaatccagaataccggtaagggaggctatggcgggcgactgaccgagaaactggatgactacatagaccaggccggcaagctggaggaactgaccgaccagctgtatgaagggctgacgggcatttcgttcgacggtatgtacagcagcttcatcgacaacctgatgaacatgaagtacggtgccaaggatgcggcggaggatatatccgagtacttcatgcgggcgatgctgagcaacaagatcggtgagatgtacagcgacaaactgaaaggctggtgggagaagtttggcaaggccatggaggacaacgaactgaccgaggcggaacggaacgcgctgatggaagagtacatgcagtatatggatgaagcccttgccctgcgtgacaacctggcggcagccaccggttatgacaagacgcagcagggcggtacgagccaaagtgcgaaagcgggcggctttacggccatgacgcaggaccagggcacgaaactggagggcatgttcaccggcgggctgcagcactggagcagcatggacgaccggctggaaagcgtggtggagaagatggacacggctgaagggcatctggcccggatagccgagaacaccggtgtgagcgccggacacctgggcgaactgaaggaagtgataaagaaaatgatacgtgacggactaaaagtgaagtgatatgggcaatatactgagcggactggtgctggtgaacggcacggacatctggacggaatacggcgtgttcctggtggaagaccggcgcgggggcatggagaacctgacggccatcctgaccccgagcaaggccaagaaggatacggctgtggacatacgggaagagcacggggaaaaatacagccccgtgctgaccccacggaatgaagcgcgtgacgtgacgctgcattttgcgctttacaacaagacccaggcaggctggatgaagcagtactttgcctttgtgaatttcctgaagcaagggaaggacggctggctggagatccgtttcccccagctggatctgcagctgcgggtgaagtatgccgactgtacgaagttcaccccgctgacctatctgtggacggaaggtgtgcatgccggaaagttccgggtaaagttccgggaaccgaaaccgattatataaccattcaaacgctattagaatatgcttctaacgatatatgataaagccggaaccaagcgtgcggatgtggccgtgaacgacagctcgacgcaaagcaaggaagtgcagggagacaatgtgctttccctgtcgttcagctattatgccttcctgcccctggacgtgaacgactacacggactatctgggcgaacggtactggctgacagaacgctacacgccgaagcaggtgagcgatggtgaatgggagtataacctgaagctgtacggtatcgagagcctaatcaagcggttcctggtgctggagacgacggacggggacaccaaccccctgtttaccctgacggccacgccccgcgagcatgtggcgatggtggtgaaggctatcaataacggcatgggccacattactgactggaagacgggtacggtggaaggtacggagctgatcacgatagactacgaggggatgtactgcgacgaagcgctgaaagccatcgcggaaaaggcaggcggcaaggtggaatggtgggttgaggggcagactgtgaacgtgtgccgctgcgaacacggggaagaaatcacccttggctatggcaaggggctgacctccctggaaagagatacgagcaacacggccaaattctatacgcgcctgttcccggtaggctcgacccgcaacatcgatgcggagaaatacggcagcccgcgtctgatgcttcccggcggcaggaagtacatcgagcagggcgtggaggaatatggcatctatgaccattacgagcaggatgctttcagcggcatcttcccccgtcgggtcggtacggtgagctcggttcgcagcgaggaggtggcagacgatgaaggaaacaaattcaccgtctattatttccgggacggggaactggactttgaccctaacctgtacgagctggccggagaaaccaaacgtgtgtcgttccagacgggcgaccttgccggactgggagaaagcgatgaccactactttgaggtgaactacgacagcgcggcacgtgaattcgaactgatcaccatctggccctacgatgacgacacccagctgccgggcggcaagctggtgccccgagcaggcgacacctatatcctgtggaatatccggatgccggatgagtattaccggctggccgaagaggagtttgcggttgcggtggacgagtacaaccgggaccactggctggacattgccgcctacaaagccccgacagacccggtatacatcgaggagcacggcatagacctgtttgtgggcagacgggtgaagctggagagccggaagtatttcccggaaaaaggctaccgtcagagccgtatcaccaagatcagccgcaaggtgaacgaacccgggcagatggacatcgagataagcgatgcgctgcaggtgggcaagttcgacaaggtgacggacagcatcggtgcgctgaaaagctatacgaaatcaaagacggaaggcgctgcccttccggacatcatacgaagctgggacaagacgctgcccacggacaacaacctgttttccgcccggcgcagccagaaagagttcctgagcaagaaccagccggacacagccaaagagtccatccgcttcctgaagggtgtgagctttggcgaggctgctggcggcaagccctgcggcatcgtggatggtgagggcaatgccgaatacttgactgccgtgatccgcgaactgctgcgcagcacggagtttgtggacgggctgaccggtgagggctggcagctgtggattgaccagctgaccggactgacaaacctgacggtggacaaagtgactgcccggcaaagcctggtggcgctggaactgctgatcgagaaggtgcgcagcgtgtgcggccagctggtggtgtccgctgccaacggcaagatcaaggacgtggtgaagcagggcgacaactaccgcatcgtgtttgagcaggaatcgggctttgtggcccatgacctgatgcgctgtgcggttacgggtggtaagaaactaaaagcatactgggtggaggtggcttcggtgatagccggcggtgtactggtcccggtaagcgagtttggcggggtgaagccggaggcaggcgatgagtgcgtgctgatgggcaacaccgaaaccccgctccggcagaaccttatatccattgcggccacggaggacggacagccccgtatcgacattctggacggtgtgaaggccaagaacttcaacggctgccttcgttgccggctgggtaagctggacggcatcaggagcagcgctttcccggcagacaaacagccgaaaggaaacggcctgtatgccgacaacgtgtggctgaagggtacgttcgtgttgatgacgggcgaggacatcctgacgcggtttgagataaccgaggggaaaatccattcagccgtggaaagcttgcgcaaggaaatacgcgaagaacagagttatctggacaacagcagttttgccgacggcatggacaaatggaagacgggcagcaaggctacgctgttcaccctgggcggacgctggatctgggcgaacggcggtccttacggtacgaagccggacggccatgccgagatacggaccgacggcaaggtgccttatgcctatatccggaacagctatatcatgcagaaactggaggacttccggctggtaccggagtaccggcagacgaacagccagggcgaacgggtgcccggcgtggtgtatctgtcgttcagctaccgggttatcaaggccggaaggttgaaaatagaatttgtgaacgctgataagaccgggtttgagaacttcaacatgttcggccatgaagaggacctgcccgttggcggtgagaagatgttcacgttggacggactttggaacggcactggcgacttcaagctgtcgtttacgggcgtgatttacatttcgctgctggtgttcagcaccaacaaggcggacgcactggcctataagtaccgtacactgttcgaacagagcgaccggctggtaaagatttcagcggcggtcttcgacaaggacggtaatgcgctgaaagagaccgggcttgtcataaagcctgaaggttccggtctgtatgcgcaggacaatacaggaaagattgcccttatcggggtgagcgtggaggaagaggacgagtacggaaataccgtgagcaaaatcaagctgacagccgaccatatacagctggagggactggtaacggccaacggcaacttcaagatactggaagacggcagcattgaaacgaccaacggtaagtttaccggagagatagacagcagcaaagggaaaatcggcggctttgagatagggaacggccgtatcggttctgtggccgactctcacgggagcggtggcggtcttgccatttatgatgattttttccgtgtcggcggcagcaaaggatatgtgatgttcggtgatgatgtgataccgtcttctgcaggaggagcttttaccgctgtcggtcgtatcgtgaactcagcccccaatatatacgggaattacggcttcgaccaagcgaactatggattgtttatagatgttaccggcggtacgaagaactacggtatcagcagcaatgcggcattacttgccccggcgtttatcaatacgaaagccaagctgcttaccttcggaagtggaaactacacggtggatttctcacaacacaatatcattttgatgtattacaatgaacccaactacagtaaggtagaggttacgctgccgtcggaaagttctgtggcatacaagttcggcatgagttacttgcctaccgattttgcagccattgtcacgttcagggtcagacccggttcaaagaatatcatactaaaaggtatctataaccacaatgaagatttgcaaaactacgagatggcatccggggactccgtaacggtacttattacaaaagcggacggattccgttaccagatattgaatcattcatcctaaaaaacagatatatatgaaaaagttagatttcaggaatttcagcgttcccaccggaataacccgtcagacgagggaggttttcgatgcacgtgagcagatagccgatttgctgtatacgcgtgtcagtggcatcaaggcccatcggcttgcgttcaagattttcgagagtaccggcgagaccgagttcagcgatgaggaaaccgggatgatacacatggcggtggaacgctattgtcttcccaatgtgatagatgccctgaacgaaatcctgggcgggtcagaaaccgataaaaacgaatgagtatggcagaaatgacacaagaagaactggttcaggaagtgctggaccgtgtactccagagttctaccggcgtggaggacttggagaccgtcacctcgctgagcggtgtgaaatcactgcccggggagaaggacggcaagatggtgaacgtccccctggaactgatagggaagcctgcgagcgatgccgccgcccgtgccgaggctgccgccaagaaagcggaaggagccgtagccggactggaggaaaagacccaggccgccacggaagcggccaccaaggccaacgaagcggcagccaaggcagaaaacgccgctgccaaggtggaacagactacggcagcagccatcggcggggctaccgcacgcttttcctcatggatggaaacaggcaacgttttacctgacaagagtaccaaaccgggcggcagcgtagtgtatgtagcggatgccgggaagttcgcctaccacatggactccaccctgtacggggactgggatgtggcgggtgtgcctcctgccggcatattcatgaatgcggaccggacagccatcctgccggacaagctctacctgctgggtgatgccgtatataccggaacaggcggcagcctgagactgctggcctaccggcatgaggtgatgagcggggaagcttacgaggcgctgcaggacaaggatgcgaatacgctgtatctgatttatgaggaggattgacgatgataaccataggcggtaaggaaataacggctgcgtatgtggggaaacgtgccctgtcggcagtctatgccggggcaagactggtgtggtctgcgataagcagctgtttcggacttggatactggaaaggcgacgagccgtggaacggatcggacgcatggaacggtagcagtaaaactgataaatgaatgattattataaaaggacagtattatggcaaaaaggaaaataagcggaatcatcaacgcgactgaacatccgatgaatcttgaaacaccatggaatcagaaacagccggacggcacctatcatgcctatgcaggcgatgacatcgaagcgttcctgaagaaggaactgtcaaaccgtacccctaccgaggaactggtgagcggcgagacgaaacctcctacatccggaacggtgttcgatgcgatggtgggtacggtgacggacgtggatgtgcaggacagcgaggacggcacccagtacgtgatgaccgtcaagcagaaggacaaccagggcggcgagagctcgaaggaagtgcgcttttccaagtacacggacgatgacaaggtggtggtgaacatcgacctgacggacagcggcggtgcgggacttcccgcctcgcagtatctggcactgggcagcggctttgtggtgaaatactccgtaggtgtgggcactgccggtggcggtacggtggacggctacagcgacctgaaagcccgcgtgatcgtgaaacgcggttcgaccgtcatcagtgagttccgggatgcggagtttgtgggcgttacagccggacagagctatacctttgacgcttcgccctacctgaaggatgccactgcctataccgtacaggtggaagcgcaggcaacttaccaggacggcacgctgatgaagacggccacggccaaggtgaccatggtggccatggagctggagaccacctactcggcgggcaacgggctggccgacgggggatataaaaatgacgtgaacatcccctttactgccaagggcacgagcggtgagaagaacatctactaccgcgtgaacggcggacaggcctttaccctcggtctttcggccggcagcggtgtgcagcagaagaacgtgaccatccccctgacacagatgcaggagggtacgaacgtggtggaagcctacgcgcagcatgagaactccggtgtggtgagccgggtgcattacattacgctgctgaaggcaggcggaggtgtgacagcgtatgccggcctgatgttcagccaccgggcagcggggttccagcgtgactggaaacacccggtgctggaggcagagcagttcacggcatggaacttcacgtatgccggctatgaccgcgatgcgtatacggcccgtgtgaaagtgaccgaccggggcagcgtggtgaaggaagacctgctgcaacgcggtgagaccggcagctacggacggacgaacgtgaacgtggaaccgttggactaccgtgtgtcatgcggcgatgccgtgcttgaggtgcaggtgaacaccacatcgcacccggacattgaagccacgctggcaccggatgccgtgtgtacgtttgacgccttcgggcgaagcaacacggaaaacaacccggcaagctgggtgagcggtgacaagcgtatggagttccgggacgtgctgtggagcgtgaacgaatatggtgccggtagcggctggcacaaggaccgcctgctgctggccggtggtgcaggtatgaccctgaccgctgacggcggttaccgccccttcaacgaggcggacaagcccgagggatttgccatccgtgacgtgggcatgacgctggagatagaatacagcacggccaacgtgacggatacggatgccgagctgatcacctgcctggggcagctggacaacggcaaccggtacgggctgattgtgactccggaagaggccaagttcctgaccggtgtggtgaccgaggcgatggatgccggacaggtgctgcgctatgaagactcggtgggtaccaagttccagccgggtacgaatatccgcattacctacgtgttctatccgaacgtgcagaccaacgaacagcgcacgctgatcggtttctatgtgaacggtgaagagtcggctgcttccaagtggctcgacaaggtgaattttgacattcagagccagttggaatttaagtcggcaggtgccgacttgaacgtgaagagcgtgcgtatctataacaaggcgctgacctcggacgaggtgctgaacaactacatcgtggaccgcaaccacctggaggatgccgacggggaaccgggcgtgcgctcactggatgaggacaaccgcgtgctgaatgaaggagatacggtgagcatggagaagctgatggggctgatgaagaagcgccggaactcgatcctggtactgataggcacgggcagcgtgggcagtgaggttccgagcgagagcgacacgctgaacgtggtggatgcactggcccagctgaacgacaagaaggccaataaactggtaagggaggtccgtttctataacggagaggacaggacgcttgactttatccttaccaacgtatatgtccgtattcagggtacttcttccgtgaactatgccagaaagaacttccgtttctacttccagaagacggcaagcggctggacggttacattgagctacggggagattgacggaaacggcaggcagaagaatccggtggtaactaccggcaaaaaaaatctcttcaagttacgcaggaactcggtaggcgcgaagctggcatgttccaaatgcgacttctcggactcgtccatgaccaccaataccggaggtgcgaagcttatcaatgacggactgaaagagatggggctgcttacgcctgcccagcgttacgccaaagaccatgggctggaggatgattaccgttcggccatcgacggcctgccgtgcgacctgttcgtagcgaagagtgccgacgaagacctgacctattacggccagtacaacatgaacaacgagaagagcgacagctaccccatcttcgggcaggatgagaccatcggcggcgagaaatggggcgagggcgacacgctgaactacctggaagccgacgaggaaggacacaagcagtacctgcccgtctgcttcgagacgctgaacaactccaatccgctgtgcctgttccactggttgccgagtaccgaaccggagcataaggatttcatggactacaactttgacggaggactggaatttaatcatccgaaagataccttctggtcggacggaggcggtgacgcggaggaagaaccgaacctgaaagaccacctcggtaccggtgacaagtacgacaagatgtacaaggccaccgaccgcatgatgagtttcgtctaccggtgcgtaaaggaaacgcctgcgggcaggaacatggtttacagcacggaatcccattcgttcgagggggtggactatgaggacgacggcgacaagttccctaccgccaagtggcagagcgatacgttcaggaaagaggccgggaagtatttcgaccttccccacctgattgcctactatctgtacgtgcagttcaacctcggcgtggaccagcttgcgaagaacatgcttatccgcacatgggacggtgtgaaatggtcgattgactattatgacggcgactgccagctcggttctgacaacaagtcgttcctgaccgggaagtatgacgacaaccgccagacgaagcgcgacggggcttatgtgatgcagggtcataactcgtggctgtggaacctcatcgtggccaattgctgggacatgattgtggagattatggtgagcggatggaacgggggcgcaagcttcatgagtgccttcagtatccagaaagccattgaccatttcgataccgaacagatgaagaagtggtgctcacgcctctataacaagtccggcatcttcaaatacatctacccgttcctgaacgaaatgccggtgggtgctgacggtgccaaacagacctatccgcaaatctacggtctgaagggttcgttgaaagcacaccggaactacttcatccaacgccggtatgacctgaagcaggtggagtacggctatgtatccacgctgggtgcccagttctaccagagtacggcatcgctggacaaggcttataaactgaaaccgatgcagtaccggctgaccatcccgtaccgtgtgcagctctccaccagcaacggcgtgcaggccgacagcggcgtggtggatgcggacgtgctccattccctgcagctgacccgtgccttcggtgagaacgacccgctgaagattatcggtgcagccaaaatcaaggagctggtatggcacgaggatgcgttcgcaatcggcttcaacttcggtctgctgacctcactggtaaaactcgacatgagcgtggagaaagccagcggttaccggaacggctcgttcatggcttcgaccaatggtatgctgcttctggaagaagtgaacatgcggaacaaccggctggcccggaacggggacaacgggaatgtggccactttggacttgagctggcagggccgcctgaagaaactggacgtgaggggtacggggctgacccgtgtgaaactggccaccggtgcgcccgttgtgcagttatgcctgccggacacgattgaggaactgttcctggaatatctgaccaagctgtccgatagtggcctgatactggaagggatcaataatgtgcggggctaccgctacaccaactgccccggcatcgacgggttcgctatgctggaacgcctgcaccaggccagactgaacggcagcggcaagctggagcgcttcgtgctggagatagaccgggaagacgacggaaccctgctgaagaagtattacgactacggaacgtatacacagacgggtgccgtggatgaccggcattcgggactgaggggcaagctgaccctgacgaagtatctggccgatgaggaactggagaagtatgccgcccgttatccggaactgaccatcaagcagccgccctatacgatgatcgagtttgacgacagcgtggccgacgatgccaatgtttcgaacctggacaacaagacggggtacaaattcggcaatacgtacaaaatgagcgggcatgtgaatgccatcctgtccaagcgccaccgcgtattggccaaggtgacgaagatgcccacgagccggaaggtggagatagccgggcagcaggtggaagtgaacaacccggacggggagatgacctatttccccctgcatgacgaaagctcgaacttctatgccgatgcggaggatatgaacgattgcacggtggcgaagctggacggcagcgagggagactggatgatgtatgagccgttttactggagcaaaggcatcaacgattatttgaacaacaagaagtacgcctgctacagcagttatccggaggacgaaatgcccccggtgcctgaggcgacggtactgacactggatgccatcaaggagacacagggcggctggctgggtgaacgcaagatcatgagcggcaagcccacgctgatggaatcctatacgacggacaaggcttattccgtgtgcaaagtggacgtgtcgggttacagacgtgtccgcttcccgagcgttccaggaacagggcttatcggcagtgtgtttgctgatgcggagggaaacatcctgaagagtattgtggtgccgaccatcggcttgaaatttgaagccggcatgtatctgatagcagacgttccggaacgtgctacagccctgcatttctccattctgaacacggcagagtttgactgcgtggtgctgagcaacagcgacaagatagaggacatggaaccggattgggtggccaatgaggaacatctgtgtgccgttgtgggcagttctgtagtgggcagcaagttgcgtgcctgcataaccggagcttcgaccacggcaagcatgacatggacggacttccactattacagccagcagcgtggcatgcagcagatagatgccctgatgcacagccgcatcgcgaacctgagctatgcaaagtacgggcgtagggacatgcaggaacaatgcggtgccggtcagcataacaataaccggacaacgggtggaacggccgaccatggaatgacagacaccatcggctatgacgaagcgtatgtcatcaacaacaaaatcacgaattcgctgattgacggcttggtgcatcagtatgcctggtataagagccgggacgaatacggacaggcgaccgtggtgcaggtgaacaatatctgctgcctgggctacgaggacatctacggcaacaagtatgacatgatggacggcgtggatctgccgaatgacagcggcaaccagggcaaatggcgcatctggatgcctgacggcagtatccgtatggtacagggcaagaaggacagcggtcagtggattacaggcgtggcgcacggcaagtatatggacatggttccggtaggtaatttgaacggatcatcttccacctactataccgacatgtactggataagcaccgctacagtccgtgtggtctatcgcgggtacaacaatgcgaatgcgaatggcggtgtgtcgaatgcgaatgcgaataacgatgcttcgaatacgaatgcgaatgtcggctcgcgtctggaaatctaacaaatcggcgtacagcagcggggacgtgtccccgaagcggtgccgaggggagcaagccacagcaacagcaccagaaaaggtggaaagctgaaaaatcacgcgtcgggtggagtttggtaggctgttatcagttcgaagaagtcagacccggggaaaggaaggccctcatcttccatgtttattaaccaatagcttatgcgcagggaaggatatattatcgaggaaatcatcgaatactccaatatgtcggaggcattcgattcggtacttcgcggaaccgatcgtaagaggtcaaggcagggacgattcctgcttgcccatagggagaagattatcaccgaactgacggcttccattgcggacggctcattccggctgggcggctaccatgagagggaaattgaagaatacggtaaaaaacgtattttgcagatcctgtccatgaaagaccgcatcgctgtgtttgccatcatgaatgtggtggaccgccacctgcaaaaacgttatatccggacaaccggtgcaagcatcaaaaggcgcggtactcatgacctgatgaactgcatacgtaccgatttgcaaaaaaatccggaaggcacgctttacgcatacaaatttgacatccggaggttttatgacaatgcgcggcaggactttgttatgtggtgcttccggagggtgttcaaggacaaaaggctgttggtcttgttggagcggtttgttaagctgctgccagaaggtatcagtttcggactgcgcagttcacaaggggcaggaaatctgcttctgtctgtatttttagaccactatctgaaggataagtacggggttcgttattactatcgctattgcgatgacggactggtactcggtaaaacgaaagcggaattgtggaagattcgtgatgctgttcacgggcaaatgggaaaaatagacttggaaataaagccgaatgaacgggtgttccctgtggaagaaggcattgatttccttggctatgttatccgtcccgactatgtaagattgcggaaacgcatcaaacagaagtttgcccggaaaatgcacgaggtaaaatcgagaaaaagacggcgggaactgattgccagtttctacggcatgacgaagcacgccgactgtaataagttgtttaaaaaattaacaggcaaagaaatgagaagttttaaagacttgaatgtcgcttacaagccggaagacggtaaaaagcgattccccggagtggtggtaagcatccgggaactggtaaacttacccattgtagtgaaggactttgagaccggtatcaaaaccgagcagggagaagaccgctgtattgtggccatcgaagtgaacggcgaggcaaagaagttcttcaccaacagcgaggaaatgaagaatattctcgcacaagtaaaggaaatgccggatggtttcccgtttgaaacgaccatcaagacagagacattcggcaaaggtagaaccaaatacgtgtttacatgagaagagttgaaggaagttccggggtttcgctgatggaatgcacgaacccggttaaagacaaatggcgcatccgatgggatgtgcaggaaaaagagaacggctctgcctcctacatggaagaggagttcgggcataagcctactgatgaggaaatccacacattggttatgtcctggtataacagccagactgatgcggctatcctatccggattcgcctataatggtgcccatgtatggctttctgtggagaaccagtacaactataaggcagcatacgatttggccgttcagacgggcggagaaaccctgccagtgacgtttaagtttggttcggatgaacaaccggaataccatacttttactcagttagaagaactgaaagatttctatacaaaagcagtaggattcattcagacagttctggctgaaggctgggaaaaaaaggacaagttcaatttggaattatatcggattgagtgattgacaatcccttcgggggagggataaaaaaagcccccggcctgttaatatagacgccaatcatttattaacacaaaacgccacgagagtgcgcgaccgggggcaatgccctctgccgcactctcgtggcgtttttacgcattaaataaatgattggcattgcaaaagtacaaaaatgattggatatgacattgtttgaagcacttaaatttaacagagaaccgcttgaaatgcttataagtttgggcggcaagcaggatgaccttcgattcatagacttatatacggagtatgaggtcatgaaaaaacaaggtgaaaagaccacttatgcagtggcgtttttggcaaataaatattcggtaagcgaacgtaaggtgtatgatgttatcaaacggtttggaaagcactgcacgctcggtgcagtgtgattgatgtgccggggatgccttgtgttgtccggtagagctacctttgtacaaccaaaaataaagctcatgaataagtattaccagacattagacaagatactccaaacgggcaaaatccagaccaataggaaagggcgtatcaagtatctattaaacgaaaggctcatgctaacccccgctgatttacttgacatatttgaaagccacgggatagccaggaaaaagctgaaagaggaattgaaactgtttatgcaaggagtccgggatgtggaaaaatacaaagaggcagggattacctggtgggattattgcggccatacccttgtaaacagctatccaacttactttgaaaagcttccacccctcataaccaggattaaccgggaaaagcgcaacagcaagaattatgtcctgtttcttggagaaaccggggtggaaagcaaccaggcaccctgcctgagtcttgtgcagttccaaattgatgagggagaattggtgctatctgcatatcagcgtagttctgatgcgaaccttgggcttccggctgatatttatcatctttatctgatggcaaggcaggtggagcttcccctgaagtccataacccttgaccttggaaatgtgcatatatatgaaaataacattgaccggactctggaactgttatccggagttgaaaacattaaatttgacttgaacgtatgaagaatatgaatttatctgcaccactgccatttgtaggccaaaaaagaatgtttgctaaagagtttattaaagttttggaacagttccctgaagataccgtgtttgtggacttgtttggcggttccggacttctttcgcatatagccaaaagaagcaagcccgatgctactgttgtctacaatgacttcgacaactaccggttcagactgaaaaatatcccacagacaaataaactgcttgccgatattagggagctggtgggtaattcgatacccaaacataaaccaattaaaggggaacttagagaacgcatttttaaacgtatcgaggaagaagaactaaatgttgggtacgtggattttataaccttatcatcctcacttatgttctccatgaagtataaattgtctgtagccgaaatgcgcaaggaagtcctttataacaacattcgcaagaccggttatccggagtcttctgactacttaaaagggcttgaaattgtatcatgcgactacaaagcagtattcaaccaatataaggatgttcccggagtcgtctttttaattgatccgccttatctttccactgatgttggtacgtacaatatgtattggcgcttgtctgattatttggatgttttaaagatactcgaaaagcattccttcgtttatttcacatccaataaatcctccatacttgaactgtgtgaatggattggagcaaacaaaaccattggcaatccttttgagggttgtacaaaaaaggaattcaatgcccacatgaattattctgccgaatatacagacatgatgctgtataagaaacaggaaaaattagttcataaaacagctgcttagcactgaacaaagatacaatttttcaagtagaaggccaaacttttgagccttattttaatgccgttataaagccattttttatgaaattataaagccgaaacagaggtcattacaaaacttttgtttcggctttttgagtgttgcgcgctttccttttttgaacgcttcgttttgtccttttccctgaaaatcgaacgcttcgtttcggattctgcggaaatttggatttgcggattatatctgtatagaaaatacaaaagccgggcatttactgcaccggcttttcccattttaacaaattcttaatttttcgattattcttccctcctcctcagtaatgccaccatctcgcgggcagcatgtttgggtgcccctgcctctcccagacaggatgccatatactcatatccctcgagcatctgacggcggtattccttatcgtacaaaatgcggttcagctccgagcgtacctgctctaccgtcatggtatctgcaaccagctctttcaccacctcccggttggctatgagattgaccagggaaatgtacttcactttcagtatatgccgtttcaggaaagcgataaccttccctatcggagtatggtaacataccgcttgcggcacacgaaacagagctgtttccagcgttgccgtccccgaagtgaccagtgcagcctctgcctgcctcaacaaagggaatgtcttgttgaagataatcttcacgtccaccccacccacataacgtttgtaatactcgggggaaatacccggagcaccggccagcaccagttgataatcgggaaaagaagctgccgcacgaagcatgtcgggcagattgtccttgatttcctgcttgcggctaccagccagcagagcaataacgggtttggccgaaagtccgtttgcccggacaaagtcgtcgaatgtctctgagctggaagcaagaaaagccgtcacttcatccactgtcggattgccgacataatgtatcggatacccgtgcttcccttcaaaaaattccacctcgaacggtaggatggagaacagctcatccacatcccgtttaatattcttgatgcggtattccttccatgcccaaatcttgggagaaatataataaaagacaggaatccttgtgttggcatggacaaacttggctatatccagattaaagcccggatagtccaccaaaatcagcacatccggctgccacgcaacaatatcctccttgcagcgcttcatattggcaaagatggtgcgcagatgcagcaatacgggaatgaaccccatatacgccaactctttgtaatgcttcaccatcacaccgcccactgcagccatgaggtcgcctccgaagaaacggaactccgcttgcgagtcctcctccttcaatgcagccatcagatgggaggcatgcaggtcgccagaagcttcaccgacaatcaagtaatacttcatatcaattgataattgtcaattaattcagaaccatgctttcagttcatcaatcaagccgtatgccgttgcatccaccgtggtcggggtgattgccacataaccgttatcaagcgcccaatggtcattcttctcattttcggcatcgttgttctcaaactcgccggtcagccagtagtaatgggcatctcctctatgggcaaagttttcccattcattggtccattgccccttggtttgttcgcaaatcttcacacccttcaattctttggtatcggggaagttgacattgaggcatgtcaacggagggagtcctttctccaataccagccgggctatctcgcggatgtaaggacctgcaggttcaaaatcagcgttcggctcatggttgcaaagggagaatccgatggaaggcactcctttcaggcatccctctatcacaacgcccatcgtaccggaataatgcaggtttacagaagaattgtcgccgtggttgatgccgcctaccaccaagtcgggcttgcggtcgagcaccgtatgaaaagccagcttcacacaatcggtcggcgtaccggaacacttgtataccgtcagcccaacatccttacggaccaactggtagtggataggttccgttacagtcagcgcacacgcacttccagagcggggtgcatccggcgccattaccacaatctcgcccagcggacggaggaatttgattaactcgctaatacctttcgcaatgatgccgtcatcattggaaatcaatatcaaaggtctctgattttccataactttcttttttattatcgtgcaaaagtagctaaaaaggctttaaacagaatactacaaagataataattcttttgtattcaaagatattttcagaaaaggctaactttgtaccgacaatagttggaatataatcattcataaaatccatgctataatgaacactttttgccattctaccattgctgcacgcatcgagacggcagctgccgcaattattctgtttctaacaaccctgacaagctgtggcaggagcagttctcccgagccacttgaccaatggaatgacgggacatctacgcttcacacggcagacccggtcattgcagaaggccggaagctcttcaacgacaaagaataccaaaatttccggctcaccggagaagccctcacacaacccggctccgaagcaggcctcctctttcatacggacggcgagtccggttatgaagtgatattccgtaacggagacatcgacggcacacgcaagagcggctcactcgcctcggtgcgcaacctctatcgctcactcgcaaaagatggagaatggtttgacttcgagataaccgtacgcggacaaaacatcattgtctgcattaacggaaccgaagttgtttgctataccgaacccggacacccatatcgcacagaggagcacgcccggcaactgctgagtcaaggttccattgccctgcaaggcatacacggcgaagtgtcattccggaatctcgccatcgaacggcttgccaaggaagcacgcaacgaagccgacacgcttgctccggtagacgagcgcacggatgagataatcaggctacagcagcacgatttcccagttatagactatcacgttcacttgaaaggagggctgacgaaggaaatggcacacgccatgtccatgaattacggtatcaactatggtgtcgcccccaatgccggagaaggaggcgtaggacgtatgctggccgatgacaaagaagtgtacgactattttaatgaagtaaaagggatgccattcctgtgcggtgtacaaggtgagggacgcaaatggacggcaactttctcgcaggaagccttggggattttcgattacctgtttaccgacgccatgaccatcatagaccacaagggacgtaactcgcgcatctaccgggccgaagaagcactctttgatgacattacgcttgaacagtatatggaccaccttgtcgaccaaacagtcctgattctgaccaacgagcctgccgacatttatgccaaccctaccttcttgcccgatactatggcgcatgattacgacaagtactggacggacggacgcattgaacgcgtattggatgtattgcaacaacatggaatcgctctggaaatcaatgcacgctaccggattcccagtttcgagattatccgtcgcgccaaagcacgtggaatcaaattcacattcggtacaaacaatgtcgatgccgacttcggacgactggaatactgcgccgaagccatcaagcaatgtggcctcacagccgacgatatatggttcccgtcgatgagcacacgccgctcccgccccattgtcatatacaaccgattcgagtagcagggaacaaccgctgtcatcttcaccaacagaaacgatacacctatggacattcttctcatcatcttgggcatcctctgcctgattgtcggattggcaggctgcatcctgcctatgattccgggaccgcccgtagcctatgcaggcttgttgcttctacatttcacggacaaggcgcagttttccaccacgcagttacttttatggctggcagcagtcgtccttgtacagatactggattatttcgtcccgatgctgggcagcaaatacagcggaggcagtcggtggggaacgcgcggctgcctcataggcaccatcgtagggttgttcttcatgccttggggcatcatcctcggcccctttctcggagcctttgccggcgaactgatgggaggcagcaagacagaccaggccttgaaatcggggctgggctcgctgcttggattcttgctgggcacagtagtgaaatgtgtgatgtgtgcgtacttctgctgggagttcgtcaaagccttggtctgacaccagctcctctccttctgcccgggaacaacttatcccccgaccatcttccacacggtagtccatctgcatgagatgtacatctcatgcaagtagagagaatagtccaagccaatgtcttccattggtttacaaatcttaatcttctgcaagcgagacaaaaaatcagcttcatttcaagataaatacgtatatttgcccactaaacagagaaagaacgctttacgcgcaatttacaagaagaaaaacagcggtaaacgtctgtgagttattaacaaaacagccgacttatcaaccgtttttgcaatctttctccaaatttgtaggcgctatccggaattatcacttatttcgctgccaataaatattgagattatgggaaaaataattgctatggctaaccaaaagggtggtgtaggcaagactacgacgacaatcaacctcgcagcctcactcgccacgcttgaaaagaaagtgctcgttgtagatgccgacccgcaggccaatgcctcctcaggattgggtgtggacatcaagcagtcggaatgtactatctacgagtgcattattgaccgtgcagacgtacgcgaggcccttcatgacacggagatagacacactgaaggtaatctcctcccacatcaatctggtaggtgccgaaatagagatgctcaatctgaaaaaccgcgaaaagatactgaaagaagtactcgctccgctgaagaatgagtttgattatatcttgatagactgttccccgtctttgggtctgattacggtcaacgcactgactgccgccgattcggtaatcatccccgtacaagcggaatattttgcactggaaggcatcagcaaattgctgaataccattaaaatcatcaagtccaagctgaaccctgccctcgaaatcgaaggcttcctgctgacgatgtacgactcgcgtctgcgccaggccaaccagatttacgatgaagtgaaacgccacttccaggaattggtattcaacaccgtcatccagcgcaatgtgaaactgagcgaagctcccagctacggcctgcccaccattctctatgacgcagactcaaccggagccaaaaaccacatggcacttgccaaggaattgataagcagaaacgaaaagaagtgattatagtggttagtgattaatgattagtgataaataccatatttacaatgcacaaacaaatcatcccgtatggttaaattgtaaatcgtcaaatagtaaataaacagatggcacaaagaaatgcattaggacgcgggctggacgccctcttctccatggatgaagtaaagaccgaaggctcctcctctatcaatgagatagagctgtcgaagattacggtcaatcccaaccagccccgtcatgaattcgacccggttgcgttgcaggagttagccgattccatctccgaaatcggcatcatacagcccatcaccctgcgcaagcttagcgacgacgaataccagattatcgccggcgagcgtcgtttccgtgcttcgcagcttgccggactgacaagcatccctgcctatatccgcactgcagatgacgagaacgtcatggaaatggcgctcatcgaaaacatacagcgcgaagacttgaactccgtagaaatagccctcgcttaccagcatctgttggaacaatacggactgacgcaggaacgcctcagcgaacgcgtaggtaagaagcgtaccaccattgccaactacctgcgcctgctcaaactgcccgcccccgtccagatgggactgcagaacaagcagatagacatgggacatgcccgcgcgttggtaacgcttggcgatcccaaactgcaagtgaagattttcgaagaaatcctggagcacgggtattccgtacgcaaagtggaagaaatcgtaaagtcactgagtgaaggcgaaagcgtgaagagcggtggtcgtaagattgcccccaagcgcgccaaactgcccgaagaattcaatatgctgaaacaacagctctcgggctttttcagtaccaaggtgcagctaacctgctcggagaaaggaaaaggtaaaatcagtatcccgttcaataacgaagaagaattggaacgtatcatcggcattcttgatacgctgaagaaataaatgaggaaaaaaggaagaatatatcagttagccattgccctgctgctctgttttttacagatggcagggattgctatgtatggtcaagaccgtccacgtgccgcttccaagcgtgcgcagcggcatcagaccgatacactcaacaccgtggtgaaccgggacagcctcactgttgccgacagtcttgcagccgaaaacaagcggaagatgctggaaatgactgccagccccgacctgaaggaacagcccgtgcctacagacagtctgcaaaaggccatcgaccccaaaaggtgggtacctaatcccacaaaagccacctggcttgccctcgtcattcccggcggtggacaaatttacaaccgcaagtattggaaactgcccatcttctatggaggatttgccggttgtgcctatgcccttacgtggaacagcaagatgtataaggactattcggccgcctacaaggatgccgtaaatggtaatttcaactccagtaccattaccgacctgctgcctcccaactataactataccgaaagccagctgacggagacactacggaagcgtaaggataccttccgacgataccgcgacttgagcatcttcgcctttatcggtgtatacctgctgtctgttgtcgacgcatacgtagacgcagagctgtccaactttgacatcacccccgacctcagcatgaaagtggaacctgccataatcaacagccagatgactggttcctctaataagaacgtcggcgtgcaatgcagtttccgattctaaaaacgaaaattaaagcataaattattacctaatgacacacaaggccatatatatgaaaagaattattctcggttcctcgcttctgttttgcgccctcttcaccgctccggccatgcatgcgcaagaaagcgtggaagtgcttatccgcgaaaacggcacggaacgccaggaatccatcgagctgcccaaaagcatgacctatccgctggacagcctgctcaatgactggaaagccaagaattacatagacttgggaaaagactgcagcacctctaccgtaaacccgatgttcagtgactctgtatacatagaccggttgtcgcgcatgccgaccgtcatggaaatgccatacaacgagattgtgcgcaagttcatcgacatgtatgccggacgtctgcgcaaccaggttgccttcatgctgagcgcctgcaacttctatatgcccatcttcgaagaagcgctggatgcctacggcctgccgctcgagctgaaatacctgcccatcatagaatctgctctcaacccttctgccgtatcccgcgcgggagcctgcggactatggcagtttatgctcgccaccggaaagatatacggactggaaagcaacagcctcgtagacgaacgccgtgacccgataaaggcgacctgggcggcagcacgctacctgaaggacatgtatgacatttacaaagactggaacctggtgattgccgcctacaactgcggtccgggcaccatcaacaaagccatccgccgctcgggagggaaaaccgattattgggaaatctacaactatctgcccaaagagacacgcggctacgtgcccgccttcattgccgccaactacgtaatgacctactactgcaagcacaacatctgccccatggaaaccgacattccggaagcaaccgatacggtgcaagtaagccgtaaccttcatttcgagcagatttccgacctatgcggcatcagcctggaccagataaagagcctaaatccccaattcaagaaaagcatcatccccggagagagcaagccgcagacgctacgcctccccatcaactacatcagtgccttcattgacaagcaagacaccatctatgcccaccgcagtaacgagctgttcaagaaccgcagagtcgtggccgtttccaatacacgctcgacggcacgtagcagcaaaggcagtaccgctacggggaatgtcacctaccacaagatacgcagtggcgagaatctcggcagcattgcacggaaatacggtgtcactgtcaatcagttaaaaagttggaatggattgcgcagtaccagaatctccgcaggaaagcgcttgaagatttataaataaagacataaacgcttgcccggtgttgaaaattgcttatttttgcaaaaagtgaagtgaagaaaggagaaagcagtatatggaagaaaatataagtcagaaggaaaaggaaaaagccgaagaggaaatgatcgaacaggcattccaagaactgttgaacgactatttggccaccaagcaccgcaagcgcgtcgaaataataaccaaagcattcaactttgccaaccaggcgcataagggcatcaagcgtcgttccggcgagccctacatcatgcaccccattgctgtggcaaagattgtctgtaatgagataggactggggtctacttccatatgctcggcattgctgcatgatgtggtggaggacaccgactacaccgtagaggatattgaaaacatcttcggtcccaaaatcgcccagattgtagacgggctgacaaagatttccggcggtatcttcggcgaccgtgcctcggcgcaggcagagaacttcaagaagctgctgctcaccatgtccgacgatatccgggttatcctcatcaagatagccgaccgtctgcataacatgcgtacactcggctccatgctgcccaacaagcagttcaagattgcaggcgaaacactctatatttatgccccgctcgccaaccgcctcggcttgtacaaaatcaagacagaactggaaaacctgagcttcaagtacgaacatccggaagagtaccacgagatagaagagaaactggaagccaccgccgtggagcgcgacaaggtattcaatgagttcaccgctccgatacgggcgcaactggacaaaatgggactgaaataccgtatccttgcccgtgtaaagtccatctactccatctggaacaaaatgcagaccaagcatgtccccttcgaggaaatctatgatttgcttgctgtccgcatcatcttcgagccccgcaatatagaggaagagctaaacgactgcttcgacatttacgtctccatatccaagatatacaagccccaccctgaccgcctgcgcgactgggtgagccatcccaaagccaacggctaccaagccctgcacgtcacccttatgggtaacaacgggcaatggattgaagtacaaatccgcagtgaacgcatgaatgacgttgccgaacaaggctttgccgcccactggaaatacaaagaaggcggaggcagcgaagatgaaggcgaactggagaaatggttgcgtaccatcaaggaaattctggacgacccacaaccggacgccatcgattttctcgataccatcaaactgaacttgtttgcatcggaaattttcgtcttcaccccgaaaggcgacctcaagaccatgccgcagaactctacggcactggactttgccttctccttgcataccgacatcggcagccactgcatcggcgccaaggtaaaccacaaactggttcccctaagccacaaactgcaaagcggtgaccaggtagagatattgacctccaaatcgcaacgcgtgcagccggagtgggaagtgtatgccaccaccgcccgcgcccgcgccaagattgccgccatcctgcgcaaagaggcgaaagcctatcagaaagaaggtgaaaccatactgaacgaattcttcaaaaacgaggatatacgtatggataatgctgctctggacaagctgaccaggctgcacggcttccacacccgcgacgagctgctcgttgccatcggcaacaaacgggttgtgctgggcgatgccgacaagaacgtgttcaaggaaaagcagaacagcaactggaagaagttcctgaccttctccttcggtaacaaggacaacaaggatgccaaagaacaaccggaagagaaaacaccgcaagagaaaatcaacactaagcagattctgaagctgacggaagagaccatctcaaagaactatattatggccgactgttgccatcccattccgggtgacgacgtactgggatacatcgacgagcaaaaccgtgttgtcatccacaagcgccaatgccccgttgccacccgccttaagagtagctacgggaaccgtatcatcgccaccgagtgggacactcacaaggatttgtcgttcctcgtcaccatatatataaaaggtatagacagcatgggattgctgaacgaagtaactcaagtcatctcccgccagctcaacgtgaatatccgtaaactgaccatcgaaaccaacgacggtatcttcgaaggaaagatacaactctatgtacacgatgtggacgacgtgcgcactatctgcaataacctgaagcagatacagaatataaaacaagtgacgagagtagaggaataaacggagtggtatttattctacttcagtccttgaatattttccttcaagctctccacatcctcgtaagtaaactcatccaatgccagtttcatgcctaccagttcttcgcggatagctctcaggcgatctacgatttcaaagttgcgtatcgtagcttctttattgtctttcatccgttggcgggcgccgggcaaggtcattccgcgctccttcaccagatgatagataagtttcactgtctcaatgtcctccttacggtactggcgtattccccgcccccccttcttcggattgagttgcggaaactccttttcccagaaacggagcagtgattcgttgacatcgaacatggcagccacctcgctgatggagtaatataactttaaattcttatctgtattcagcatgatgtaatcctttctctataaatcatccgtcaatcaagcaccttaccatggttcgccgcaatctgtatcatgcggtcataatcctcggcactgagatccatgaagtagtagttgacgggattcacaacttttcccttaacgtgtacttcgtagtgcaagtgcggaccagtactcttgcccgtactgcctaccccgccaatgacctcaccacgtaccactttcttgcccaacttcgtccggaaatcgcgcaagtgtgcatacaccgtctgataaccgaagccgtggtctatcacaattctgttgccatagcccgattgccagcccatctgcaccacggtgccatctcccgtggcatagacatccgtgccctggggagccgaaaagtccataccctcatggaacttgctggtaccataaatggggtcaatacgcgtaccgtaacccgaagcggtcttacggaggtctttattggaaaccggctgtatggcaggaatgcagcgcagcatttcatcatgattcttgcacatctccaccacatcgtcaaaggagcgggactggatatagagttgcttgctaatcatatccattttctgcgtggtattgataaccaagtcggagttagccatatccatcagatgctcatagcggttggtaccgccgtatccagcctgacggatggcagaaggaatagggtcggccatgaaaatcacccggtacagattgtcatcacgctgctgtatgtcttgcagcactcccatagcctcgtccagccggcgggagaggacgttgtactgcgcctgcagtttgctgttctcctttcgcaactccttctccgacggagagccgaagataagcagcaatacgatgaaactgcccgcacccagccccataccgatgaacaaacggcggagaatgctcagcgcccgctgcctcacggtaggataaatacggtcgtacgtctgcgtctggggattataaatgtagtaaactttgcgcatcttaggaaatatttcgcttgtcaatgcgacaaaagtaataaaaacaagctatctttgcacagttttttcaagaatattaagactaagtagcaagtagttagtagtaagaaacgggcaaaaaacgacaagagaaggtaaatcaaattagaatcagataaatcaatagagagtatgttgactgcaaacgaaatcagagactctttcaagagtttcttcgaaagtaaaggtcaccagatagtgccttcggccccgatggtgattaaggatgaccccacgttgatgttcaccaatgcgggaatgaaccagtttaaagatattattttgggcaaccacccggcgaaatacaaaagagttgctgactcgcagaaatgccttcgcgtaagcggaaagcacaacgacctggaggaagtgggtcacgatacctaccaccacaccatgttcgagatgctgggcaactggtcgtttggcgactacttcaagaaggaagccatctcctgggcatgggagtatctggtggatgtattgaaactcgaccccaaagacctctacgccaccgtattcgaaggtagcgccgaagaaggactggaacgcgacaacgaagccgcttcttactgggagcagttcttgccgaaagaccacattctgaatggcaacaaacacgataacttctgggaaatgggtgatacgggaccgtgcggtccgtgttcggaaatccatgtggactcccgttcggaagaagagaaggccaaagtacccggcagccagctggtgaacaaagaccacccgcaggtgattgaaatctggaacctcgtgttcatgcagttcaaccgcaaggcggacggcagcctggaaggacttcccgccaaggttatcgacaccggcatgggcttcgagcgactggtgcgcacactgcaaggaaagacctccaactacgacaccgacgtattccaaccgatactgaaagccatcggagacatggcaggcaagaagtatggcgaagatgagaagtcggacatcgccatgcgtgtaattgccgaccacatccgcaccatcgccttctccatcaccgacggacagcttccgagcaatgccaaggcaggttacgtcatccgtcgtatcctccgccgtgccgtgcgctacggttacacgttcctcggacagaagcaggcattcatgtacaagctcctccccgtactcatcgagaacatgggcgccgcttatcccgaactggatgcacagaaggaactgattgccaaagttatcaaggaagaagaagattccttcctccgcaccctggagacgggtatccgcctgctggaaaagaccatggcagatgccaaatccaccggcaagaacgaaatcagcggaaaggatgcctttaccttatatgataccttcggtttcccgctcgacttgacggaactgattctccgcgaaaacggcatgactgccgacatcaaggagtttgacgccgaaatgcagcagcagaaacagcgtgcccgcaatgccgccgccatagagaccggtgactggattacgctaaaggagggtactaccgaattcgtaggatatgactatacggaatacgaaacatccattctgcgctaccgacaagtgaagcagaagaaccaaaccttgtatcagattgtactggacaagactccgttctatgccgaaagcggcggtcaggtaggtgacaccggtgtattggtgaacgagtttgagaccatcgaagtggtagacaccaagaaggagaacaacctgcctatccacatcaccaagaagctgcccgaacacatggaagctccgatgatggcatgcgtggataccgacaagcgtgccgcttgtgccgccaaccactctgctacccacttgctggatgctgcgctgcgcgaagtattgggcgagcatgtagagcagaagggctctttggttacaccggactccctgcgtttcgacttctcacacttccagaaggtgacggacgaggaaatccgcaaggtggaacacatcgttaatgcaaagattcgcgccaacatacctttgaaggaataccgcaacattcctatcgaagaagccaaagaactgggcgccatcgctctgttcggcgagaagtacggcgaccatgtacgcgttatccagttcggttcttccgtagaattctgtggtggtacgcacgtggctgcaaccggaaacatcggtatggtgaagattatctccgaaagctccgtggctgccggtgtgcgccgtatcgaagcctacacgggtgcacgcgtggaggaactgctgaacaccatcgaggacacgctgcacgacttgaaggcgctcttcaacaacgcacccgaccttgccggaaccatccgtaagtatattgacgaaaacgccggactgaagaagcaggtagaggacttcatgaaagagaaagaagcacagctgaaagaaagactgctgaagaacgtgcaggaagtcaatggcgttaaagtcatcaagttctgtgctcccctgccggcagaaacagtgaagaacatcgccttccagttgcgtggccagattacggaaaacctgttcttcgtagcgggaacagaagccgaaggcaagccgatgctgaccgtcatgctgagcgacaacctcgtggcaggcggactgaaagccggtaacctggtgaaagaagctgccaaacttatccaaggcggtggcggtggccagccccactttgcaactgccggcggtaagaatgctgacggactgaacgctgccattgacaaagttttggaattggcaggattataattgaaaataattggcgaaacacttgacatcgcctctgtgatgttgtatatttgtaatgtcattttttagatatttcaaaattaaactaccgggaaaggaggagcattgcttctccttttctttttatcctccacggtattccatttgaaatgccacatgccggctccccaaactccacaccttaccatcctaaatgccacaccttagcaagtgaaatggctggcatttaccctccaaagccctggggtttccgtgaaaaaccctaaggtttgggacagtgaagtggagggaacggatgattagtccagaacaaacagacaatgcattcgaagcaaacgaatgatgcatacagaacagacagatgatgcgcaacagaaacaaaaacgggaagcctaagcctcccgtctgttaatctttcgtaaatctgctcttgacaagatttccactaaaaccttattccatccgaagtataaacatttcgcgataaaccaccagtgcaccttcgggcagcaaaccggaaggacagaaaggagttacattttccgcaagtacacatttaccatttcccgagaccgtccgcgtaaagagcctcttctctccattataagtaaactgccacaatgcatatgtatctccgttctcatcttccactggaactgtctcgtatatccccattagcggttcctcctcttttcccgtcggatagatttccaatacacctttccacatactattggagaaatcttcgggcaccagcacataatacccgccatccttcacccaaggacgctcggcaagtgccttagaaacatcacccagcagttccgtcggtgcaccactactgataccatactcgaagcccattttcgtcaacgtatattgcctacgacctttcaccgtgatgcgcagttgtgtttcctcaccggaaccatccatcaccttcacaatcgtctccccctctgccagcggatgaatcttgatacgctgatacccgttgacatcatcggtaaaagtcacggaagccaccgactcgtgctcgttaatcacattataggaaccgtcgccgccgtcaatgcccagcactgtatcttcgtttgtttcagaaagataataagaaagattggacaccagattgtcacatgtcccaatctggtagataggctccacaccttcgaaaagtaccatgcttcggtaatcgtcctcgcaaccggaagcggtaaacagcagtgctatcaaggcaaagagagagtatagtttcttcatacttgttcagttatagttgttctatctacaaaaatacaaaaaatgccggaatactgcatcggtacccctctctttttcaaactatttgttcttccggatagttcaccaagtagagcgttcccgtggcacgggtaaaggcggtgtagagccaacggaaataatcgggtgtcaggtattcatccgtcatatacccctggtccagaaagacattcttccattgcccgccctgcgccttgtggcaagtcacggcataggcatacttcacttgcaaggcgttgtagtacgggtctgccttcatcttcttcatccgctcgcgcttcacggtgatgtcggcataatcttcgaggacggagtagaaaagccggtcgttttctgccttgggcagcgcaggcgagtcggtatgcagcgtatcgagcagcatgttcacttccagttcaaagtcgttatagtcgggaaagaccagcgtcacgtctgcaaagcggaagccatacagctctcgcgtacggcgcacgcggcgcaccacggcagtctcaccgttggcaatgaaatccatctccttctccttttccgtccagaagtagttatttttcgccaccatcaacaaatcaccggtgtttaattcatcctcacgccagagaatctgcgcacggatgcctttgttgtagatgttcgccctcttgttggagcggcacaccacgatagtttcatccaacccgtcatggtcgtagcaagagttcagcgtttctatcagctcatttccgggcagaactttaatgtcggcaaaccccgaaacctttatcttcggcaggctgtagcaatcgtcttccgctatcaactgcctcaggcgggtggcattccacaaaatgcccgactgttgctcctgacgcaccacctgcgtcaagtccacctccaccacttccagcccgtagcctttcaaggcatcggcaaagagggcagggctctgctcctcccccaccggcggcagctgtgccgtatcgcccatcagcagcaggcggcatccctggccggaatagacaaactgcaccaggtcgtccagcaacctgcccgtgccgaacatggaaccggacagtccctcattggaaatcattgaggcctcatccactatatataaagtgtgagttgtcaaattatcgttcacagaaaaattgctcagctcattggagaaagattgctgtctataaatttttttatgaattgtaaacgccggatgccccgcatacgccgagaaaacttttgccgcccgtccggtcggtgccagcaataccgacttttgttgcaacttatccaacgtccgcaccaaggcaccgaccaacgatgttttacccgtccccgcataaccacgaagcataaaaaccacctcgctacggggtgacagaaggaactccgataaagattttacagcaatttcttgctcaggagttggttggtaaggaaaattttccttaatttgcctttctaaatagttatttatcatttttgtaacagaaaaaagtaaagggaactatcgtttttaaattaatttcttttatttttgcggtgcgaatataacaactaaaaaacatatttatcatgaaaacagtatttaatgtcattttaggcttatgtgctttggtgctaatttatatttgttacaccagcattatgggtcctatcaactttgaaaaagcaaagaagcacagagacgcagccgtcattgcacgtctgattgacatccgtaaagcacaattggaatatcgtactttacatgaccagcaatatactgcaagcttcgactctctgattgactttgttaaaaaccagaaacttccgttcatcttcaagcaaggagaactgaacgataagcagctggaagacggtctgactgaaaagaaagccatcaacatcatcaataaggcaaagaagacaggtaactatgctgacgtcaagaaatggggattggaaaacttcaaacgtgacaccttgtgggtagccgtattggacactatcttcccgaagggcttcaaccccgattcaatgagatatgttcccttcggaaacggtgcacagttcgaaatggctatcaagaatgatacagctaaatccggcgctcctttctgtctgctcgaagtgaagactccgtacgaagtttatttgaacggtctggatgcacaagaaattgccaacatcaaggacgtacaaaccaaacttggcaagtactgcggtctgatgattggtagcttggaaacagctaacaacaacgccggtaactgggaataatctcaccccgacaaacgtatgatagaaacgactgattttaataaatcggaacagtatacattatccatccgtctcagtacggatggattttctttttctgtgttcaaccctttgggcgacggcgagttctcttactacgaccgtgcagtggacgagtccttctccctcactgccaatctgaaacagaccttccgcgaactggcatggctggaacgccccttccgccgtgtcaatgtgctcatggcagacaaacgcttcacgttcattcccctggagttcttcgaggacgaacaaacggaaatcattttctatcacaaccatcctaaacgggaaaacgaaaccgtacaatacaacatactgcataagaacagcactgtcgtactgttcggcatggataagagtgtctgctccttccttcgcgaacagtatcccgatgtcaagttctattcccaagccagccccttcattgagttcttctcctcaaagagccgcttgggcaacaaccggaagatgtatgcacacttgcgaaaagatgccgtagacgtatacggctacgagcgcggacgcctccttcttgccaattcctttgaatgcagaagcacacccgaccgtgtctactacctattatatatatggaaacaactcggcttcgagcaggaacgcgatgagctgcacctgaccggtgacctaaacgacaaagaactgctactgcccgaactgcgaaaattcatccggcaggtattcatcatgaatcccgccactaatcttgacctgcaagccataaccctatgcgagtaatcagcggaatatacaaaagaagacgtttcgacgtgccccactccttcaaggcacgccccaccacagactttgccaaagagaatctgttcaatgtgctctccaactacatggactttgaggacggcatccgtgccctcgacctatttgccggtacgggcagcatcagcatcgagcttgtgtccagaggctgcgaccaagtaatcagcgtggaaaaagaccgcgaccactatgccttcatctgcaaaattatgcaggaattaaagacggacaagtgcctacccatacgcggtgacgtattcaaatacctcaaaagcggacgcgagcagttcgactttatctttgctgaccctccctacgagcttgccgggctggaaaccttgcccgatctcatcttcgagaacaacttgctgaaagaagacggactcttcgtcttggaacacgggaagaaaaacagtttcgaggaacatccgcactttgtggagagaagggtatacgggagcgtgaacttcacgatatttaaatgatgaatgaagaatggtacgatatgaatacacttcaagaaattcttcattcatcattcttcattataacagcggcgccatcagccgcaccacactctctgcagccttacgataccaggggcgcttcacccagttcttcaggaatacttgtacgcagtcgcgctggtcttgaaggaagatttcgcgcatctgaagcgctgtttctgtgtcatagatgaaggcattcacctcaaagttatgttcaaaactgcggaaatccacattcgtagagcctaccgtggacaactcatcatccgaaaccatcagtttggagtgcaagaagcctttcttatagaaatagaccttgactcccgaatagagcacatctgccagataagagcaggaacccagatgcgtcaagcggttatcagcacgcatgggcaacatcagacgcacatcgacacctgacaaggcggctgtctgcatagcaacaagtacggcttcggtgggcaggaagtagggagtctggatatagaaatatttctttgcgctggaaatggatatgacaagtccctgcataatgtctttccatgggcctacgggctcactcgttacaatctgcgccaaggaagtaccgcagttttctattttcgggaaatagcgggtagacgtaatcagtgtacggtccacaaagtaccaatcgagtaggaaggcggtctgcaatccgtgaacagccttgccctccagcagcagatgtgtgtcccgccagatgccccatgagaatccgcgcatatagcgttcggcaagattcataccccccacaaagccgatgcgcccgtcaatgacaacaattttccgatgattacgatagttcaccttactggtgaaaagcggaaaacgtacctttagaaagctgcgtacctcgataccggcctcgcgcatctcttcaaaaaaacggttgggaacatgccagcaacccacatcatcataaatcacacgtacctctaccccggcacgcgccttttccatcaggacatcacgtaccaagcgcccaatggcatcgtcctcaaagatatagaattccatgtggatatgcttcgttgctttccccagttcgcgcagcagggattgcagcatggagagccccagggtataggcttccacccggtttccatcgaaggggaaagcctggttggtattacggaacaaggatatgagacgactgtaattgatgggaagcgcacatgagtcctgcgccagatattccgccataggtttcttcaacaagcggctgtaactcttcttccctatcatgcgcacacggcgctgactacgcccgaagaagaagtaaaacaccagccccacgatgggaaggaacatcagtatcagtatccatgccatggttttcaccggattgcggttgtcgaggataatgacgacaatcgttccgatgatggcaccgaaataaacaatgtcgaaggctatcgtagcaatctggctggcaatgaagttccaatcaagcatgttcacagacaattaagtgtgaaacaaatgtaggaaaaacacagaaactttcaccgaagattacagagattaacataaaagtccctcttcccccaacttgtctgaaaacttatacttgctatcgctttgacgcggatgacgcagatgacgcagatttttaatattcttatctgcgtcatccgcgtctgaaaaataatcaaaaagaaacctgccacagaattgagagtgtatcagaatgacaagctgattaggggggtgatcccctccgctttagaacggcctgcgtcctccgaaaccgccaggaccatgccccggaccgaagcccggaccgccgaagccgcgtctgccctgcatcttatcgcgggcggccttgctgccgaaaatattcagacgatagatgaagtgaagcatgcaatagctgttcacgccgttatattcgtacaccgagcggccgcttgcagtcagcgaacggctgatgttactctgcttcttcagaatgtcgtacatctcgaagctgacggtggcattccctttcaggaaagtctgcgacaactgtgcattccagataagctcgttacggttcatactgctgtccgtatatcctcgacggctctggttggcaatgttggtagagagcgtcatgttccacggcatggaaatctgcgtattggcaccgtaggagaaggtatagggctcctgattattgtcaggcgtcagtttatccttctctattgaataggagatgcttccgttcaagccgaattcaaaccagtcattacgataggcggcattcagacgttcgcccagcgtcaggttggtggttgtattcttccgttccacggcatctgctcccttaccggacgtcagataagccacattgttctgatagttggcattggagaaggagttgatggtatacttcttattgggcagtgccgtattgaagccaaacatgccgaacgcattccaattaccgttgatatttttcggagttgtagtccatccaccagtctccgaattgtacacacggctattgctgatgctattctgcgttgccgagaagttgacgtgcgacataataccgcgctgcttttcggcattatacgtattatagaagaatcgcatgttgtgcgtgaaggaaggcttcaagcccggattaccgatacgcacattctgcggattggagttgtccacaatcggcaacagattctccatactcggttggctgctacgcccgcggtatgtcatacgcagctggctcaccttggagaaacggatgcgcaagtccaggttcggagcgaagttgaacacattgcgggtggtatcaatcatatagtcgccgcgcttataggacaatacagaatgctgcggctggaacgacatacctgcgctcaactgatacttctcgcggataaagcgcaaagacacggatgcatcgtggttgtagtagcggtattccgcatacttacccagactatccaccgcatgctcttcatatcccgtgggaagctgggttgacaatccccaatccggaaagccctgcaaatcatacgtcgtcttgtcactctcgctatacttgtactggaactgatagctgaattgcaagaaagtggcgcgggctatcggttcgctgtaagtcagctgtgcactgtaattgtagttcttggtaggagtagtgatgtactggttacgaaccaagatggagtctcctcccaaagcattcagcaactggaagtaatgtgtttccgactccgtatactggttgttgtcattattggtataaccaaatcttccacggaacgtaacattgcgtcctttgtcattcagctttctgttcaactgcaaggttgcatccgtagacacactcttgttgtcgttcagcgaaccgctgttgatggcatttatacggatacttctcaacgggtcatcgtccggattgagaatcttctccagattcagccagttattggggtcgctcaccagactgtaagggtcggaattgaacgtaccgctctcagaattggagagattgtccgttttgccgtacgagaagttgggacggaaaatgatattcgtcatcgagtccggcttccactccatacggaaatcggcattgaaattcttggctttgttacgttgcctgctgttcgagttggagtaagagttgccgtccggcagaaagtcctcggtagaaccgatacttgcaatatccccattctgatagttgtagcgtgcactaccgcccagttccagcttatcggtttgggtagcgaagttcacacccagcattttcgttgcagtaagtccgttgttcctgcgccagcgcggaggaccgccaccgcccgaaaagccctggtcgttcacgttattggcagaacccactaccgacacctgggttttgtccacgaagcggttcagcatgaagcggcccatatagcggtcttccgtccctccggccacgtcggcattaccgaaccaaccctggttcatgcctttctttacggtcaggtcgagcaccgtctcctcctcaccgtcgtcaataccggtgatacgtgccaaatcggacttcttatcgtaggttttcagcttctctatcatatctaccggcaggttcttcaaaccggtctttacgtctccaccgaagaactccttgccgtcgaccataatcttcgacaagtccttaccgttgattttcacattaccttcgtcgtcaatctccgcaccgggcagcttcttcaccaactcctcgagcatggctccctcgggggtacgataggcagatgaggtatataccagtgtatcttccaccacctgcacttgcggcgcttctgccgtaaccacagcctcggccagcatcaccgcatccgtttccagtgtcagtgtacccacgttcttggcagttgtcgtagcataaaggtgtaaagggatgtactggctcttgaatccgatgtaggaaaccttcagcacgtatttacccgcactgactttgggaagagtgaaataaccttgtgccgtagtggccgtacccgatgcctgaacactgtctggcaacaaaagcaactgcacggtagcttgtatcgcaggctccttggtgtcctccacgacacggcccgataccgtaatgtttttggtctgtgaaaatgcagacagcgttgttaccaacagcaacgccatccccgtgataattttcttcatgtgtctattctttgtctattctaaatgaacaatgccttttattcactgtttcatttgacagacttccgggcaaaaggtttaatgccccacatgacgatttgctttatttatcgaccattccgcttaaataatctatcaacggtcgctttctttataccaaattccaagcaaagcacattcaatataagaaatatgagaaaagaagaagaatcgaccgaaaggaggtcaccctgcgccacccggtagagcataccgccgaagataaaaagaacggtcagaaagatggcattgcgcgtggccttgttgcgcacctgctctatctccttattctcgttcttcgtcaaggcaaagattatcatcagtgcccccatcatcatcaggagtttggagcattccttatagaacagcaagttggcatctgtcacttttccccacaataggaatatgaaagggaggaacaacgccaaagctatgatgaaataacccagcggacggcaataaacgggaagtaatgctctcatttctatcaatcaattacaaattactaattacaaatagcgggaggcagatgacggaaacaccttgccacccatagaatttcacgggacaaagataacgttttattgccaaaagagctatctttgtgccacaatataatgaagaaggccccctttccttcataatccgtaacatcagtaattggtaattcgtaatttgtaattaacaagatgagtaaacaagaagtaatcctttgcgaaggactggcaaacagcctgacgcatgccatagagaagtgtccccaagacaagcttttcatccttaccgacgagcatacccaccgcctctgccgcccgcatctggacggtatccccgccctggaagaagcggaagagattattatcggggcagaagatgtgcacaagaatatggaaacgctggctgccgtatggcaagccctgagcgagaaaggggccagccgccactccctgctcatcaatctgggcggtggcatggtgaccgaccttggcggttttgccgcttccaccttcaagcggggcatcgcctacatcaacgttcccactacgctactcgccatggtcgacgcttccgtgggaggcaagacgggcatcaacttcaacggtctgaagaatgaaatcggtgtttttgctcctgccgcctgcgtgctgctggaaaccgaattcctgcgcagcctcgatgcccataacttcttctccggctatgcggagatgttgaagcacggcctcatcagtaccccggaacatctggcagaactgctgtcattcgatacggaaaagatagattatgccttactgaagtccatggtaggacgttccgtgcaggtaaaggaacacatcgtagaagaagacccgcaggaacatggcatccgcaaagccctgaacctggggcacaccgtaggacacgccttcgaaagcctcgcccttgccgaaaggcgtccggtgctgcacggctatgcagtggcatgggggctggtctgcgaactctacctttcttatataaagaccggattcccgaaggacaagatgcgccagaccatccaattcgtcaaagagaattatggcagcttcaccttcaactgcaaacagtaccaccagctgtacgaactgatgaagcatgacaagaagaataccgccggagtcatcaacttcaccctattgaaagaagtgggtgacatctgtctcaaccagacggcagacaaggagactatcttcgaaatgttcgacttttatagggagtgcatgggggtataacgctcccgctccctcttcggcaggctctccacaaccagccgataggagcgtgccaccagttctcggataatgctgtccggtacatcctgattaaaatacacactgttccaatacttcttgttcatgtgccaccccggcttcaccccctcgtaccttgcccgcagctccgttgattcctccgggcggcacttgatgcagcagaagtcgaacacttcgatattgacaaagcagaaccacttgtcgcccacataaaagcaaagcacatcgcggctgtatctgtcggccacattaggaaaaggcatcttctcgctcactcccggcaaggagagacagtattctctgaattcttccacattcatcgctcactcctcccccgaaaagtcctccgtatcattttccatcccaaccgggtcttcatccggaattcccgtctttccctcggcccgctcctttcgcagcgtttccggtcgcaacatatcgtgagggaaatatcggctaagcggataacggtagaaatccatcccgctgttcagcctcgccaccagcgacttatccggacgaaaatagacacgggataagcgtaccttgcccggcatcacatcgtcgggatgctcaaacccgtcactcgtcaccgccacatggaaggaacccagccccttaatggtcaccgactctccctccatcagcgcttcctctataaacttcggcaaatctatcaatacactctgcacgtctcccgaactcatcccttttctggatgccatacgctgcgccagcagctctgccgtcacacctccacgccgctgtaacacacgctgcacagcataatagagttgcttcaccccttccgccgtgcggaaaaccttctttcgaaccaaatagactatactcatactcttttcacaatgaacataatgtttcttactgcaaccagaccgctgacaccccacccgaaggttacttcccctaaacagaaagccagtttccatacggccggacagctattccccaacatgcacgagatgcacatctcatgcagttcgagacatacatctcaacacacgcgagatgtgcatctcatacagcaaaggtaatcatattccacctgatatacaaatatctttcatgtatcggggaataatattccgcaccagcttactccggctcttatcattaattaacaatgctgcatgcagggttttcgcaaatatgctatttctataaaagcaagacctattccaaatgtttaatttaaaagagtacactatgaaaatgaagtcaatctttaacaagaaaattttaatcgctattgcaaccatcagctccttaagcctccaatcgtgtctggacgacgatgataattatgccatgagattccccaatgccctggtaacggtaaagaccgatgcagagcagaccgtcttcctgcaattggatgacaagaccactctgctgcctatcaacatgacgaaatctccctacggcgagaaggaagtccgcgctttggtaaactacaaggaagtggacgagcccagcgatatctacacccaagctgtacatataaactggatagacagtatccttaccaaacccatcgccccggatttgggtgaagagaacgataccgtatacggcaccgacccggtggaaatagtgaacgattgggtaaccatcgcagaagacggttatctgacccttcgctttagaactcagcaaggagactatcaaacaaagcactttgtcaatctgctgctgagcgagaatccggaaaacccgtatgaagtagaattccgccacaatgccaagggcgacatttacggcaggtatgcggacggactggttgctttcaagttggatgccctgcctgatacagaaggcaagaccgttaaattgaaactgaagtggaaatcatttagcggcgaaaaatctgcggaattcgattattgtacccggaaatccgtaacgcccgaaagtccggctatcacttccgtaagaaacagcctaaacctgcaataacttcattcaaagtatgcctgcccgctcaaagccattgccttgcgaagcaggcatacaagtaaaaagagagcaggacacgttgaccgaaagccttgaaactgcaaaatataggttcattcaataaaaaaagcactataaatatttgctattttaaaataaagccgtacatttgcacccgcaattcgggatgtagctcagcccggtagagtacgcgtctgggggaattgaataagattaccgataataaacttataacaacatataaaccaaggagttaagacaacgcttaactccttattttttacccacgaatatcctacgaataaggtttccgggaaacttggtttatttaatccgattattgccttttgctatgtggattttgcattattgcattgaagagttataactcaaaataaatttcattggtgtttttatcgatgatatatattttaggtgatacagcctttacgcaggttgttgtgatgaatacagcaccgcccaagtttattttcctttttgtttcaccccaaccttgtatagtaaactgaacagccaatgccaaatcggcaatatgctcctcaatagccaaagcctcgctctccgtcattggtatttttatagtcgttaaataactcgccctgtcagtgctttgtcttttttgtacggtttgccttattttaggagtgcatttaatagcaaaccgaggaaagttcaaatatccgctaacgggaagaaaacctgtctcgtcaacgacatatccaaagtcgaacgtctttgtttttaaattatacgctttgtcccaccccatatttgccgaaaaaggaaagatataataatgcttcattgcatttaaattagtttttatgtttttcattgtttcaagcaatgtcttgccgtcctctgaatttgcaaatgtcttcctttttagttctgtatcatattgggttagattgtagtaactgcaaacatccatattatacaggtcgtgtaattgttcgatagaacgcgctcccgtacagattgtttttactttattatagcccacctcaaaacggcaattattattggaaaggtctaaaacgggtctttcttgcgctttaccaatcaacatagcacaaagagaaagtacaataagaaaagttcttttcataatactgtgatttactttccacagccccgacaggaaaggtttatataaaaagatagcgtgaggctgttagaattatctgttttagaggctctggtaaacccgtggtacaagataaaacgacaccccacgccaagccatatatatcactgatatatacaagattagcatgagcgtttgtatcgtctatccccgtaccacatgaaattttaccagaatttctaaaacgggataaagctaaacgcttcctttaattaatatgtcaccaacaggtctttaacctgttagcgggacaaatataactaaaatccagcgttctacaaacgtttttagggatgtcgtggaacaaatttactcatttattgatagttcacaagattttagggagggaatggaaaatccagtgttcattgataaagccgtattgagctatggaattatacaggaaatctgcaaccaaacctgttttaccctctttttgcaaataggtttcctcgttatagacatcttccaactcttggctgtccatgtttagtttgccttgtcggacggctgataacttttcatcataagtggatatgaagaagccgtcccgccattggtttatagcctcatccacctcatttaaagcctgttttagctttgtcttattaccattcgtcagtctttttacataggtgcgcaaccattcctcatgcgcaaaacgggcttcccctttgagcgacttgtttatcaagccgcccaaaggcatatttattgccatactcataattaaaggattttagctactctgtctaatacgcttgttgaaaaactgtcaagatatacgtttgtcgttgtaagattacgatgccccaacgcttggctgataatttcacgggggacatcattgccttgtaaggtcatggccattgtatgacggctgacataggtagtcaggttcatacgaatacggagcaacttgcctaattgctttaaaccgtcatttatacgtttgtaacgactacggatatggtcatacagttgttccccctcataatcccttgttattattggcagcaaatagttgcctgtcaaagcagtatttgccttaaaccattccaactgctctcttatggcaggggttacaggtattgttataggctttgcatttttagcgttctgtgtcttttgtcttttataaacgatatgctcctctgtcccaaacgtgtcaatattgtttttagtcagcatggcttcatctataaaactcataccgaaacataaataggaaaacaggaacaccctacgggacaactccaacacaggattttgttgaggcgagttttttatcagctccaaatcatgtggtgaaaggtagcgtttggctgtttcctctgccagcttaccgatttcaaagccacccttaccgaaaggataggtgtttgatgaggcttcacgctcttttatcgccttgtttataaccgccctcaatgttttgaggtagtatttacgggtgtttccgcaacagccgtctttttccatttcaaggttaaaccgattgatgtactttacatccaactcggaaaacagccgttcctcaatcttgtcatcatactttgccagcatatgcaaagtacgctcatagacttttgcgttaccgatatgccttgtggcttttaggttttccacctgtcgcatgaagtagtcataaaccttaccctgctttgacataccaagaaactcctcctcgaactggttaagcgtccagtttacccgttcctccatgaacttttgtaggatttcatcctttcgaacttcataacggttcagcaacgcattgtaattttcgtagttaggattgacacgcttgtcttttttaaatcgggatgccaattcgtcccattgtcctttcgttgccgacagttgcaagtcgatgtactttgttttgtcctcttttgccacccttaaacagacggggcagcttccgtcccttctaatgttgcttttgaaaagcacgatttttgtccttgccatgttgttgtttttctttttaagttatatggccgacgaaattattttacactttacataggaataaagtatagagcttcactctcgctcaatgcaaagatagataattccgatgattaaaactacatcattgcaatggctcaacaaggaaggttccttaaaacattgcgaaattgggacagactttaacctacattaactttgcagtctatttgcatcccaattgttcgtcctgtttttcgattaaggttcgattaaggtttgattaaggtttcgggatgattagacgctttttattgcaataaaacgaggctttttgcatgtattttgcactgtgtaggatacaaaacaaccaccgaaacacacgggatactatttagaaccatgtctaaataaagacttgaagcatgcatatatatagatgataataagcaagatacaacaatattaagatgcgtccatatatattttatcagcgatttatttgctatttcaaaataaagcactacttttgcatccgcaattcgggatgtagctcagcccggtagagtacgcgtctggggggcgtgtggtcgcaagttcgaatcttgtcatcccgactgttgagcattaaggagttaagtctaagacttaactccttaatttttatagtatttcttaatgacagacttgctgccataaatatgctgaatatgtacaaaaagaagacggtgcctattcgcttcagcgggaatagctcatcaaattactggaattctcgtaagaaatctctatttttgcactttaaacaagaaaaattatgggagcagctaaatggataggcggcatcatcggcttcatggccggaggaccgctgggagccttggcaggttttgtattcggttcattgttcgacaccgattcaaatgacgcaggcagttattatggagaagcaccaacgcacggcactacctataccgggcaacggaacagtttcctcttctccatgctcgtgatggcttcgtacattatccgtgcagacgggcgcatcatgcatagtgaaatggaattcgtccgccgctttctgagaagcacattcggtgaggctgccgtgggcgagggagaacggatattactcaacctcttcgaacagcgcaagcagatggacagacaaaacccactggcatttaaaaacaccatccgtgactgtggaacgcagattgccgccaacctgacatacgaggaacgcttgcaactgctggtattcttggtagaaattgccaaaagcgacggacacgtctgcaacgaggagatagaagccttgaaagaagtggccatgtacatgggactatccgtcaaggaagtggaatccatgcttaacctaggcggtagctcactgaacgaggcctacaaagtacttgaaattgaacccactgccaccaatgacgaagtgcgtgccgcttaccgccgcctagccttgaaacaccatcccgaccgggtggcaacgctgggcgaagacatcaagaaagccgcagaagagaagttccaaagcatcaacaatgccaaagaacagatatacaaggcacgaggtatgaaatgacgtacctcgctccttgccttgtggacagcatcatgacgtttataaacattctatattaacatcaacccacacacttatgaagaaaacccttgcaatccttgcactaggccttactgccattgccggacatgccgccacgccgctctggatgcgcgatgtgcaaatctctcccgacggtacggaaatcgcattctgctacaaaggagacatctacaaggtgccggccaaaggtggaaccgccacacagcttactacccaagagagctacgaatgtacccccatatggtcgccggacggcaaacaaatagcctttgccagcgacagatacggcaacttcgacgtattcgtgatgccggcagacggcggaaccgcccaacggctcactacccactccaccggtgagataccctccacattcactccggacggaaagtatatcttgttttccgcctccatccaggacccggcaagcagcgctcttttccccacttcggccatgaccgagctttacaaagtacctgcaacgggagggcgtacggagcaagtgctgggcacccctgccgaagcggtctgcttcgacaaggcgggccatcagttcctctaccaagaccgcaagggatttgaagatgaatggagaaagcatcacatctcctccatcacccgcgacatctggctgtatgatgcaaagacgggtacccataccaacctcaccgaccgcgcgggcgaagaccgcaacccggtgttgtcacccgatggaagaacggtttactttttgagtgagagaaacggcggctcattcaacgtgtatgccttcccgctggcacagccccgagaggtgaagcccatcaccagcttcaagacacatcccgtgcgcttcctctccatgagtgacggcgggacgttgtgctacagttacgacggcgaaatctatacccagcagccggatgccaccccgaagaaagtcgccatagaactggtgcgcgatgaccggccgcaattcgccaacctgcagtcttccgacggagccacctctgccgttgtgtccccggacggaaaacagattgccttcacgctgcgcggagaagtctttgtcacttcggcagactatgccactaccaagcaggtgacgcacacaccggcacgcgaagcgggcctctcctttgcgacggacaaccgcaccctggcctacgccagcgagcgaggcggcaactggcagctctaccttgccaagatagcccgcaaggaagaccctaacttcccgaacgccacgctgattgaagaagaagtgctgctgccctccaccaccgtggaacgtgcctatccgcaattctcgcccgacggcaaggaactcgcctttatcgaagaccgcatccggctgatggtgctcaatctggagacgaagaaggtgcgccagattacggacggctccacctggtacagcaccggcggaggatttgactacgcatggtcgccggacggtaaatggtttacacttgagttcacgggtaacaagcacgacccctactccgacatcggcctggtcagcgcagagggaggcaaagacatcatcaacctcaccaatagcggctacatgagcggctatccccactttgcgctggacggcaacgccatccttttcaccaccgaacgctacggcatgcgtgcccatgcctcatggggctcgctgaacgacgccatgctcgtcttcctcaaccaagacgcctacgacaaatactgcctgagcaaagaagactacgagttgcgcaaggagctggagaaggagcagaagaagtctgccgggaaggacaccccccaaggcaaaaacaaggataaaaagaagaaatacgacaagaaagacagcaatgctgacgaaaaagatgaccagccgaaagacatcgtcgtagagctgaaaggcatcgaagaccgtgtggtgcgcctcaccccgaactcttccgacatgggcagcaccatcatctccaaggatggcgagacactctaccacctggcagccttcgaaggtggctacgacctctggaagatgaacctccgcaagaaggaaaccaaactgctgcacaagatggatgccggatgggcagacatgcagctggacaaggacggcaaaaacctcttcctgctgggcagccgcaagatgcagaaaatggacacttcatccgacgcgctgacccccatcaccttccaggtagatgccaagatggacctggctgcggagcgcgaatacatgttcgaccacgtgtaccgccaacagcagaagcgattctacaataccaatatgcacggagtggactgggacaagatgaccgccgcctatcgccgcttcctgccccatatcgacaacaattatgactttgccgaactgctgagcgaatggctgggcgagctgaacgtatctcacaccggcggccgtttctatcccaaagggcaatccgaacctactgccagcctgggactgttcttcgactggaactacacgggccggggcatgctcattgccgaagtagtggagaaaggccccttcgacacagccaacacccgggtgaaagccggcacagtcatcgaaaagatagacggcgtggaaatcacccccgatgcggactattacacgctgctcaacaacaaggcacggaagaaaacacttgtttctctcttcgacccgcagaccaaggaacactgggaagaggtcattatccccattacgaacggtgcgttcagcgatttactctacagccgctgggtgaaacagcgtgcggcagacgttgaccgatggtcgggtggccgattgggttacgtgcacatcgagtctatgggagacgacagtttccgttccgtctactcagacatcctgggcaagtacaacaaccgcgaaggcatcgtcatcgacacccgtttcaatggcggcggacgcttgcacgaggatatagaaatacttttcagtggacaaaaatacttcacccaagtggtgcgcggtcgcgagacgtgcgacatgcccagccgccgctggaacaaaccctccatcatggtgatgtgcgaggccaactactccaatgcgcacggcacgccgtgggtttacagccaccgcggactgggcaagctggtaggcatgcccgtgccgggaaccatgaccagcgtgtcgtgggagcgcctgcaagacccgtcattggtattcggcatccccgtcgtgggctaccgcctaccggacggcagctatctggagaactcacagctggaaccggacatcaaagtagccaattcacccgagaccatcgtgaagggagaagacacacagctgaaagctgccgtagaggagctgctgaaggaactcaaaaaataagtaccgccctgccccacgcaggaataccggtcatataggccgatatatatattaagatgatgtgtcaaaacggttgatggcacatcatctttttttatatgccacaaggaagcaagactttttctatctcacttttttgcactatctttgtgacataaattcctaactctttaactgattatgtttgctgacttgttaaactcctcctatttcgcgctctttctcattgtggctttaggcttcatgttgggaagaatcaagattaaagggctttcgctcgacgtctccgccgtcatcttcattgccctgctgttcggacacttcggtgtcatcatccccaaagaattaggaaacttcggactggtgctcttcatcttcaccatcggcatccaggccggtcccggatttttcgactccttccggagcaagggcaagacgcttatcatcattaccctgctcatcatctgctccgccgccctgacggcagtaggactgaaatatgccttcgacatcgatactcccagtgtcgtgggactgatagccggtgccctgaccagtacgccgggactcgccgttgccattgacagcacccattccccactggcatccatcgcttacggtattgcctatcctttcggcgttatcggcgtgattctcttcgttaagctgctgccccgtatcatgcgcatcgacctcgacaaggaggcgcgccggttggagaaggaacgccgcagccagttcccggaactgacaacctgtctgttccgcgtaaccaaccccgccgtcttcgaccggagcctgatgcaaatcaatgcgcgcgccatgaccggagccgtcatctcacgccacaagcacaacgagcagatagccatccccaccgcccagaccatcctgcacgagggagactacatacaagccgtgggtagcgaagaggccttaaaccagctcgccgtcctcgtgggcgaacgcgaagaaggcgaactgccactcgtagacatgcaggagattgaatccctgctgctcaccaagaaggatatgataaacaagcagctgggcgacctcaacctgatgaagaacttcggctgcaccgtcacccgcatccgccgaagcggcatcgacctctccccctcgcccgacctggccctaaaattcggcgacaaactgatggtggtgggcgagaaggacggcatcaagggagtggcacgcctgctgggcaacgacaccaagcaactgtccgacaccgacttcttccccatcgccctgggcatcgtgctgggcgtgctcttcggcaagctcaacatctccttctcggacagtctgtcgttctctccgggactgacgggaggcatcctgatggtcgccttgttcctgagcgccatcggaaagaccggccccattctgtggtccatgtccggccctgccaaccaactgctgcgccagctgggactgctgctcttccttgccgaagtagggacatcggcaggacggaatctgatggccacgttccaggaaagcggctggctcttgttcggcgtaggcgccgccatcacgctggtgcccatgctggtggcagtatgcgtaggcctgttcgtgttcaagataaacattctcgacctgctgggcaccatcaccggcggcatgaccagtacgcccggccttgccgccgccgactccatgacggacagcaacataccgagcgtggcctatgccacggtatatcccattgccatggtgttcctcattctgataatccaggtgatagcctccgcagtctattgacgcatgaagacgtacagccggacagaaaccatcgcccgcatgaacgcactggccggagccaatgtgcccttcctcttcatcgtagactacgcgcaagagcagtcgcacattgagcccctcgaccggatagaccccgccacctgccttttccaattcccgaaggcaggcaacacggagacggctgcaacagcccttgccagaagcacagccgcccgatgcgccggccctatccagtgggacatcactcccccttcccccgccgcatacagacattcgttcgacctcgtgaagcaaaacctgctggcaggcaacagctacctgacgaacctcacttgccgggtacccgtcaccaccaatctgacactggaagaaatattcctccactccgaagccttgtacaagctgtggctgaaagaccggttcgtctgcttctcccccgaaatctttgtccgcatagagaagggcaagataaagtccttccccatgaaaggcaccatcgacgctaccctgcccgatgcggaacagctcttgatgcaggacaccaaagaggcagccgagcacgccaccatcgtcgacctgatacgcaacgacctcagcatggtttcggaacacgtcgaagtgacctcctaccgatatatagaccgcctgcaaaccaataagggccccatcctccagaccagctccgagatatgcggcaccctgcccgaagactacaccgcacacctgggcgacatcatcttccgcctgcttcctgccggctccatcaccggcgcccccaagcccaaaaccgtagaaatcatcgcccaggccgaagactaccgccggggcttctacaccggcatcatggggcattatgccgacggacagctggacagcgctgtcatgatacgcttcatcgagcaggaaaacggccagctccacttcaaggcaggaggcggcatcaccgccaaaagccggtgggaaagcgaatacaacgaagtaatacagaaaatatatgtgcctatttattgagaccatacgcatcgaccacggaagggtctgcaacctttcccgccacaaccgaaggctgaacgatacccgcgcccacttctggccggaaagcacaccgctgcaactgtccgattatctgtcgtctcccggctgtggagcaggcatcaccggggcgggcatcgtcaaggcacgcgtagtgtatggtgagaaaggtattgaagatgtcagctactccccctacaccgtgcggcacgtgcattcgctggcactgatacaggcagaccacatcgactacacctacaaaagcgccggacgcgaaccgctgaaccgcctctttgccctgcgcggcgcatgcgacgacattctgattgtgaaacaaggcctgctgacagacacctccatcgccaacatcgccctttccgacggcacccactggtacacgccggcacatcccctgctgaaaggaaccaaacgggcagccttgctggaagaaggaatcttgcaggaaaaagacatcagaccggaagacttgccttcattctctaccgtcagactattcaatgccatgattgactggggagaactggagctccccgtacggaacatcatcccatagagccgctactcgtgcatatcgttgagatgtatctccaacgacttcaccgatatatatatttcgtacaccgatatggccagcgaaacaatcagcaatatcagcgccaaaccgaaaatataggccgaaagcagatggagacggatatagacaaagaacatgctgaccacgcacagcagcaggcttccgatgcccgccacctgcatggcacgcgtcaggtagagccgcttcctcaggttggcaatctgcgccgccttcaccgaagacgggttctccatgtactgttcctttaaggtgcgcaccagttgggcataggacaagaaacggttagtataggccagcataatcagcgatatggccgaaaacagcaaggcgggggtggttaaatctatttccataagaatgatgcttaattatatctatccgtcccgataacaggacttacttccgcaaagataaacgaaagattgaaaccacagaaacaagtttccttttttccatttcccaaagatttatcctacttttgcagtgacaataaaaaaactccttaccaccgtaacttaacaaatacgaccatgcgatataccgtttccgctcctgcctcactgcacgcagccatacagctcccggcatccaaaagtatcagtaaccgggcactcatcctccactcccttgcccacggcaatatcctgccccgcaatctgagcgattgtgacgacaccatagtgatgactcgcgccctcgacggaaatcccggacatatagatatccttgccgccggcaccgccatgcgtttcctcaccgcctacctcagcgtaactcctggcacccgaatcatcaccggtacgcaacgcatgcagcaacgccccatccgcatactggtagacgccctgcgagagctcggcgcccgcatagaatacgtcggaaacgaagggttccctcccttgcgcatcaccggaacagaactgaccggcagcgaaatatccctcgccggcaatgtcagctcacaatacatatccgccctgctgatgattggtaccgtccttcccaaaggcctgcgcctgcacttgacgggtgacatcatctcccgcccctacatcaacctgaccctgcaactgatgcgcgacttcggcgcccaagccgactgggtctccgaagattgcatcaccgtcagccccggcggatacacggatacccctttcaccgtagaaagcgattggagcgccgcctcttactggtatcagatgatggcaatagaaggaattaaaaatgaaaaaataaaagggggagacagaagtagcgcaaaagaaagtgaagacagcacgaaggaagaagcgcacacggcagaaatcgaactgctcggtctcttcgcccacagctatcaaggcgacagccgcggcgcggaagtctttacccgcctcggcgtccataccgaatatacagaccggggagtaaaactgatccgtaagggtactcccgccacccgtctcgacgaagacatggtggacatcccggacctggcgcagacctttgtcgtcacctgctgcctgatggacatccctttccgcttcaccggactgcaaagccttaaaataaaggagaccgaccgtatcaccgccctcattacggaactgcgtaaactgggttacgtcgtgcgctccgagcaagacagcatcttgttgtgggatggcgaacgctgcccggcagacgctgaccccgtcatcgccacctacgaagaccaccgtatggccatggcatttgcccccgcctgccttgtactgccccaaatacggataaatgaaccacaggtcgttaccaaatcttaccctgcttactgggaagacttgcaaaaggcgggatttaaagtctgccaagatgcaatgcaatcttagaataaagcttttattcttagaaatacagcctttattcttaagaatataacctttattcttaggaataaaggatacattctaagattaggatgcatccaaagtagttttatactgcgttccaggcaagtaatgcctgcgtcgggtggaagtaatctgcctacctgcaatctgactcattattttgtcgtgtacaaaacaatgtgtatctttgtccgttctattaatggaacatgtttttcaagaaaaggaagcccatgtggatattgattattagcctgattgtccttgccctcgtggcagccacagccggaattatacgcaaccggaaactgcagaagaagatagaccgcggcgaactggacgccatgcccgaagtgcaggaagtggattccgaatgctgcggacagcatgaaatctgcgaacgtgacagcttactggcagccgtcagcaaacaaattgaatattacgatgacgaggaactggacaaatacatcggcaccgctcccgatgcctatactcccgagcaggaagacgagttccgcgacgtgttctacaccatgcaagacacggacgtagccggatgggtacgcagcctgcaactgcgcggcatagccctgccggagaatatcaaggatgaagtattcctcattatcggcgaacgtcgtctcaccccccattcctaacactccacatccaacttttaatttgtaattcttaatttttaattgaataaatggagctactgcaatacacctttttccaacatgccctcatcggcagtctgctggcaagcattgcttgcgggctgataggcacatacatcgtcacccggagactggtgttcatcagcggcggattgacgcatgcctccttcggcggtatcggtctgggattgtataccggcatttctcccattctgtcggcagccttgtttgcagttttgtccgctttcggtgtagagtggctcagcaaacgaaaggatatgcgggaagactctgccattgccgtattctggacattgggcatggcattgggcattatgttcactttcctttcgccgggattcgcacccgacttgtccgcctatctcttcggtaacattctcacgattacctggagcgacatcgctctattgggcgggcttgccctgctgctgatactgttttttgcactgtatctccatcctatcatctacgtggctttcgaccgggagtttgcccgctcgcaaggcattccggtgcaggtattcgaatatgcactgatgatgttcattgcgcttaccatcgtggcatgcctgcgcatggtgggcatcgtactggtcatctccctactcactgttccccagatgaccgccaacttgttctcgcaccggttccaccgcatcatctggctttccatcggcatcggttacctcagttgcctgggcgggctgatgatttctttctacttgaatgtcccctcgggtgcatccatcatattcttttccatcattatctatgccatttgcaagacgggaaaaagtttttggctatatttgcaacgctaaagaaatctataaacacaatggaaatcaaaattcagtcattagaccagattcacgaagccgcccaccagttcatcgctgaaatgggtgacaataccgtcttcgccctctatggaaaaatgggggcgggcaagacgactttcatcaaagccgtttgcgaggaattgggcgtttccgacgtcatcacctcccctaccttcgccattgtcaacgaataccgttccgacactgccggcgaactgatttaccattttgacttctaccgcatcaagaaactggaagaagtgtatgacatggggtacgaagattacttctacagcggcgccctctgcttcatagaatggccggagctggtagaggagctcttgccgggtaacaccattaaggtcaccatcgaagaagtggagaacggagagcggaaagtcacgttagagagctttgaataaggcatgcttttcccccgctttaatttttaattcttaattgttatttctgatgagccaatacatcgttcaaggaatttttgccgtcgcgggcatcaccgccttgctggcagccatattggactggaactggttctttactgcccgaaacacccagtttatcgtacaaaatgtagggcggcgacaagcccgcctgttctacggtgtattgggtgtcatcctcatcggcacgtccatcttcttttttctgaatacgccaccggttacataaaaacaaaaaatcgcggatgaagccatgctcatccgcgattttcctatacttttgatacagactattcttcgtccaaagattccgtatattccatctcaccttgtacgatgaaaaggatttcttccggatcatagtcacccatctcatccttatgggcttccttgacaatatagtccacgattttccccaaatcaatttcgatgtacccatccgcatccggctgtgcatcaaggatgccgctctcggaatagtactcgtcaatcaaatcgagaaaataatagaactcgtcgtcagagaacttctctttcaactcctgcggcaaataattcttgatgtactcgatggtcttttcatcatcgacatcattctgcaaaaaatcgtcttccattcccatacttactattgcttaaagggttaatgttattgactatttgacgatttactatttactatttagctgcgccatgatgccgaaagggtaaatcgtaaatcgtcaaatagtaccttataatatcgcttctatcttggccacgtaagcagatttcggagcagaacctacctgcttgtccaccagctctccattcttgaagaacaagactgtagggatgttgcgtataccatattcggcagccacatcaccgttctcatccacgtcacatttgccaataatcacctttccttcatattcagtagccaattcatcgatgattggtcccaccatcttacaagggccgcaccaaggtgcccagaaatccataacgaccggctttccctctgccaggatttcttgaaaattgctgtctgtaatttctaaagccatttcttttaatattaaatgtcaactataattattaatttactgtcaattgcgttttatcaaccttcgctttcgaagcaaagatagtgcaaaccgaatgcaaaacaaaatgaacttgttcattttttatgccgaggtgcagcctatcttcgttttccaacaaagataactaattaatcctgaactcaaggtccggacgctcttttaaataagtaatcagttcacgccccacggaaagcttcacgggacgggaaatcaaatcgaccgtcatcttgctatcctcatctctgactttgaaataaagctccgtactgcccggacgttccttggtcagttctgccagttcagttatcaaagccttgttcagcacactcagcggaatgagaatggttatcttctcaatcagtttctccttgacgtcaggcaacagttccatggaggttatcttcagctccaactcatcctgccgccattgcttgggctggcaacgggctttgatgaacaagaaggtacgttcacccagatacccctgataggtcacccaatcatttccgaagaaaggaagctctgccgaaccggaatagtcttcaatcttggctatgccgtaaggatttccatttttgctaataccgcgacgcacggcggtcacgatgccacccattgttatttcgcgtcccacaagtgccgtcttatcttccagctctgtcatgtgagtgttgcaaacatgctccagaactacggaatactcatccaacgggtgtgcggacagatagatacctaccaaatcgcgctcccggttcaaacggtcgaggtcgctccaacgttccgctaccggtatttccggagtggcgatatccaccacattctcaccgccgaacaaggagtttgcagccgcagcctggtcggcctggtaacggttaccataccgcaccaaggtttcgaggaagacctcgttcttggagtttacggcaaaatactgctctcgcttcagctccgggaagctgtcgaacccgcccgccaaagcaagacattccagattcttcttgttgcaggctgtcagattgacacgctgcacaaaatcaaatatacccttgaaaggaccattcttctcgcgttcctccatgatgctctgcacagcaccctcgcctacccctttcaccgcgccaagaccaaaacggatattgccttccttgttcacggtgaacttcaggttactttcattcacatccggccccaatgtattgatgcccattgccttgcattcatccatcagtttggttatatcggtaatattcgccaaacttcggctcatgaccgccgccatgtattcggccggatagttggccttgaggaaagccgtctgataggccacccacgaatagcaagtggcatgtgacttgttgaaggcataggacgcaaacttttcccagtcggcccagattttctcaagcactttcgggtcgtggccgttcttttgtccacccgaaatgaatttcggcttcatgtggtccagcttgtcacgcagtttcttacccatcgccttacgcaaggcatcggactcaccacgggtgaagtccgccagcaaacgcgacagaagcatgacctgctcctggtagaccgtaatgccgtaggtatccttcagatacttctccatgatggggatgtcatactcgatgggcttgcgtccccacttacggtcgatgaagtcggggatataatccataggacccggacggtagagggcattcatggcaatcaaatcctcgaaagtgctcggttgcaactcacgcagatatttctgcataccggccgattcaaactggaacgtaccgatggtgcggccgtcgcaatagagtttataggtagcagggtcggaaatggatatcttgtcgatgtcgagttccaagccgcggtgcagacgtacattggcaacggcttccttaatgatggacaaggttttcagtccgaggaagtccatcttgataagtcccgtatcttcgatgacggaaccttcgtattgggtaacgagcatcttctcgcccgtctccttatcatccgccgtgctgacgggtacccaatccgtgatgtcgtcacggcaaataatagtaccgcaggcatgcacacccgtaccgcgtacattaccttccagcatcttggcatatttcatcgtatcgcgcaccaggggatcgggcgaagcctccgcagcctgcaattcgggcacgtaggcaatggcattgggcaggttgagtttcttgtcgggaatcttatccggcacgagcttgcacagacggtccgattcgctcaaaggcagtttctgcacgcgcgccacgtccttgatggccatcttggtcgccatcgtgccatatgtaatgatgtgcgccaccttctcttgcccgtacttctccgtcacccagcggagcacttctccacgcccgtcatcatcgaagtccacatcgatatcaggcaaagagatacggtcgggattcaagaaacgctcgaacagaaggtcgtattgaatcgggtctattttcgtgatgcccaagcaataggccaccgccgagccggcagccgaaccacgtcccggtcctaccgaaacgcccagctgtgtgcgggcggcattgataaagtcctgcacaatcaagaagtatcccgggaaacccatcgtcttcatgatgtacagctcaaagaccagacgttccttcacctcgtcggacaagggatcaccgtacagttttttagcaccgtcgaatgccaattttgccagatagtcggcttccagcttgatacggtacagcttgtcgtagccccccagacgctttatcttggcattggcggcatcctcatccagcaccaccttgccgttttcatcctgggtaaactcatcaaataagtccttttcggtatatttctgccgatagccctcttccgttccgaaatcttccggaatagcaaacgtaggcataataggagcgtggtcgatggaataatattccaccttgtccaaaatctccaaggtattggacaaggcttcgggaacatcctcaaacaaggcgttcatctcagcctttgtcttcatccattcctgcttggtataaagcattcgggtagggtcatccagatctttacccgtgctcagacaaatcaggcggtcgtgcgcttctgcattctcttcatccacaaagtggacgtcattggagcagataaccttaatgtcatatttccgggcaagctccagcaacttggcattcgccttctgctgaagcggataggcttcgtggttggcacggggaacagtggctttatggcgctgaagctccagatagtaatcatcgccaaacagattcttataccagcgtacagcttcttctgcctcttccagctggtcattgataatcttcttaggaacctcgccaccgatacaagccgagcagacaatcagcccctcatggtacttttccagttcactgcggtctgtacgcggacgcatatagtatccccttgtccaggcatgcgatacaagttttatcagattgtgataccccttctcattctttgccagcacaatcaggtgatagccactctggtccggcttcccctccttcttatccatggttcggcgggccacatacatttcacagcctacaatcggcttgaacagcttgctttccgcttctgccatcttggcacgacaatcggcaatctccgcttccttgtcttcacactctatctcaccgctttcaataccggcaatccttttcttgaggtcctttatctccccctttggcccgctgttcttcttgttgacatagttggtgaactccttgataccgaacatatttccatggtcggtcacggcaatgcctttcataccatccttcatggccttgtcaaccagcctgctgacacttgcctgaccatccagaagagagtattgggtatggacatgtaaatgaacaaaatcttgcatatatatcctttctattgagagcctaaaattacaacctctatcacagctaacaaaaatatttcccaaaaagttatcaacatgcacatttctctctccaaatccttgttagattttcaaaataagcctatttttgcagataatttctatctaaattagcaaatacgatatacatgggtcgattaaaaagattaaaaaagatacgcatacaccgtgaaggaacacatacattggcaggcagcctggttctgattctggctgtcaacactgccctttacttcggattggaatgcaaagttcctttttacgtagtagcggtcatcagcctcatagtatatggcatactcgtgaacttcttccgctgccccatccgtttgttcggacaagaaacggagaaagtcgtggtagctcctgccgacggtaaaatcgtagtggtggaagaagtggaggaaaacgaatacttccacgaccgccgtatcatggtatctatattcatgagtctggttaatgtacacgccaactggtatccggtagatggtacggtaaagaaggtatggcacaaaaacgggaagttcatgaaagcctggctgcccaaagccagcaccgacaacgagcgttccaccgtagtaatagaaactccggaaggcgtggagattatggcacgacagatagccggagccatggcgcgccgcatcgtgacctatgccgaaccgggcgaggaatgctatattgacgaacatatgggtttcatcaaattcggctcccgcgtggatgtctttctaccgttgggcaccgaagtattcgttaaactaggacaactgactaccggcaatcagactgtgatagccaaacttaaataataaaagaacaacaatggcaaactgcattacccgccatattccaaatactctgacctgcctgaacctattctccgggtgtattgcttgtgtcatggcattcgaagccagatatgaatgggcactcgctttcattatcttcagtgccgtattcgatttcttcgatggcatgatggcacgtgcactggacgcacactccattatcggcaaggatttggattctctggcagatgatgtcagtttcggagtggccccttccctgattgtattttccttgttcaaggaaatggactattcgggcgcaatggaaagcttggccggcgttttcccctatctcgcatttcttttgtccgtattctctgcactgcggcttgccaagttcaacaacgatacccgccagacgagctctttcgtaggacttcccgtcccggcaaacgccttgttctgggcttcattggtgacgggcgctcacgactggctggtgagcagcaatttccatccggtttatctgttgctgctggtctgccttttctcatggctgcttgtatcggagattccaatgttctcactcaaattcaagaatctgtcatggaaagacaataaaacaagcttcattttcctgcttgtctgcattccgttcctcatcttcttgggaatctgcagcttttctgcaatcatcgtctggtatatactgctttcgcttattacaaggaaaagtaaataaacaaatctttggcacggttgttgtattgaagttcgcagaaaacgaacacataaaaagacattagcccatgtttcatattttaggatttttattcatcatcataattgccattctgctcattggcctcagcattatcggtactgtcatccggaacatattcggattgggcggacgccgtacttcctccaactccggtccctaccaaaaaggaaatggtaattaccagccgggagggtattcctacaatgataatagacaatcgtctgaggaggcacaaactgaagaaggtgaaatacgcccccgccacaagaaactgttctccaaagacgagggagagtatgtggattttgaagaaatcaaagagtagagattagggataaaggattagagattatttgcgcttggcggcaaagaactctttcatcagggcggcacattcatctgccagaattccttttactacttgtgttttgggatgcaatgcctgcgaggcatagcgctgataccctcttttctcatcttcagcaccaaacaccagacgtcccatctgcgcccaggcaatggcaccagcacacatcacgcagggttccactgtgacatagagagtacattcattcagatatttgccgccaagagttgcagcggcagcggtaatggcttgcatctcggcatgggcggtgacatccgtcaaagtctccgtcaaattatgggcacgagctatgatacggtccttgcacaccacaactgcacctacgggaacttctccccgttcaccggccttatgggcttccaaaagcgcctgcttcatataatagctatcgtccaacgccaccccctttaatttttaattttcacctcctcatgtcgtgctcaccgaacaaagtaggataatcctcttccatattcttatgaataaacatgagaatagtctcccgcagccaacgcgacttgttcgttatcttgtatttctccagataacggtccacaatccgctgctcttcctcgctcatcaggcataccatgcgctgctcgcgtttcggttcttcgggcgttgctttcgcacacgttttatctctctttctcatatttcctgcaaaattacttttacttctgtaaaaacaaaacgaacctacgtaatttttatatcggaaacacttaaatagcactgaaatatttttttgaccggtaaacttaaagtatttcttaaaaacattttaatttagtaattaaaaacgtatttttggagagttctaaatttaaaaggtatgaaacatgtaaattatcttagtttctttctactcacattgttcagtataagttttatctcatgtagtgacgatgacgataataaacttaataccggcataaccaatcagagttggacagagggaaaatccctggagatcagccaggataatgagttgtctgtaagcttcaatgctgcagccaaatgggtagcttccgtcacctcaggagcggattggtgcaaactgaatacgacctcgggtacaaaaggacaaagcaccttgaaattatctgtaagtacaagttccaccaccgaccggacagccagaatttccattaatatagacggctattctcctgcaagttttgaagttacacaaaaggggaccagtgttccccaaaccactgaagatatggagattaacgcaaaagttgatgaatatctgagggaaatgtatctctggaacgatgaatacaaaacgttgaatcttgaccataacaaaggctatgaagacttcttctatgatgcattgggaagtatgactaccaatacattggataaaaaaacatatgtcggtagcgacggcaagacatattataatcttttctcttatatccagctattgcccaatattagttcaacccgtaccaccaaaattgtaaacaaggaactggcatatagtttcggtatcaccggtataacccccataagcattggcacacaagcagaaaataccatttatttctgcctccaaggtgtatatcccgattcaccggcctccgaagctggactcaaacgaggagcaatgataagcctgataaatggaaagaagataaataataacaatattaataacttctattacgacatattgtcaccagatgcaactatcaactatactttgacagaagatgtcgtagaaggaggcaccattaccgggcaaaaggaatacaccataacttccaaagccacatacaacaatcccgtcatcttcagtaatgtcaaggaagatatagaaggacatagaatcggttacctcgtttattctgggttcgaggcaggctttgaccaagaattattcaatgttttcaaagattttaaaaacaagaacgtcacagatttgattctggacttgcggtacaatggtggtgggcataccatgtcggctaatctgatagcaacttgtattgccggtactgcctctcaaggtaaagtattcagcagtttacgatacaatgatgaaagaatggcaaaactcaataacaaacgggaagatgaattatttgcatactccagttatcccaacttgggtacttccttatcagccggaagcctcaaccttccccgcgtctactgccttgtcggaaatggaacggcctctgccagtgaactcgtcattaattccttagaaggaatagatttggacgtaatacttataggtgaaaagaccactggtaagaacgtaggtatggaatatgaggagtacactgtccggaataacacatatcgtgttgttcctatcaccttccaaagctataacgccaaaggattcggggagtatgaaaaaggatttgaacccgatatattgatggatgaaaccaatccttataacgaacaaggtgtattctatattcataaagattatggaaacaatgaagaacctctgtatgccaaggccattgaactgattaccggtacaaatccagccccccaaacgcgcagtgcagtggtcaatacattggatggtaaaacttataagttgcccgctatcttccgtcctggacacgacggtatgctgatgcctgccagacacgcagaataatgagtgcacacaatattcttggaaaagccggtgaagacgccgctgccaaatacttggaacagaacggttacaccatacgtgaccgtaactggcggaagaatcaccttgagctggatattgtagccgacaaagataaggaactgattattgtggaagtgaaaacccgtagcaatacggattacattgagccgcaggatgccgtgaactggcagaaaatacgacgtattgtcgtagcggccgatgcctatatcaagcacttctgcttggatgcacccgtccgcttcgacatcataacggctgtaggcgaaccgggtgcattcaggatagagcatctcaaagaagccttctatccgccgatgttctgagagttgaaaattgacaagcaagagttatttcaatcgtaaattgtaaaccgtaaaaccgtaaataccatcatggacatcgaaaccgcccgcgaatattgcctcagcaaaaaagccgtcacggaatgctttccgtttgacgaatactcgctcgtgatgaaagtcatgaataaaatgtttgcacttatcgacctggaaagcgccaacaagatttgtctgaaatgcgaccccgaatatgcactcgaactgcgggagcactatgttgccatcgaaggtgcctatcacttcaacaaaaagtactggaaccaggtgttccttgacggtgacgtcgacgacaaactgttgaagcaactgatagaccactccgtggaagaagtattgaagaagttcaccaaaaaaatgcgtaccgaatatgaagccctgccctgacacattcccgttcccgctggtggcattggacgagacggcatcgaccaaccaatacctcagccagctttgcaaccagttgcaagaatccgttgccgaactaacaaccgtgactgccgagttccaaactgccggtaaaggccagcgcggcaatacctgggaagctgaagaaggcaagaacctgcttttcagctttgtactctacccttcttttctggaagcccgccggcagttcatcctttcacaaatcgtttccctcgccattaaggaagagctgagcagatggtctgatgaaatcaccatcaaatggccgaacgacatttattggaaagacaagaaaatctgcggcatactgatagagaacgacctttccggacatcatatcaggcgcagcattgccggaatcggtatcaacatcaaccaggaagtcttcaacagtgatgctcccaaccccgtctcactgaaacaaatcaccggaaaggagcacgaccgttatgaaatccttgcccatatcctaagacgtgtacaaatctactacaacagcctccaaatggaggacttcgccgtctactccgacgagatatccacacggtatgcccgctcccttttccgtcgccggggattgcacccttatgaagatgccaacggcaagttccttgcccggttgctgcgtgtagagcaagacggacggttcgtgctggaggatgaaggaggaagtgaacgggaatatctgttcaaggaagtgcaatacattctgtaagaaatgcacaacccgtgccatcgcattggcaaagttgtgccaccatactggcacagccttgccatcgtactggcacgactgtgccaatacgatggcacaaacataagtccatagtagtgtactactgccctacttcaaactttacttcagttcctttcagaaggggggaagcaaactttactttaaccggtccctctcctccggtagtctgtatataggccagcaaacgcccgtggtatacgcggtgacggttatcggtataatcactcatgtcactgttgtcagagccttcgagcccaagcagacgcgccgctccttcaactgtacacgtaatttcattgtcgccaagtttcacaacagtaccttcttcgtcaaccacctctacggttatgtgcgcagtggcgcggtcgccggacaaaatagtgcgatccgccgtggcacggatggcataaggacgtccggatgtccggatggaatagctcgacaaggcatttccttccttatcgcagccctcagcacgaagctcaccagcccggaaaggaatatcccagtagatgatgccggtcttttcatcataaggtttcatctcgcctaccaccctgccgttgagcagcaaacgcgcctgcggagcattggtataacacaccacacgtatgttctgcccctcgtcatagttccagatgtcccatgcatcaggcgaaaggaatacatgctcgggatgcttgggatggacatataccggatatgttcctgcatacgtgaccggattctcgcaccacaacgaagcccggaaatgtccgcgtggcttggggaaacttccgaaatcgagcaaacccgtgtacaaaccgcgggacggccatctgcccgattcacccagataatccgtaccggtccagatgaactgcccgaagatgaaatccttgtcgcggacggcataccaggcatcaagccccgaacccgtctcgcttccatagataatgcggtccggataagtggcatggtcttggtcgtagcggttttccgtatagttataccccaccacatccacagcatcgggatactccgtctcgttcgacatcacgacacccgccaaagctccggtcacgggacgggaagtgtccacggcacgtacacaggcagccagacgctttgctatggttccgatgcgcatggcatcgggagcatccggcttatagcccccgaacataggctggttgattttagctccatcaagaacgggatgcgaataagggtcgttcggataatccacttcattgccgatactccacaagaaaatacaggtatgattgcggtcacgacgtaccatatcggttacgtcccgttctatccactcctcgaagaagtcgaaagtaccgtcataactcggagtacccacattccagccttgtacccatttgcgtttcggaaactcccattcgtcagagacttcatccattacaagaaatcccaggcggtcacacagttcataaagaacgggggcttgtgggttatggctcatgcggatggcatttacgccaatccctttcaagttattcaggcggcgttcccatacctccggcggcactactgcacccagcactcctgcatcatgatgtaggcatacaccttttaccttcatccagttgccgttgagggcaaaacctttgttggcatcaaattccagcgtacgcagtcccactttggtctcactgccgtcaatgcgtttgccattggcaagcaattcggttttcaatgtatacagatacggattatccagattccaacgatggggtttggacactttcaagtcaagactttgcttggcaatgccctcttttccatcggcaacacgcacacggcgttgtgccacctgctttccggcagtatcgtacagtgaagccttcagttccagtttgtcggaagttgccttgtgcttctccacctctacatcgaccgcaacgacggcttgcttgtctgtcagcgaagcggcatgccagcccacaccccattgcgcaatatgtgtatcgggagcagccaccagccatacatcgcgatagatgcccgaccccgtataccaacgtgaatcggcataacggctatggtctacacggacagccagcacattgtcgccttccttcaggtaaggggtcatgtcgtaaagaaacgatacatagccgttggggcgcctgccaagcagatgcccgttcaggtaaacctcgctccggttatataccccttcgaaatagatataatgacgtgttgcgttgtcttcaaccctgaagtgtttgcgataccagcctatcccacccggcaggtacccggtgcaactggccagtgtgggcgacaattgcccctctatggaccaatcgtgtggcaaagaaagcttccgccattcgctgtcgtcatagtcagtccggacaatagccgagtcgtccgtcagccggaacagccatccgtcattgaattttgcggcatcgccaaataccacctgcgcctttatcggagcaacgaccagcattgccagcaaaaagataagagcagtcctgttattcttaaaatacattttcatatagattttctttgaagttaaactaattccttacttcaggctatacaccacggttgtcacactcttggcttccagaatcacctgcttgcctgccgccaccgttccttccaccagattcttgctaccggtagttgtataagtagctattgacttcgcttcattactccatcccacatgcgtttcacctaagcgaaccgccttatcagacatgtttgtatagacggccactaccttatccccctcgggagaaagccaggcggaaccgaaaaaagtacgcgattcgttcaagtcgagggcaatacggcggtatcccggacggataaagcggctgtaattgcccagtacccaaagagtggcagtagcctgatagcttccctcctgctctatatcaccatactcgccaccggcaggtaccagcgaaatcaagagaaaacggttcttatgcccccaacgggaaacatccatcgatgtccagtaactccaggaagacaccccagccacagtgaggtcattgtggatgaccttcgacatgtagaaagcgatatccatctcagaagcctgctcgtagcccacgaattcggaactgctgtaattatcgcccagcatactccattcactctgccaaacatccagattatactgaccggcagcctgggccacttgcttgcgcacgttgcgcataccgtcccatgtgccgtcagtccaatagctgtgtccgcaaatgagattcttcacgtgtgccaagtcacccacgtaggcggaagagccgggtgtaaagaaagccgagagtacattactgcggttggcatcacctttcactttataaagatactcccagtcaccggattcgcccaagagaatgtctgtggaaagcccccgggcatccaacgacatatccagctcgcgtgccagtgcagccacttcgtcattggtccagccactgccctcctggccgctgtcccagttgtactgcggctcgttgacgggcgagatatggcttatgtgatagccttcaccggtataacgggccgctacatcggccatatatcctgcaaagtcaccataatgctccggtttcagattggaaagtccccctctggcggaaaatccttttccattataggtgtactgcacgggaggtgtattgctgaaaagaacgaaattgttacatcccagctccttggcacggtccatgaagtaacgttgtccctcgcaacgggtccagtcgtacgtcaagtcatcggtaagataggattccgcacgacgggatttatcctcgatgccgcaggcttcaccttgcgcggcactgccgccaccaagattcacccgccattgggaaaggccgattcctttcggcttgccgcccacaatctctgaagaaaaaagcagttccgtaatccccgcacggtgcgaagtccatgacttgcccacaaaggcaggcgaccaacagtccgaagcgccaaagccggctattgtctggaaagtctgtccggcatcgatgctcaccagtttctctacgctgtttgtaatgtccggaccctcaggagtgtctggagtatccggcgtaacgggagagtcgtcgctgcaagccattgcagcaagcagtgccggaagaataaaaatgtgtctcaaattcatgatattgtttcggattaaaaaaactgccgcggataatccattgcaaactatccgcgacagaatataaagacctattgaataattagttcctgcaacaatctgttttcatcagaatgtgtttaattccaacccgggttctgggtaatggaaccgttggacatcgtgatttcgtacaaaggaatggggaacaccatgtcgcggttttcattgaaagtgatgcctttgtcacttgcttcaccttgattttcccactcaagagcgtcacgggtagcctcttcagtgttccacttcacaaaggaaccgttcggtcccaggatattgctaatcatctttttaccatttgtatcagtccagcggcggatatcatacagacggttctgctcgaaagctaattccaaacggcgctccaggcgaatggcactttgcaatgcctttccacttgccgtaacgtcatccaacttggcacgtctgcgcacctgattgagagcatcgcgggcagaagcgtcatcacccagttcattgcaagcctcagcatacattaaaaggacatcggcataacgcagaatacggtgattcaaaggactcttgtccgtggcgtaagccgttgcatcgccttgagcacgatatttcatcggcaggaaatacttgcggatgatacgcgcagacttatggtcagcgggattgataatatagcaattggggtcccaaccatatttatcaagatattcctgatacttattcaacgctttgcttgcgtcaatgaaatcctcgaattggtcttcgccggcaatttctgtacagcccgacttgattattgtccatttcaaacgttccgtatcaccggcctcaatataagcttgctccaaatttgccgtaggctgacaccagctccaaccatcaccaggaccattacgggcaccggttaccgtagcaagcgcccctcctaagcccaaagtgggatgatattcatactggatttccagaaggctctccgcactgttgtcatagtcgacattccatacctgcccgaaatcgggaagcaattggtattcgccttcatctatcacagtcttcaacacatcatgggcagcctgccattcctcctgatagaggtacactttacccaataatcctaaagcggcgccacgggtagcatgccctacttgcgcagtactgcgttgcggcagtatttcggcagctgccatcaggtcatcctctatgaatttgtacacggcttctgccgtagcacgttctgttccctccacttcttccggcatttggaaactggtcatcaagggcaccccgccaaaatttctcaccagttcgaagtaatagtagccacgcaggaaacgggcttctgccaccagacggtctctggtttctgtctcttgggtttcgagagccgcaatgcgatctatggctatgttacaacgtaaaatacctttgtaacggtactgccaaaaattggagatagggccattgctggcaccgtttccctgataatgcgccaatgagatataatcactctgagactgagaggtattccccatccaggcatcatctccacacatttcggaaagtaaccacacggtgttgatttgccaccatcctccatatgtcatggcctgataacagctcgtgactgcggattcacactcttctatggacttataataagtgtccacgttcaattgcccacgtacgtcttccgtcaggaagtcctcgcaagaggtaaacaccagcgaagcaatcagaactactattgtaaatattcgtttcatggataatcaagaattaaaatttgaagtcaatgccaaacaagaatgttctcggattaggataagccacgttgtcaataccggtattgatggcactgccagagctgtcggtagtaccgtcaaccatcgggcgttcggggtccattcccgaataaccggtaatggtaaacggattctgtgcagagaaggaaagacgcaagtcagcacctccaacccatttcttaggaagcgtatagcctatctgcaacagcttgcaacgcaagtaggaaccatcttccacatagaaactggaaacacggttatagttcaggttcaagtcattgctcgacaaacggggaatatcattgccggtaccctctccatgccatgctttctccagtgtacctgcccagacattctgtccgcctgaaccggagtaccgtcctttggtgacattgtaaatatcattaccgaacgtaccatagaaattggctgcaaaatcaatgttcttataacgcataccaatattcagacccatcattaaatcaggataaggattaccgatataatctttgtcattggcatcgagcactccgttatggtcccggtccttgaagcggatgtctcccggttttgcattgggctgaatcagtgttccgtgttcgtcagtgtgcgcatacacctcttcccaattctggaacaagccatcggccacgtaaccgtagaaacgggagataaaaccaccatcttcgttacggataatctggtcgctattgaatccaccgacattgataggaccgtcgcccgagaacttgatggccttgttgcgcacggcagaaaggttcagaccaagatcgtaagagaaatccttgccgatttcatcgcgccaggtaagtcccacttcccaaccgcgggcctgcatactaccgatgttcatccaaatctggctgttccagttatcatatcccaaagagaggatgttctgtttctggtagagcatgtcaatggactttttctggaaatattcgaatgttacacccaaacgtgaatcaaggaatgacatatccacgcctacgttccaatcttccacagtctcccacttcaactggttgttacctactgtagacacgaagtaaccatttgccaacgtattgccataatagtattgggtttcgctcaacaaagtaagggtagcattattgttgatattctgattacctacacggccccagcctccacgaaacttcaggtcactgaagatgtcctggtcctgcataaatgcctcactgatgacacgccaggaagcggaaacagacgggaagagggcatacttgctgcccttcgggaaacgggaggaaccgtcggcacggagagatgccgaaatgtagtaacggttatcgtagttgtacatgacacggcccaggaaagaaaccagtgtattgtaagtggtttcaccgttggcctcgtccgtaccctgctgtccggcattcacttcctgcatctggtccagattattgggaacattatcacgccgtgcctgagtattgtaccatgcaaaacgttcggcagtaaagccagccattacattcaagttgtgcttttcagcgaaagtgtccatgtaagtggctgtattcgtccagttccagtcaaaccactcctgattgcggcgggtgatttcgttcaagtcttgtttctccaacggatccatattgaacttcggaacgaatgaatcagaacggcgatagtgtgcattggcaccgaactgggtgcgcaacgtcagcttttctatcgggtttacctgcagataggtattcagaatggcacccaactcgcgagaatgagcattgctacgggcaattgaaccggcgggattccactcctggttgttgtaagagcgttgatagttgttgtactcattatcctcccattggtcctgcggacggaataccggagttgtcgggtccatagccatggctgccgagaactggtttggggtatcatcccatgattcgacacgtggagcaatatcaactcccaattttacatacttattaaatgtatattcagtattcagacggatatttatcttatcccaataacctacatcaaactgtgagttgttacgataatagcccacgctaaagttataaacaaactgttctgagccaccggcaacactaagtgaatggttctgcaccaaagctgttttattgactacagtatcccaccagtctgtaccaccgggattggtcgtagcacccgtatcgttccagatagaagaaaggccatcattcgtataacgagtattgaacacttctttatattcagccgcaccggcaatattaggtttggccacggtctggaaaccaacagaagaattccaattgatgcgggctttaccagtcttacctttctttgtagtaatcaggatgacaccgtttgatgcacgtgtaccatagatagcggcagccgaagcatctttcaatacttccatggaagcaatatcgttactattcagaaagttgatattgtcacctaccggcataccatccactacatacaacggattcgtaccgtttacggtagttacaccacgaatcagcaccttcggagtagctccagggccaccaccactggtgacttgtacaccatttaccttaccctgcaaagcatccatagcattaccggtcacggtttcagtgatttcatcgccttttactgtagcaatagaactggtcaaatcgctctttttcacagcaccataaccgataaccaccacttcatccagtaattccgcagcctccttcagtaccacgttaatcgtagtacgtccacctacagctatttcctgagactcaaaaccaatagaagagaataccaacactgcattcttgtctacattgggtaatgtataatcaccgtcgataccggtaattgtacccgtaccggtacctttcacttgaactgtagttccaatcaacggctgctggtcggtggccgaagtcaccacacccttaaccgttatctgctgcgcataaccgcaaaggcttatcagcgcaagacataataatagaatttgctttttcatatcttaaatctaatgttactttttaattagcaggcacaatcttgccgcgacccaaatgcgcgtcaaactcaaagcggtagttgccggtcaccgtaaccgtaggcttcatccagttgtcacctaccatcgagccgtcttcccaacgctgattggtgccttcccaattaggattcacatcccctttcttactgaagtaaccaaacttctctacattctgagagtcgtcacaccgccattccacatgatcccaccatccgtcgggatgataattggatatgatgaagttcatttcttcaccggcttccagcgtccaagttccattttccggataatagaaaagatgaggattatttttatcctgggcaaacaactgatttcccgcatcctgaggagaacctccccaaccgatatagaaatcaatgaacgattccccattctcccaacggtcaaaacaaggctttccatattcatatttcatcggatttgtagcctctgtcaccgagtacgtgcgcatactataagtagactctttcacattgatgtctatttcataataaacaccagcctcatccaagacaataggtttagtcgtttccgggtcatccgtcagttttgtattatcctccggatcaaggccaaaacagataggagtaaagtctgtcttttgcggtaagaagaaaatttccgtaccggcagctttattataataacgtgcacgatattggtactcgcccgtatggttaatcaccatcggtacaccgaaaatatcactgttcaattcctctacggttgccacatcggccagatacattttggggaagtcaggcatttcagatacactgatggtactattggtcactgtctgattgcctctggcatccacagccgtcaaagtcacatcgtaacttttcacctcattaggcagaataatcttctccgtaaagctcaaagtagattgcccgccagcctctatacggcggctttcaaaaccttctaccccaggaatctcaatgagtacataatccagtatgcggtcatctttcaccgtgaaattcaggttgaactttgtttcatcctttatcagtacggtaacctccttaccaggggcaattgtaaatgtaggattctcaaagtccccatccatcgttatcaacacatcctgcgacacttcacgcccgcccgcatctgttacggtcactttcacggtgaagcgttcaccgatttcatcacgcttgaggtcataagaatagctcaactcatactccgtttggggagctccatagatttcgaccaaatcaatggtcttgttcagataaagatcggcacattgcagattgacggatacaattccatcctggtcagccaacgaaccctcaatggtaaaacgatggccggcaccggattcaatatgatccgtcaccaatgtcattgtcggaatctgcccgtctacatcagagtatccgtcatcgtcactacatccagtagtccataaagccagcgataataacgcccagaaagtggcgttaaagaaatgcttcttcataaatattattattaaagttaaacaaaaaagtacattttgttccgatttataataatcggcaatgcaaacatatgccaattttcgattcaacagctgtataaatcttgcagagaaggcatataaatctgtcaatgcacgatttgtgcacatcatctaaagattttatttgtacttttgactcatgcaatgaaaaacgacccgttatgaagaagattctactttccattttcctatgcctgccattcctgctatccgcgcagccatataccataaaacatctgagtatccgtgaagggctgtccaacaaccatgtggtaagcatagcccaagacaaacggggctctctatggtttgccacagaagagggtttaaataaattcgacggaatacgcttccttacctattataaagaagaaacaaccggcaagcaaagcatcaccggcaacgaactgaactgtctgctggacgatcccgtcgactccatcttatggataggaacccaacgtgccggaatcaatgcatacaattatgccaacgattcattcatcacttacagacacaacgaaaacaaccctgaaagcctggttacggacgacattaccaaaatcattgccgcctccgacggtaacctatggatttgcacctattggaaaggcgtggactattttgacaagcaaaccgggcaattcacccattacaataccgaaaccgtaccgggttttgcaagcaaccatatctggtctgccatagacggcggtaacggactactctatatcgggcatgtggaccggggattcagtatactttccataaaagacaagacagtcaagaacttcacacacgagccgcaaacccccaacagcctgcccggcaacgaagtgacatgtgtctacaaagacaaaagcggaaacatatggataggaaccgatagaggagtggtactgtttaacccggaagcggaaagtttcatccccttcgacgacaaaaccaactgcatatcgtaccgtgtatatgatatacgtcaactggatgacaacagactttggatagccatggaattcggcggcattgccgtagtggatttgtcccaacagcttttccgttcgtcggaccagattcatgcgctttctatccgggagggagacgatgaatacggcttgtccaactccagtatccgttgcctgctccaagattccttcggtaatgtatgggcaggttcctggggaggcggcatcaacttcataaaacgcgagccgtcactcttcagcacttataaatattctccttttccatccaccaacaacagcctgaacagtaaaatagcctccggtgtctgtatggacaaagccggtaacctctggataggaaccgatggaggaggaatcaacgtattcaacaagggaagacgaatagccatatacaatgctgacaacaagaaattcagaagcaatacggtgcaggcagccttgtgcgactcgaagggaggattatggttcggacttttttatggaggaatagcctactacaaccccaagagccaaagcttccggcagattttctccgaagacaagtcacgcactgacgtacgttcctttcatgaagacaagcagggaaacatttgggtcggaaccagcgaaggcgtctatcttatagattgtgacagcaagacaatcaaggcacactacaatctggagaacaatctggcccgctgtgtgctgaaggattccgaagaccaagtatgggtaggattcttcggaggaggcctgggcctctatgaccctcaactccaaagcatccagctcttcaacgtcctggccaaattcccctccaataccatcaatgctctctacgaagacagcagaaagcggttgtgggtggccacgggtgaaggtttggtatgcttcccctccctgacagacagaaactacaaagtataccaacgtgaaagcggactggctaacacccacatacaagccatcggtgaggacaaggcaggaaatatttgggtgagcaccaacaaaggtatcagctgtcttgtggacagtaaagacattttctataactacgactatcacgacaacctccccatgggaagcttcagtcggggcagtgtagcctacggacaagacggtaacttttacttcggctctataaacggtctgtgctacttcaacccggaagttgtattgcaggaacgcaaatcaccacccgcattcatcaccaacattgaaattaccgacccgctgaacaaaccggaaaacggacagagcaccattgccttaaacggacagaagaacgtgcaactgaaatatacacagaatagtttcagtatccggttcaacatccagaactatgccctggtcaaccaagtggaatatgcctatatgctgaaaggactcgagaactcctggtatacgcttacagaccccaataatgtcacctttcgtaatcttcctcccgggaaataccagttccaagtgaaaacgcgcatgcgcaaccaagcatggtcggacgcaaccacctcattgaacatccgcatcgccccacccctttggcttacttggtgggcaaagtcattctatatcctgctgtcccttatcatccttttctctatactctatgcctacaagaaaagactggatgctgaagcactgtaccaactggagaagcagagccacgaacacgagcaggaactgaacaacgaacgcctgcgcttctacaccaacatcacccatgaactgcgcaccccgcttacgctgatactgggtccgctggaagacatacagaaaagtgatacactatccaccaaagacgcacagaagatatccgtcattcaccaaagtgccatccggctactgaacctcatcaaccagatattggagttcagaaagaccgagacccagaacaagaaactctgcgtgagccgggacaacctcgtaccccttatccgcgagataggcctgaagtacaaggaactgaaccggaagccagccgtcgatatccggctggtggtggagaaagagcatatgcctatatacttcgacaaggaaattatccagaccatcctggacaatctgatatccaatgccctaaagtacacggaaaagggtagcatcagcatcggtatccgacaggtggaacgtgccgaagtgaactatacggaaatccgggtcagcgacacgggatacggtatcaagccggaggcactaccccacatattcgaccgttattaccaggaaggcggcaaacaccaggcttcgggtaccggtatcggactttctctggtgaaaaacctcgtagccctacacgaaggggaaatccgcgtagagagtgctcccaatcaaggtagtaccttctacgtcagcctgcttaccgacaacagttacccgcaggcactgcatgccgattcgcaggaaaaggaaagcaacgtccagcatatagaagaggcacaagtaaatcaagtttcatccagcgacaaacccatattgctggtagtggaagacaatccggacatctgcgactatatagccgaatccttctccgaccactttgaagtaaagactgccgccaacggaaagctgggcaaggaaagcgccctgaaagaaatacctgacatcatcgtcagtgacattatgatgccggtaatggacggaaacgagatgtgccgtgagctgaaaaaagacgtgcgcaccagccacatacccattatactgctgacagccaaagactcgctgcgcgacaaagaggaaggctaccaggtaggtgccgactcctacctcaccaaaccgttcagcgccagcctgctgcatagccgtatagaaaacctgctccagtcgcggcgcaacctggcaaaccatttcagcgccaatgccgccataagcaataaagcggctgtcattacagaatcgctcaacaagctggacaacgagtttatccacaagataaaccagctgatagaggaacggctttcttcagacaaaatagacatcagctatctttcggataaaatgtgcatgagcaattccaccctctaccgcaagatgaaagcgcttaccggactttccaccaacgaatatgtccgcaagataaggatgaaacacgccgagcaatacctgctggaaggcaaatacaacatttcggaaatagcattcaaggtaggtataaacaatctgttctacttccggcaatgcttcaaggaagaattcggctgcataccttcggaatatctgaagagattaaaagagaccggagagaaataagagacaaacagccccttcctattagtcggaatgcggacagctatttcagctccagctccatcttctttatcttttccagcgtattgcctgcttccatggaggggaatacctgaagcacgcgttgcaggtatgccttagccttgccgtagctattggtgaacacgtctgacaatccgttgcgatagcgtgcatactgcatccttgtgggggaagttatctttttatagtcttcttcgagcttcttcttatccttctcggcttggagataataataatttcctaagaaaatattggcttggagattgtcggcatccagcatcaataccttttcataggttttcaaggcatctttctcctttccccgcatcatctccatttcggcacaagagacaagtgcaggtacgtcttcgggatgacgctgcaagaactccttatagaagaggtaggctttatcgtaattccgcatttccttgtagtgcacagccagcacatccgcaagacggggagccacctcactgctcttgtccacattggtccagtagaacatttccgtcctatcctcaccggcatttgccgcctggcgaaacaaactcaccgcatagtcatctttaccctcggaaagtgcatcggacactttcgaaagcaactcatctgccgactgtccccagacagacagcggacacatcaagaacaaggagaaaagcaacgttaaggttttcatttttagtgtatatatatagtttaacagcccaatcagtctcatagaaatctacctacaaaactacgcatttttacggtaaccatcaatagttgaaagtagaaaaatagttaactttgccgaccttaatgaattaaataatataaatgaagcccagagacagacaaatactgcaaatagccttaccttccatcgtatcgaacatcaccgtgccgctgctcggcctgattgatgtagccatcgtcggccatctgggttcgcccgcctacataggcgccattgccgtaggtggcatgctgttcaacattatctactggatattcggttttctgaggatgggtaccagcggaatgacctcgcaagcattcggcaagcgggatttaccggaggtgatccgcctgctgttgcgttccgtgagcataggcctggcagtcgcgttctgcctcatcctgctgcaaacgcctatcaggcagggagccttccttctcatccatcctacggatgaagtcaaagaaatggcaacgtgctatttccatatctgcatttggggggcacctgccatgctggggctatacggactgacgggatggttcatcggcatgcagaattcgcgtatccccatgtatatagccatcacacagaatgtggtcaatatcattgccagcctcggactggtttatctgtgtgggatgaaagtagaaggagtagctttggggacgttgattgcccagtatgctggcttcctgatgggcattgtcctttggatgcacaactacggcaggctgaaaagattctgggaaattaaaaattataaattaaaaattaaagggggagaaggggcaggtatctgggagaaaggggcgatgttccggttcttccaagtgaatagggatatttttctgcgtactctttgcctggtggcagtcacgttgttcttcacttcggcgggagcttcgcagggagagattattctggcggtcaacacgctgctgatgcagctcttcaccttattctcgtatgtaatggacggctttgcctacgctggcgaagccttaagcggcagatacataggcgcacgcaaccgggaagcctttacagacaccgtccggcacctcttcggatggggagcggtgatagcggttctttttacattggtttatgcgctgggaggcaatgccttcctcggactattgacggatgacaaagaagtgatagctgttgccgacacctatttttattgggcgcttgccgtgcccgccgtcgggatagccgccttcatctgggacggcatcttcatcggcgccaccgccacgcgaggaatgctcctctccatggcagcggcagctgtcagcttttttatcttatattatgggctgcatcccgtcctggcaaaccatgccctatggcttgctttcctcacttacctgctgatgcggggagtggtgcagacaggcttgagccgggaagtcatccgacgggcatttcccagcaagaaggaacctgcttggcgtgaggggtaggctatgaacaatttcaagggaaaaagcattatctttgtatcgctatgactgatataaaatatggattccaccctccagaacaaggcgtcaggtagccagtatacggtgccaaacaagtttcaacttttggcaccatcggtttcaatgcgagaaaccgacggtttcaagtagtgaaaccaacggtatctcggaatgagactgacggtatttgcatttggaaccaagtcactcatagcaagagtaatgacttatacaaaattgttatggcagaaaagaatatagttcaagagacatttcccgtattgggaatgagttgcgcctcatgctccgcacgggtagaaaagacgctgaaccatcagtcaggtgtcaagaaagcggtcgtaaactacgcttcggcaacggcaaccgtggaatatgaccctacgagctgttcttccgagactttgcagcaggctgtgcaggcggccggatatgacttgttgataaaccaggacggcaacacgctcgaagaggcggaagaggcccacaacaagaaattcagcgcattgaaattccgcacaacctgggccatcatcttgtctatgcccgttgtcatcataggcatgttcttcatggatatgccccatgccaatcccatcatgtgggcgttgtccactcccgtcgtattctggctggggcggggattcttcaccagcgcctggaaacaattgcagcatggcagcgccaatatggacacactggtagccatcagtacggggaccgcctatctgttcagcctgttcaacatgctatttccggacttctggctatccagaggcatccatccgcatgtatattttgaggcggcaagtgtcatcatagcctttatcctgctgggccgcctgctggaagaaaaagcgaaaggaaacacctcaaccgccatcaagaaactgatggggctccaacccaagactgtgaccatcattgtggatgaaggacacgctgtccctcactcttcctttgagcgcgttatccctatcgagcagattcgccccggagacatcgtcctggtgaagcccggagaacggattgccgtggatggcatcgtgacggaaggtagctcctacgtagacgaaagtatgctgagcggcgaaccggtagcagtatccaagcacaaagacgccaaggtctttgcaggtaccatcaatcagaagggaagtttccgcttccgggcagagaaaatcggcacggatacactgctggcgaagattatacacatggtgcaggacgcgcaaggaagcaaggcaccggtgcagcagctggtggacaagatagccgggatattcgtgcctaccattataggcatcgcagtgcttgccttcatcgcatggatgctactggacggaaccggcggattcacccacggattgctggcatttgtcacggtggtcatcatcgcctgcccgtgtgcactgggactggctactcctaccgccatcatggtaggcatcggcaagggcgccgaaaggggcattctgataaaagatgccgaaagcctggagattgccaagaagatagacaccgtggtactcgacaagaccggaacggtgactgaaggaaaaccggtagtcagcaagctgatatggaatacgcaggcaatgacgcccggtactggcgccactgcaggcaatgcgctgtcggacattttctatagtctggagaagctctcggaacatccgttggcagaagccgtggtgaaccacctcaaggagtcggcctccatagacattcaagactttgaaagcatcaccggaaaaggcgtgaaaggacgggcacaaggccggacctacctcgccgggaaccggaaactgctggaagaaaaccatatcgccatccccccctccctgcaggaagaggcaacccgactgacatcggaagcacagaccgtcatctggtttgccgatgaagaaaacgtgctggcaatagccggaattacagaccggataaaggaaacttccatccgtgccgtcagcgagctgcacgccgccggcatcgaagtccacatgctgaccggagacaatgaggccaccgcccgtgagattgcccgcaaagcaggcatcgcccactaccaggccagtgtattgccgcaggacaaggctgccttcgtcagccggttgcaggcagaaggccggaaggttgccatggtgggcgacggcatcaacgacagcgccgcccttgcccaagccgacttaagcatcgccatgggtggaggcagcgacatcgccatggatgtagccaaaatgaccatcatctcttccgacctgaccaagataccggaagctctctgtctgtcgcgtctcaccgtccggaccatccggcagaatctcttctgggcatttatatataatataataggtgtacccattgcggccggaatactctatcccatcaacggcttcctgctgaatccgatgatagccggtgcggccatggcattcagcagtgtcagtgtggtgagcaacagcctgctgctgaaacggaaaagaatacatgaaggagaagaaaacaaagaagttgaaccgccaacagaaacaatcatgaagaaagaattcaaagtagaaggcatgatgtgcaaccattgccgcatgcatgtagagaaagcattgaacagtatggaaggcatacacgccaccgtaaccctgaaccctccggtagccaccgtagagttttcggacggtgaaaagacgctcgaagaactgcagaaagtagtgacgaaagaagccggcgactacacactgaaggcataagtgtagaattcatacggttttcatacagaaaagaaggaggaaatcaaagtaaatatctacctttgcgcgctaatttacagataaagatatgaacgcaaaagccaaaggatatattttaggttccatcgccgcagcctcctacggcatgaatccactgtttgccctcccgttgtacaaggccggcatggacccggactcggtactttttttcagatacctcttcgccatcccgttgctgggcattatgataaaggcgagagggcggtcattcaagatacagcggaaagaaacatttccgctcatcatcatgggattgctcgtggccctctcctcactgacgcttttcctgagctataactacatggccgccggcatagcgtctacactgctgttcgtctatcccatcatggtggcgcttattatggccatggttttcaaagagaagctggcactgcaaaccatcgtctgcatgctgcttgcactgggaggtatcggactgctctacaagagcgaggacggcagcacactgagcctgatagggacactgctggttttcgcgtcttccctttcctatgccatatacatcgtgggcatcaaccagacatcgttgaaaaatgtggctacgcttaaagtcaccttctatgtccttctcttcggcctatcgctttttgtggcacgcctgctctattccggcgtactgaacacaccggaccagtggtatctgtgggccaatctgcttgcattggctgtcttccccaccgccatatccttcctctgcactaccggtgccatccaatatatcggctccaccccgaccgccattctcggcgcattggagcccgtgacagccatcttcttcggaatagccgtctttggagaaagcctgacagtcagagaaagcttcggactggtgatgattatcgtagccgtaacgttcgtcatcgcaggaggcaatattacaagccaactggtccgtttcaggaaactgttcccaagactcccgataagaagcaaaaaaagaaactaatcctataaaaccatcatcaaccatgaagaaaagtctctacctgcttttactgcttttattccccatcgggctgcaggctcagtccgaggttatcgtactccgcccggatgaaggcaaagccgaagtgaacgaagccgaatataccagaattttcctggccggcaccatcgacatgggcaagagcatagactggcaaaaggcaacctgcgactggttccgcgcacgcccccaaggtaaatacatcctatacaatccccgaagggacaagggactcagcggcgaaatgtccgactttgaacatcaagtgaactgggaactggaacatctggaaaaagccaacctaataatcatgaatatcctggcaagcagcaagtcccccatcaccctgctggagatgggactgcacatgcgttcgggcaaactgcacgttatctgtgaacccggtttctaccgctacgacaatgtgcggattacttgcaaccgctatggcgttccgttatatcacagcatggacgagttcctaaagactgtgcgttaggcaactatcctaccacattctgctgcacttttcagtttaattctttatctttgctgcaaagcaatgtaacaaaactatatattatggcaacctataaaagaatcttattgaaactcagcggcgagagcctgatgggtgaaaagcaatacggcatcgacgagaaacgccttgccgagtacgcagctcaaatcaaagaaatccacgaattgggagtacaaataggcatcgtgataggcggtggaaacattttccgcggattgagcggtgccaacaaagggttcgaccgtgtgaaaggcgaccagatgggaatgctggcaaccgtcatcaacagccttgcactcagttcggctctggtagctgccggcgtgaaggcccgcgtgctgactgccgtacgtatggaacccatcggtgaattctacaataaatggcgtgccatcgaatgtatggaagcaggcgaagtagtcatcatgtccgccggtacaggcaatccgttcttcactaccgataccggttccagtctgcgcggcatcgagattgaggcggatgtcatgctgaaaggtacccgtgtggacggcatctacaccgccgacccggagaaggacccgacagccacgaagttccacgacatcacctacgacgaagtgctgaagcgcggtctgaaagtgatggacctcactgccacctgcatgtgcaaagagaataacctgcccatcatcgtttttgacatggacacagtgggtaatctgaaaaaagtgatgcaaggagaagaaatcggtacactggtgcacaattgaatggaaaatggagaataaaaaatgaatgttatttaattcttaattctcaattttcaatttaataattatatttgcaaagtttcaaatcaaagctatttcaaaacgaaaataatatgagagacgtaaaagacatcttagacgaagcgcaagaaagtatggacatggccatcatgtatctggacgaggcactggctcatatccgcgccggaaaagccgatatccgtttgctggacggtatccgtgtggattcttatggaagtatggttcctatcaacaatgtggcagcagtaaccactccggacgcacgcagcattgccatcaagccatgggataagagcatgttccgcgtcattgaaaaggccatcattgactccagtctcggcatcatgcccgaaaacaatggtgagattatccgtatcggcatcccgccactgacggaagaacgccgtaaacaacttgccaaacagtgtaagggagaaggagaaactgccaaggtaagtgtacgtaatgcacgccgtgatgccatcgacgccttgaagaaatccgtaaaggacggactggccgaagacgcccagaaaggcggtgaagaaaagctgcagaagattcacgacaagttcatcaagcagattgatgacatgctggctgcaaaggataaagaaatcatgaccgtttaattaagttgaaaacggaaaatggaaagttgaaaataaaccgatataccaagtatagaagcctttcaaccttctattttcaactttcaactttcaactttcaattattttgaggggactcgttataaaaaacaccggaagttggtacttggtacggactgacgacggaagggagattgaatgtaaaatcaaagggaacttccggctgaaaggcatacgaagcactaatcccgtggctgtaggcgattatgtgaacatcatactgaaccaagaaggtacggcctttatcagcgagatagaggaccggaagaattacatcatccgccgcgcctccaacctttccaagcaatcgcacattcttgctgccaacctcgaccagtgcatgctcatagtgacggtgaactatcccgagacctccactacctttatagaccgttttctcgcctctgccgaggcataccgtgttcccgtcaagattatattcaacaaagtggatgcctacgatgaagaggaactgcactatctggacagcctgatcaacctttacaccaccatcggctatccttgtttcaaggtttctgccagaaaaggggaaggcatcgacactatcgagaaagaactcaaaggacgcataaccctcttttccggacattccggagtagggaaatcgacactcatcaaggcaatactgcccgatatagagattaaaaccggagagatatccacctatcataataaaggtatgcacaccactaccttctcagaaatgttcccggttccgggcaacggatatatcattgacactccgggcatcaaaggtttcggaacattcgatatggaagaagaagagataggccactacttcccggaaatattcaaggtatctgccgactgccgttacggcaactgtacccaccgccacgaacccggatgcgctgtacgcgaggctgtcgagaagcactatatcagcgaatcccgttacgcttcttatctgaacatgctggaggacaaggaggagggaaaataccgggctgcttactgatttgtcattttatcacctttccaatccatattcttacactttttaactctttatcttttaaactattctcttttcccgtagtctaatctaaggctgattttattactactaatactacaacatgaataagagagttaaatggggcatcattatcgtgattggtgccggactgattggaggaggaatctactcccaattacctaaagagaatgaagaattagccgctgcagacaaggtgatgaccggtcaacgtagcggtaagaaaattctaaacgtaaacgcaaaaataatcaaaccgcaactgctgaaggatgaaatacaaatcagcggcagcctgctgccggatgaggaagtggatctttctttcgagacatccggcaaaatcatagagataaattttgaagaaggcagcttcgtcaagaaaggacaattacttgccaaagttaatgaccggccgctgcaagcacaattgcaacgcctcgtctcccaattaaagttggcagaagaccgcgtgtttcgccagaacgccctgctggaaagagatgcggtcagtaaagaagcctacgaacaagtaaagaccgagctggccaccctgaatgccgacattgacctgatagaatcgaacatcgcacaaactgagctgcgtgctcctttcgacggtgtcatcggtctgcgccaagtcagtgtgggtacttacgcttcccctacaaccattgtagccaaactcaccaagatttcgccgttgaaggtggaatttgccgtacccgagcggtatgccaatgacgtaaagaccggcgccggactggacttcactctcgaaggaaagctaaaaaccttccacgccacggtttatgcacgcgaatcaaagatagaccctactacccataccctgacaatccgtgcactttatcccaatgccaacggagctgtgcttccgggccgctatgccagcatcaagctgaacaaggatgaaattcaggacgcccttgccgtaccgtccgaagccattgtaccggaaatgggaaaagacaagatattcctctataagtcgggaaaagcccagccggtagagattactacgggaatccgtacggaagcggaagtacaagtattgcaaggcttgcaggcaggagataccatcatcacctcgggaaccctgcaactccgtaccggactaccggtaacactggacaatatcaattgacaactgtcaattatcaaccgttaattatcaattgtaaagaatgaatatatccgaattaagtatacggcgaccggtactctcgacagtacttaccctgataatcctgctgtttggcttcatcggctacaattatctgggtgtacgcgagtacccatctgtagacaatcccatcatatcagtatcctgctcctatccgggtgccaacgccgatgtcatcgagaaccagataacggagcctctggagcagaacatcaacggtattcccggcatacgctccctctccagtgtcagccagcaaggctcatcacgcattacagtagagtttgagctttccgttgacctggaaaccgccgccaacgacgtacgtgataaagtgtcgcgtgcacaacgctatctgcctcgtgactgtgaccctcctaccgtatcaaaagccgatgcggacgccacccctatcctaatggttgccctccaaagcgacaaacgttccctactggagctcagtgaaatagccgacctgactgtcaaggagcagcttcagactatttcagatgtaagtagtgtaagcatctggggagaaaagcgctattccatgcggctttggctggaccccatcaagatgtccggctatggaatcactcctctggatgtaaagaatgcggtggacaacgaaaacgtagagctcccttccggaagtatcgaaggaaacactaccgagctcaccatccgtacgttgggtctgatgcatacagccgaagagttcaacaatcttatcctgaaggaagacggtaaccgtattgtccgcttcagcgacattggacgtgccgaactgggaccagccgacatcaaaagttatatgaagatgaacggtgtgcccatggtaggtgtcgtagtaattccgcagccgggtgccaaccacattgaaatagccaacgccgtatatgaccgcatggagaagatgaagaaagaccttcccgaagatgttcattacaactacggttttgacaataccaagtttatccgcgcttctatcgacgaggtgaagcagacggtgtatgaggcctttgtactggttatcatcatcattttcctcttcttgcgcgattggcgtgtgacgcttgtgccatgtattgtaatccccgtttcgctgattggagctttcttcgtcatgtatctggccggtttctccatcaatgtgctctccatgcttgccgtggtgcttgccgtgggcttggtggtggacgacgccatcgtgatgacggagaacatttatgtccgcatcgagaaagggatgccaccgaaagaagccggcatagaaggagccaaggagattttctttgccgtcatctccactaccattacgctggtggcggtattcttccctattgtattcatggacggtacgacaggacgactgttccgcgaattcagtatcgtggtctccggttcggtgattatctcctccttcgccgcattgacttttacgccgatgcttgccaccaaacttttaatcaaaagggaacagcagagctggttctatcgcaagaccgaacctttcttcgaagggatgaaccgggtatacagccagtcactggccgccttcctgaaacggcgctggattgccctgcccttcaccatcgtcaccatcctgcttatcggagtcctttggaatactatcccggctgaaatggcgccattggaggaccgttcgcaaatcagtatcaatacaatgggtgccgaaggagtgacttacgaatatatccgcgactataccgaagacatcaatcatctggtggactccattatcccggatgcagaagcggtaacagcgcgtgtatccagtggtagcggtaacgtacgtatcacactgaaagacatgaaagaccgtgactatacccagatggaggttgccgaaaagttgtcgaaggcagtgcagaaaaagaccatggcacgctctttcgtacagcagtcctcctcattcggaggacggcgcggcggtatgcccgtgcagtatgtattgcaggcaactaatatcgagaaattgcaggaggtgctccccaagttcatgacgaaggtctacgaaaatccggtattccagatggcagacgtaaacctgaagttcagcaagcctgaagcgcgcatcaacatcaaccgtgacaaggcgagtatcatgggcgtaagcaccaagaacattgcccaaactctgcaatacggcttgagcggacagcgtatgggctacttctacatgaacggaaagcaatacgagatattgggcgaaatcaaccgccagcaacgcaacaagcccgccgacctgaaaggtatctatatccgaagcgacaacgggaacatggtgcagctggacaacctgatagagctgaccggcggtatcgcccctccgaaactgtaccgttacaaccgtttcgtgtccgccaccatctccgcggggcttgccgacgggaagaccatcgggcaaggactggacgaaatggacaagattgccaaggagacactggacgagaccttccgtaccgcactgaccggagactccaaggagtatcgcgaaagctcctccagtctgatgttcgccttcatccttgccatcgtgctgatttacctgattctggccgcccagttcgagagcttcaaagacccgctgattatcatgctgacggtgcctctcgccattgccggcgcgctggtattcatgtctttcggagacatcacgatgaatatattcagccagattggcatcatcatgctgattggtctggtagcaaagaacggtatcctgattgtggagttcgccaatcagaagcaggaagcgggtgaagacaagatgcgagccatcaaggacgcctccctgcaacgtctgcgccccatcctgatgacgagtgcctccaccatcctgggactgataccactggcattcgccaccggcgaaggctgcaaccagcgcatcgccatgggtactgccgtcgtaggcggcatgctcatctccacactgctgacgatgtacatcgtgcctgccatatatagttatgtatcaacgaaccgaagtaaactgaagaccgaatgaaacgcattgttttaattttcatagccactgcctgcacagcgctgggcctttatgcacagcctgcgcctacctacaccttgaagtcctgcctggagcaaggattgctgaacaactactccctgcgcattgtccgcaatgaagagcaggtcagcaagaacaacgccacactgggcaatgcgggctacctgcccacactgggcctctccgccggctacaagggaaccatagacaataccgagaccaaagcccgagccaccggagagacaaccaaggacaacggagtgtttgaccaaactctcgatgcaggcatcaacctgaactggaccatcttcgacggtttcaacattaccgccaactaccaacggctcaaggagctggaacgccaaggcgagaccaatacgcgcatcgccatcgaggacctgatagccaacatagccgccgaatactataactatgtgcagcaaaaaatccgcttgaagaacttccgttatgccgtatcgctatccaaagagcgcctgcgcattgtggaagagcgttaccacatcggtaacttctcgcgcctggactaccagcaggccaaagtggacttcaatgccgacagtgcccaatacatgaaacagcaggaactgctgcacacctcacgtatccagctgaacgaactcatggcaaacaaagatgtagaccagccgtttatcatacaagacagcctcatcaacgtgaccgcctccctgaacttcgaggagctgtggaacgccaccctcaccatcaacgcctcactgctacgtgccgaacagaacaataccctggcccgtctggactacaagaaagtctgctcgcgcgactacccatacgtgaagatgaacggcggatacggctacaccctcaacaagtatgacatctctgccaacagccgccgcagcaacctcggtctgaacttcggcgtcacggtcggcttcaatctgttcgacggcaaccggcgccgcgaacgcaagaatgcccgcattgccgtacagaatgctcgcctggaacgggagcaactggagcaagccctgcgcgccgacctcagcaacctatggcaggcctaccaaaacaacctgcaaatgctgaacctggaacgccagaaccttgtggctgccaaggagaaccacgagattgccatggaacgatatatgctgggcaacctctcgggaatcgagatgcgcgaagcccaaaagagtctgctggatgcagaagaacgtattctctccgcggaatatgataccaaattatgtgaaatctccctactgcaaatcagtggaaaagtagcgcgctatatggaataagcaatataatccgtacctttgcgcccggtttatcagaattgaagcacaatgggattattcatcagaaagccattcgaggcactgcaagcggaggctaatgcctccggaaagaaaacattgaaacgtgtacttggtccgtggagccttgttgccctgggcgtgggagtcatcatcggagcgggtctattctccatcaccggaacggtggcggcaggctatacgggaccggccatcacactgtcctttgccattgccgcactgggatgctgcttcgccggactatgttatgcggaatttgcatccatgatacccgtagccggcagcgcatacacctactcgtatgccacgatgggcgaactcatcgcctggattatcgggtgggacctggtattggaatacaccgtagccgcaaccacggtaagcatcagttggagccgctatctggtcgtctttctcgagggactggacatacatctaccgcaagccctcaccgcctgtccctgggatggtggagtcgtaaatatccccgccttccttatcgtcgtgctgatgagcctcttcctgatacggggtacggaaggcagctccatcttcaacggcttcattgtattcctgaaggtttccgtcatactgatttttgtcatactcggctggaaatacatcaataccgacaactatacaccttacatccctgccaatacgggcgtgctgggcgaatatggcttctccggcatcctgcgaggggcggccatcgtattcttcgccttcctcgggttcgacgctgtgagcacagccgcccaagagacgaagaacccgaagcggaacatgcctatcggcattctggtctccctgctggtatgcaccgtgctctatatggtttttgcccacgtcatgacgggagtggcacactacaccgccttcagcggacagcaaggcattgctcccgttgccatagccatagagcacatggggcaggctgatgctgcaggtatcatccagccggactatccctggctgaaccgtgccatcgtgctgtccattctgttcggatattgctccgtcatcatggtgacactgctgggacagagccgcgtattcctaagcatgagccatgacgggctgctgcctcctttcttctcgcatatcaacgaaaagttccgtactccggcacgcagcaacctgctcttcatggtacttgtgggcctgctggcagcttttgtacccgcacggctggccggagagatgacaagcatcggcacgctgatggccttcacgctggtctgtgccgctgtactggtagtacgcagaaccatgcctgacgtgccccgttcctttaaaaccccacttgttccacttatccccatactgggtattcttacttgcctttgcatgatgttgttccttcctgccgatacatggatacgcctggtgctgtggatgctcatcggtctggacatctacgtgggctacggcatgaagcacagtaagctggagcatggaggtaacacccgccacgggcaggtggccttgaacatgattggacttatccttgccgttctttgtgtcatcaccggactgtggcaccaacagactgtggggtggggagaaagcaaagtgctgctgattatctcgtttgttttcgcattcacgcactgcgcttactatatgtggagaatctggaggagataataagccctaaatctcctcctttaaagataaacaatctttcatccaaactaccccagcacccacttggtccgtttcccgaaacaacggtatgccattgccaccagaaaccaggaagtacagaaagcgacgactgcggcacaaggtatctgaagatagataggaacatggatagcacgcatcaggactacgctcggtccggtaaagaaatagtgtatcatatagactccaaaaccacagagcgtcaagtttgccaatgctttcttgatgcgctccgaacggaaattggcccgcttgcaaagcataaacacggggatggtcatcattactacattcagcgaacagtaggtgaagaagagttcgagcatctcatccgtaaaatccggcaaggaggtcatacgacggaaaccaaggaatgttacggcatagccaatggcaaacatgggaatgccgatgccacagagttgccggcccgtccagttatggttcctcagataatggcccaacaataggtagccgttaaaaccggcaaagtaatacagcataccgaacgagttccacgagcaagtcccccaaaggtacggagcggcaaactcggtataataaggcagcagcagtgtcactccccatgctgcaagaaaccatagtttggcacgttccgaggccttctccacccatgccgagaatatcggaagatagagataaagccctatcagcagatagatataccacatgtgtacatccaatagagagaaattaaaaggcatttctgcaatatatcccaggctcactgccagagactggcgcatcacttcctcacccgaataagggaagaaatccagaatcactttcggctccactcccagcagtcccgttatccaggggaacagattgtaaatcacagaccagatgaggaaaggaaagaatacgcgggggatacgtttcttgtagaatgccgaggcgtcaccccgtaccggcaacagcaatgcaccggtaatcattacaaaaagcggtacgcaaggacggagcgccgcaccgtagacagctccccaaaacttgatgtcaacaatgtcgggcgatgtgcccggatagaagttaaaagggtctgtgcaatggcagcaaactactgtaaacattgcaacaaggcgtaccacatccagccatacgatgtgttgtgccggagtttgtcgtgtaagagttggttccatgttttattaaattggttgtttggagggctaaagataaagaagttaaccgagaaatgaaaaggagaatgtaacaaaaatacgacaacaaacgagtttcagttttattctcctatagagaacaatctgttttatcaaggcagaacagagtgttccaatagggaagaacactttgttccaacatgaaagaacagtttgtttctctttaacgaaacaatttgtttcaacataaaggaacagtttgttttgcttgatgaaacagagtgttctatgccgcgaaacactttgttttcctctacaaaacaaaaaagccgtaacaagattttctccgttacggctttccttatattatgcctttctaaaaggcttctgttttacttgctgcaattccagggcttcagttgcttgaagaagtcgttgcccttatcgtccaccaagatgaatgcagggaagttctccacctcaatcttccagatagcttccataccgagttcgggatattccacgcactcaatgctcttgatgttgttctgtgccaagatagcggcaggaccaccgatagagcccaagtagaaaccgccatacttttggcaggcatctgtcacttgctggctgcggttacctttggcaagcataatcatgctgccgccgtggctttggaagaggtctacatacgggtccatacgtccggcagtagtcgggcccatggagccgcaagccatgccttgaggagtcttggcaggaccggcgtagtagatgggatggtctttgatgtactgcggcaggtcttcgccacggtccagacgttctttcagcttggcgtgtgcgatgtcacggcctacgataatggttccattcagagacaaacgggtggaaaccggatacttggtcagttccttcagaatatcggccatcggctggttcaagtcaatcttcaccacgtcgccttcaccggccttacggagttcttcgggaatcagttcacccggattgctgtcgagcttttcaatccagataccttctttattgattttacacttgatgttacggtcggcagagcaggaaacacccagacccacggggcaggacgcaccgtgacgcggcaggcggatgatgcggatgtcgtgagccagatacttgccgccgaactgggcaccgaggccaatcttatgagcttcttccagtaccagcttctccagttccacatcgcggaaagcgcggccgaactcattgccagtagtgggtaggttatcgtagaagtgggtggaagccagtttcacagtcagcaagttcttttcggcagaggtaccgccgataacgaatgcgatgtgatagggaggacaagctgccgtacccaaagtcttgatttttgagataaggaagggaaccaatgtttcggggttgaggatagcctttgtctcctggtagagataagtcttgttggcagagccaccacccttggttacgcagaggaactcgtactccataccttccgtagcttcgatgtcaatctgtgcgggaaggttgcacttcgtattcacctcatcgtacatggtgaggggagcattctgcgaatagcgcaggttctcttcggtataagtcttgtaaacacccagtgagagagcttcttcatcacagtagccggtccatacttgttgtcccttttcgccgtggatgattgccgtacccgtatcctggcagaaaggaagtacccccttggatgctacctctgcattgcgcaggaaggtgagtgccacgtatttatcgttatcgcttgcttcggggtcactcagaatcttagcaacctgctcgttgtgcgaacgacgcaacatgaacgatacatcacggaaagccgcattggccattgccgtcaaaccttctttttcaatcttcaggataggttttccttcaaactcgcttactgacacgtaatcttttgtaagcagataatactcagtagtatctttccccttctcgaacatgggctgatacttgaacggaggtgttgttgccataattactcgtatatttaatgtttaaaagtgattcgggtagcaaaggcagcctgaaaaccgcctttacagagcaaaggtaaaaactattattgaaataattctttaattagagtaaaaacgcaacaaatcataattaattttctgatacccgcttcatccttcctatcagttcatcgcccagcgccgtcttcacctctatatgtttcagcacggccattacaaacggattgctttcaaagtcgccgcgtacctgctcaaaatcgagttccttttccaatcgtgagccgtcagctccaaagcccgtcatggaagccagtgaaaattctttcttagcatcctcatacaccatgcggtcgaggccaactactgcttctttccatttttcgacaatatgtatgacgtcttctgccgtcataccttccggcttgataccatagaactcttccaacttctcatacgcccaggtccattcgtaggtatagtagttgctgtgcatcttctcaaactcggcattgatagacttcaagcgattgactttgccggactcaataccgtctatcagcgcatctatctcactctttggggctatcaatccggaaatatccacccattcgccgctaccaatggcagtatcgggcttcaaacgggcacgtatttcttcattgctccggaagtcaatgccttccaagcgcttgatgacagagtttccgaggaacttatgaatggctatttcatagaagcggatacctttcaccaaagccgagttacgtatcttcgcactatggaaagaatagatatccgaaagctcgccactggcatgacgcagattctgcaacgtctcccgtcccttgaacattttctgcaccgtgtaggggctgagaagattatagttgatgtaatccagtttgttcgggtcggtacgcccgtcacgtttcggccacttctgggcatcacggatggtacccacactacgcaggttgacaccgggtacaaggtaggtggtattattctgctctatcaagtaagagaacggcaggttcgaagtatcagaatggttgacatggcgccccattaccaaggaaaacgctcccacccttgcaggccacaagatgtacgaatcggaagtcgtcttggcgccacgttccaaagtgccttgatggataggccctaacttatacatatggttactctgattggaccccgaaccggcattcataaaggaaaacataccggcaatcagcaacgtagacttatggtgggttaccgtatagggcccggcaaagatggcgcatgcctccccgttctctccctggcagttgctgaagaacaaagaatccgaggcagaataattgtgccccaacttgcatgcctgccccacgaagcagcggctcagcatagccccgtcatctacatgagagccggtagagatgatgaaatcatcacaaatcaccccatgcccgatgtgtaccggcgccacctcgttactgttgatgcttccgttatacagacggcatgtgccacagatgcggcaataatcaccgatgcgcacattctttatggaaccggtgttcaatatcattacatggttcccgatgcttcccacggcagaagcatgtttgttggaataaaaatccgtgattcccttcatccgtgcaatcagctccgggcgatggcggtaaagcgccagaatataggcttggtgtgcggagagtttatcattaatcagcacctcacggcctcccgtctcattcaggacagacacttctaccccgttaccgaacttcgacacaccgtctaccagaataatatccacattctcaataaaggtgtcatgccctatttcataattggcaatgtagttctggatattctcaatgcaacagttatcccccaccgttacattatgcagcgtcacatgccgcaggccggaatgcttcctgattcctcccggcaacataaattctgaatggaacactcccaaacacacctcacccgaaaaacgggtatgatgcacaaattccgttgagaactcttctgcaacggttactttcccccaatcatcagccagacatgactggctcttcaaccggagaatttcatcttcggtcagtcttctgtaattcatccttataacgagttatgagttatgagttataagctattgcctttgccggcactaccgattcaaaccgctgccagcaaataactcataacttataactcataactaaaattaaacttcttcttcgtaggtctgataaagaaagtcattataggggtacttctgcacgtgcaattccttcacacgctgataaaccacactcttcagttcctccatattgattttttcgcgggcagaaataaagaggcagttatcctccatcttagccatccacgtcttcatcagttcttcgagtgtcaagttttccttggttctgggggtaaggtcgtcagccgctttctctatataagtataagcgtctatcttattgaatacaagaatcatgggcttaccggcggcaccgatatctgccaacgtcttgttcacaacttctatctgttcttcgaaatccggatgagagatgtctacgatatgcaacagcaagtccgcctcgcgtacctcgtccagggtagacttgaaggagtctaccaaatccgtcggcaatttacggataaagcccactgtatcagaaagcaggaacggcaggttctcaataatcaccttacgcaccgtagtatccaacgtggcaaacagcttattctctgcaaagacttcacttttcgaaagcaaagtcatcaatgtggattttcctacattggtatatcccaccaatgccacacgaatcaagcgtccgcggttcttccgctgggtagacttctgcttgtcaatctcagccaagcgctccttcaacaatgacatacggttcaagatgatacggcggtccatttccagctgcgtttcacccgggccgcgaagtcccacggaacctttacctccaccggcaccggagccaccaccctggcgttccaagtgggtccacaaacgttgcagacgaggaagcatatacttgtattgcgccagctccacctgcgtttttgcattggcagtctgggcacgcatggcaaagatatcgagaatcagggacgtacggtccagtatcttgattttgagttcagcttctatattgcgtatctgcttggcggagagttcatcatcaaaaatcaccatgccgatttcgcgttcggcttcttcttcattccggatatactctttaatttcttccagcttgcccttgccgacataagtcacggaatgcgctgcatccagcttttgggtaaaccgcttcactacttccgccccggctgtctcagccaagaatgccagctcgtccaggtattcgttcgtctttcgctcatcctgcgttttagtgatgagacctaccaataccgctgtttctgcctgcgcttcggaaattacaaattctttcatagtttctataccttattatatatacgtattgttggttcgggcagcaaatataaataattttggcggaagcgccttaaaaaggggaataaaataaaaacagacacaatagaaaaatggcatgtaaaatgaagtcgaacttcatcttacatgccatttcaaattacatattatctaattgccaggataatcagaacccttccggcatctccaacgtttccgtgaatccctgatacagtactccccatttaccaccgtcaagtactaccaagccctgcatcgggaaagacaacacgtttcctttacgctccatacctgctgctgcaaagtatagcataccataatccgtcttgtcataaccagtaggttgaggatcccaacctatcagttcttgattgtcatcgcttagcgtaaacatgatgggatatcctttcgtaatgcaatcttccagcttatagatattagcctctttagccttcagcacaggttgatcccaaccctctccaaataattgagatgtatagtagcctgtacctatattgagccaagtatagtcacgctttatattgaccgtcaccttgggtgaaccataaacataggaatcttcttcaggaatggcaatagtataagatgcagtagtacccacagctatgtcaaacgcaatctttacttctttgagtgcttcaccggcagcaaaatcaaccgttgtcggcactgttacgctctccgcatctgtagtcaagtgaatagatgcagccgcatctgttttctgacggccgattttgaccacaaaaacctgttcatcattcggataataagtcaaatcagtgttatcagcataaatataagcttgtacaccctcggtaggaaccggagaaggctcccactccacaccgtctgaacaagccgtcatagccaaaccgcatacggccaagcccaaaaacaatttattgaatatcttattcatatacaaattctattaaaagttagttcattggttaattgttacccggtgcaaactcccctatcggagtaggacgtttagcaatagcaccggacgggtccggattgttcattccctgaagggcagtatttgaatcgacctcggtcttaggaatcatcaatgtccagttgggcttcacacctttacagtttatcttgaagatatcttctataaagttggtaccctcataattctgaatgacatctggtttcagacgtttagccgtggggaatgcgattccctcaccccagaactcgatacgcatctgtttcaacacctcaagttggaaattacgcaaatcacccgtactgaaattgtaattgctctggcggtactgcttcataaagttattcaacaactgtacgcctgctgccacattctggctggcacctactgcttcagcctctatgagatacatctcttccacacgcatcacgggaatatctgcagccgcacccacagaataagtgttatagtcaccacccacggggcggaacttcaatgacatataatccggttgttcatccagccatgcattgcctctcactgactggtaagcgtaagtacttctgtccgggtcaaggtaagaatatttgcggaaatcggtagcaggaatcgcgtcataaagtgaacgtgccatctggagcttagacaaagaagcatatccccaatccgcttcattggaaatgtgaccaatgaaattagcaagattacccatattggaagccgtggggtgaaggtaccacatccatgcagaagtagccgtattgaaaccggtagtgggattatgccactgtgattcgctcataggtgttgctcccgacttatcaatagccttgcgggcatactcggcagctttagcaaactgaccatcccacatatatactttggccttcagaccatatacgaccgccaagtcagggaagttcttactgacaggtgtataagactccaaacctatctctgccttgtcaaggtcggcaagaatgaaattcaccaattcttcgtgggtcgcacgcggattgctcttcgcaatgtcgttagttgttgcctcagtcacgatgggcaccgtcagccccagtaccttgctacaatcggtatagatgttttctaccggttcgaaaagtaccatcagcgtataatagtccaatgcacggaaagcatgggctatacttccaagcccacgcatttcatcggtaattgtgggatcagtcacatcaacggccgcaatcacgtcattggccgatttaacgaacttatatagggtgaagtaaggcaaatatgaataatagccggtgtcgttcataccattattggcattgaagcgccaccaccagtcatatccgtaatccgtagccacgacatcacccagcagttctgtctgggccaacatcaatgagggataagcaaggtcggtctcatgtgtttgcttaccgtacactagatagccttgtaccatttgcgatggcaagccattaagcgaagcctcaatcgctgttgccgatgcaccaatctgatcggaggtcgctgtagaatcttcgggaaaaacctcttctatacagccggtcaataccgtggccgatacgaccataaccgaaaatagtttgaatatattcttcttcataatcattgtaatctatatattaggtttagaactcaaatgacacaccaccggagatggtacgcatcggtgaatagaaagtagcattggttgtctcgtcgtatgactgacgtgggtcgaaccctttacgtttagaccaatagaaaacattttctgccgacatatacacgcgcaatgagttgatggccaactttcttgtccacttggaaggtaacgtgtagcccacattaatattctggatattcaagaagctcgcatttgtcaagaagcgcgtagacattgcccctgaatattggtcgttcatctggaaacgagggatattagtatttgtgttctcaggagtccatgagttcagcaaatccttatggtagttgtaaccagccgtaccataaggtgacgacataaagtaagcatacgtaccatcatattgcttaccaccaatctggtaagtgaagtttatgccgaagtccacgccatatactttcagtttggtaccgaaaccaccatacaccttaggtattgagctttcctctgtgatgtaatagtcagcctgagcatgattcgtagtcgtttcacgtccggtgatattgccggcctcgtccttgacattcttatagaacaaagactcacccttttcattcactccggcatactccttcaagcgccatgtaaacatagacaaatcctcaccaatgaagaagcttccgttagaatagcccttatatccttttccatcagctgtatactcagtagtaatcaacttatcaggatcaagcatcgtaatacggttcttcaaggttgaaatgttcacattcacatcccacgtaaagttacgtgtatcgaagatattcacattgaagtccatttccacaccactattgaccatgttaccaacgttgtccatataggaagcataacccaatgatggagccacggtaaatgagaacaacatatccgaagtcttacgtctgtagtactcgatactaccggtcacacggttccacaactggaactctgcaccgatattgaagttagtgttggtttcccaagtgatgtctttagtgcccttagatttaaatgaagtaccaaggctgttgttagagttgataatgttaaatctatccgtatagaggaagtcaccgatattgtcattaccttgtgaaccaatagaagccttcagcttcagttcctgcacccatgaagcatcaaaccagctttctttgttgataagccacgcaccgcctaccgaccagaatgtaccccagcgatggtccggatggaaacggctggaagcatcacgacgcaaagaagccgagccgaagatgcgttcgtcataattgtattgcaaacggccgaagaaaccttcattgttacgacgctctttataggaagaagcaccttgtccgtcgataatggcaccatccaattccttattgccttgagagaacatctgcgacttgctagccccaagttcatagtagcgataatcataatattcgtgacctaaaagaatatcgaagttattgtcgccaaacgaacgggcataagaaacaagttgttgcaggttgtaatcgtaagtacgtgtatgatacttactcactgtaccgccagtggagtcgaactgcccatagtaaggattgtaaacgtaactatgacgtgtctcatccaagttgaaagcaccattgaatgtcaccttcaggccttctataggagttatatctacaaaggcgttgccgttaatggcatttccttcagagtttctggtatttagtttattgtctagaatagggttggcatcagcaatgaaaggacgctgcatacctgcattgataccactaccgtagtccatcattccaataccattattatccaccatgatgctgccgtcagcattgcgcacgtaggcgggatagatgggagccatttgggtaacaaacgcccatatattaccggtagacgaactggtaccattgttactcaacgagttggaatcaaaacgtgcatatcccatattaccaccaatcttcaaccacttctttgcctgatagtcggctttcaaacggcctgtcaaacgtttcaggtcagagccttcagtgataccctcatttccaagataacctaaagaaacatagaaagaggacttttcattggctgcgctcaccgagaagttgtattcctgacgcagaccggtacgcattcccacatcttcccaatcatccggagtcagcagatagtcacgtcctttataattcacaactctacccaatgtggcgttgggattaagtttaccgttctgaccgatgaggaattgcccatcgggaactgtatatacattgtatcccaatccaccgttggagccaaacagattcttgtttgcctcaagccatgcagcttggtcattcattcccgttgacttataataattgttcatggcacgataatgcatctcgtagtacatgccaggattgtcaatcacttcatatttctgcaacgctcgagtgttagcaccccacttagcatcaaaagtcaccttagcctctcccgacatattggcccttttggtagtgatgataattacaccattagcaccacgagcaccgtaaagtgcattcgaagctgcatccttcaatactgtcattgactcaacgtcgttaggattgatattattaatatcaccgctataaggagcgccgtccacaataatcagagggtcattctttgcattgattgagctaaaaccacgaatcttgatggatgactttgaacccggagcaccgtcattggaagtcagtgtcacacccggcacagcacctgccaaggcatcagtaacattcgtcacttgcgactgctccagcttttcggtaccaaccaccttagccgaacccgtaaatgcagacttctttgctgtaccgaaagcaaccaccattacctcatcaagcatctcagtatcagacttcatcaccacttttaagctgggttttattgccacttcttgggtctgcataccaatataagaaatcaccagagttttcgcggaacttggtacgtttggtaatgtaaaatcaccatctacaccggtaatagcaccaatttgtgtaccttttaccaatacagaggctccaataactggctgcccgtcttcttcagaaattacaacacctgtaaccttctgggtttgggcagttactaggcctattccgacaaaaagacaggccaataacagcattaattttcttttcataaattctctcttaaagtttaactttacattaattgtttctttactctaacaaagtgcaaatatattaataaaactgaaacgaacaactattttattgaaaaaaccttgtaaatctatcaatttattaattaaacatactgctttatgcttaataacagatttttcacacttaaaaaaactaaactggcttatgtttactatcactatgattccctcttttaggatgatttttccaagaaatacacatattttaaaacaaaatggttaataaataagccgctaaaacagagaacagacctgattttgaaacaaattgagagttcccggaggctaaataccgattaatagctaaacacaaaaagacactttttaaagatattaattcttattctaatcccatcgagcacagaatatcgtcttatttgttattggtattaattaaaatcaagtaaaatgagtaaaattatttacaatctagtgtacaacagaaaaagaagcctgaataaaaaaggaatggcattagtgcaagtagaagcctatttggacagaaagaaaaagtatttttcaaccaaagtttatttaaagccagaacagtgggacaataaaaagcttattgtgaagaatcatcctaatgcagatgcgctgaatagattgatatatgagttcatggctatgatagaaaaaaaagagttggaattgtggcagcaaggaaggcgtatttcattagagttactaaaggatgttttgagcacaagcgaaaacaaaacctcttttattcctttttttaggcaagagatagcaaactctactctaaaagaaagtacaaaacgaaatcatctctccactctttcattattacaacagttcaaaaaggatgtaaccttttctgatttaacattcgaattcatatcctcctttgaatatttcttgcaatcaagaggttatcacacaaatacgatagccaaacatatgaagcatctgaagcgacatataaatgtcgccatcaacaaggattatatggagatacaaaaatacgcttttcgaaagtacaaaattaaaactatagaaaacaagcatacgcacttatctcctgaagagttggagaagttggagaaattaaacttggctggcagatatactaaattgcaaaagagtttagatgcattcttgttttgttgctatgcaggaatgagatattctgattttatcagtttatcacccgataacatcgtgaagattcgtcaagaaacctggctaatttataaatccataaagacgagtacagaagtcagattacctctttatctcttattcgaaggaaaagggcttgttattctggacaaatatcgggatgacttacaaagcttctttcatttaagggataactctaatgtgaacaaggatttaattgtgatttcccgcctagctggtttatcaaaaaaaatttcatttcacactgctcgccatactaatgcaacactattgatttataatggagtaaacattacaacggtgcaaaaattattggggcataaaagtgttaaaaccacacaagtgtatacaaatgtaatggatatgactatagtgcatgatttagaaaagaaccatgcactcatgcctttgcctaaaaaaacacgaacttagcatagccaatactacactttcatatcgttagtcatatacttctcctttaaagtctgttcactcactattcagtttcagcctgctcgctgcaaactcactgcatacgttttgcagtactactgcaaattgtttgcagtatcactgcatattgcttgcagccgcactgcatattagtttgcagtatcactgcaacagctttgcagtatcgctgcaataggtttgcaaagttttgcagtgagaaattgctgataatcaattaagtatagtatagtgtaaatagaagattgacattggtgtgttatcaatatttaagactgattggaggtgtggaagcaaattttgcttccacacttttgcattgcttccacagcgtctgtaatgccgatgaatagagggatacaaggagcgggtggaagtgtggaagcaaaaatgatgaaaactgttatgaagaaacaacagttgtcttgattgtttagctaatcacaaagttttgagtttactgttttttgaagctattgaaatattcttttacatagactttagtactttcgctaataaaatgacaatgtagagtaaatgcttcattgaaagcagctaggatgatagatgttgacaaaagatattcttcatataagaggaagaatcatttaaaatctttaagcaacgtattaactttatgatatacatatgataaccaagtcattaatccaacaaatagtatcacagcagtaaggttttatacattgtacccctatacatacaccttgtgagaaaggaaatttcgctatagtgatttctatcacatggtataatcgcttgattattaataaaataagagtgttgtagttccgcgaaaactctggtaatttcgtacatcggcatgcagactcaagaggttacaattaagccgcatgtacgggttgtcatgcagagtgatactgaacttttggatgaagttgtagttgttgcctatggtactgctacaaaaagatccttcacaggttccgctactgaaattaaaggagaccgtattgctaacaaaaatccgtccgaattatctaaagcgctaaccggtgaagtagcaggtgtacaagttatttcaactagtggacaacccggctcaaatgcaagcatcagaattcgcggtttaggttctgtaaattcaagccgtgctccgctgtatgtagtggatggaatcccctttggttcagatttaagtggaattgatccttcagacatagagtcaactaccgtattgaaggacgcaacagcaacagctctatatggttcaagagctgccaatggagtaattttgctgaccaccaaaagaggtaaaaaaggaaaaacgcaggttgaggcaaatgtaaaatatggtatcaacacccgtataattcctctttatgacacgatggaaaatcctgaaaggtttcttgaactgacatgggaaggtattaaaaacaaatatatgtaccgcgcgaacaatcctaaggatgaagctactgccaaacaatatgcaagcgaagacctttttgatgcagattacggtattgcccccgtatataatatgtggaaggctgaaggtaaaaatctgatagatcctgttactggaagaatgaaggcaggtgtagtccgcaaatttactccggagaaatgggaagattatattttccgtacaggagaaaaagtagaagccaatgttaagatatcaggaggtagcgacaagttatcacattatacctctttcggttacttgaaagatgaaggatactatataggttcggattttgaacgttttaatgcccgttccaatctgtctcaagaaatcacctcatggttgaaatcaaatgttaatatggcttatagctatatggaactgaataagcctggtcaaggtgacaacatgaacaatggtttccaattcattaattttatgccttccatatttccggtattccaacgtgatgcagatggcaataaaataaaggataatgtggtcggaggatatctgtatgattatggtatggctgaaggttatggacgtccttacgcttcaggcgtaaatccagccggagcgattcaattggacaagaatgagtaccagtctcattcattcaacggaaatgccatgtttgaagcaactttcttgaaagacttcaaaggaacggtaaactttggattgcaatatcttggtacaaaaaacaatgaattgacaaatccatattatggtgatgcagaggggttaggacgtattttcaaaaacatgagtacattcttcagcttcacgtcaaaccagatattgtcatggaagaaaagttttggtgtgcacaatctcgatgcattcgttgcgcatgaatctacattctacaagtcatctgacaactatggccagaaatcaaagattgttcgtcctaacaatacagaatggtctaatgctgtaattatggactatatggattctcaaacctacgggtttgacatggaaagctacttcggacaaattagatatgattataacgataaatatttctttcatggaacattaagacgtgatggttcatcacgttttgccaaagggcagaaatggggaacattcggttctatcggcgccgcctgggccatcactaacgaaaatttcatgaaagacgtgagctggttgaagaatttgaaatacaagttaagttggggtgtgttgggtaaccaagactttatcaccaatcctaccattgcaggttattatccttacaatgatttgtatacgatcggtaacctgaatgatgaaatcagttttagctttaaatataaaggtaatcctgatttgacatgggaacgcagcgaaacatggaatactggtatcgagtttaatatagccgatattttggaaggtgaagtggaatactacaataagactaccaaagatatgttgttcctaaagcaagtatctccatcgctgggatatgcacaataccccgtcaatgacggtaaaatggtcaataagggtctcgaattttctttggtggcacatcttgtgaaaacgaatgatataagtcttgatttacgtgttaatggtggacattataagaataaaatgacccagatgcctatggatgataccacaggaaaagaaaagccattggagatacaaggtgcttacggatggtcgaaaggacattctctgtatgatttctatataagagaatatgccggtgtagatccagaaaccggtatggcattatacaactcatactataatgtaaaagccgatggaagcaaggacttgattacagatatggtaacttaccagcaaaacaataagatagagcgtttggaagtagaaaagacctccgattataacaacgcaactaagaaatatgtcaggaaatcaggtattccgactttacaagggggattcggttttgatttagctgttaaaggtttcgaattaaatacgactttctcctatagcttaggaggatatgcttacgacggtgtatatgctacattaatgtctaacaatacacctggtagtggaaactggcataatgacattgaaaatcgttggcaaaagccgggtgatataacagacgtgccacgtttaacttccggatatgatgaatatacaaatgcatcttctactcggttcattaccagtcgttcttatttgaatttatccaatgtaagattatcctacacattccctaaaaaatggatgaatagaatgaacattggttccttgtcggtttatgtttccggtgacaacctgatgttcatttcggctcgtaagggatttgtctcaatggcaggaaataccgtcagtacagatcctaatgaggattccggaggctctgacagaagtcagtatgctccattgagtactattatgggaggtattaagattcagttctaacaataaaatcatttgaatatgagaaatgtaatatataaaatagcagcttgttctgcattagtagccttggtgctttctggctgtaaagaatcttttctggaggaagatccaaatggatatatttcatctgaccagataaaagaaaatgcagtgtggaatcctaatatcatgttaggtcaggcattaggtacgtattccacaacatttgcctggcagacaggcggtacgacgaatcacgacgatttcggacaaaaatccattgatattgccacagatttaatgagtggggatctggcaatgagcggagaaacctacggctggtttagcgatgcagctagattgcagtgtaatactaccacaaaaaatagaacctacatgctgtggaggtattattaccgcatcatcaaggcctgcaatgaaatatttgacactgtaggaggagatgaaagtgtaccggctaatgaggataaccaaaattattatgcacaagcaaaagctttgagggctcattcgtatttcaatttggtgaatttatatgcaaaaccttacgatattgataaaaatgctaaggccatacctctttaccgttctcaaaccacagcagagacattaggactctccacagtggaggaagtgtatgaacgggttattatcgacttgaaggaatcaataaatattttggaagagttggaatcagcaggtattggtcgtcccaacggcactaaggaccaaatcgaccaatggacagctaaaggaatacttgcctatgtttatttgaccaaaggtgaatatgagaatgctgctgcattaacttctgatattatcaataactcaggatatcctttgatgagtgaaactgaaattatcgaatctggattccggagtatcaatatcggttcatggatgtgggcatttgatattaccaaagataacaccggaggtttgcccacattctggggacaggtagattatttcacttatagctactgttctgcaggtgattataaaatgatagaccataatctgtataatgaaatacctgaaacagatactcgtaaacagtggtttcatccgtctgtattgattagctggtataaattttatgatgccggaagaaaagcaatgggagaccgtacatggacaaatgatattgtttacatgcgagttgaagagatgtacctgataaatgctgaagccaatgcacgggcaaatcatctgcccgaggcaaaagcagcattgaaggctctattagaacagcgggatcaggccacggctgcagaagtggacaatatgaatgctgatcaattactggaaaacatatactacaactggcgtgtagaaatgtgggccgaaggacgaggtttacttaccttgaaacgtttccacaaatcaatggtacgtggtgacaacaactacgcattgactggtgaaacaatctcatacgatgactccagattgatctttgaaattccagagcgtgaagtaacgaataatcccaatttgcagaaatgataaagtgccacattagattgtgcaaatcagatgaataaaagagggagagtatctaaatttagaatactctccttttttaatataacgaaatctggttcttgttgtataaagagggcaacacaaatcattgcagatgcactgacatatcaatcttatttagactgcttcaataaccatatttcaaagaatttatcgtaaaccttgtattctccaagttcacaagtaacaaaatccttgtccaacaatccttttatagctccttgtactgagctggctgtcaatttataggttttcaagaatctggaagaagttatttcccttgcttttccttctttgcaaatggcaaacaatacctccttttgtttgggaggaagttgataaagaagagaggaataagtaaaattcaactgagactaaatgttttcgatcgctatgctcactttgtctgccgtacaaatttcacctgtagctgtcattgcatacaatgagttggagatgaattgaatataccatgtaatgccctcaaaacgttcatatacgttctgaacagtttcttctgtaatgtctttattggctatgaggaaatgtttcctaataaactttgtgtaagttcctatgtctattggatgtaattccatgatggctgtactttgatagaaagggcgtgctggacttgtgaatatttcgcccatcatatgccgttgggaacctgcataaataaatcttgcatttgcgcaatgctgaatatgggtacgcaatacagcttcaatattttttccggatatttggcaatagcttgaaattcgtcaatagccaccaggcagggcttgtcggccttctccaaataataaaaaatttcatccaaagtaatagaaggagtttttatatctcccatctccaaattccaaccgggatttcctgcaaaatcaaatgaaattcccgcccgaagcgatgataagcaacttaaaaacaaatcccacgcttttctacctcgtggtttcagaccattcataattcctttgccaagctcaaaaacaaactcttgaagattcttagtcgcatatatatcaatcaagaaaatataatattccttttcgatatgttttttgatgaaaacaatgttctattaagcccgtctttcctaaacgacgagaagatattaaagctacattgttaccatttgtgatataacgggttaatgttccggtttcagctacacggtcacaaaaatattcagcggatatatatccattggttatgaaagggtattcttctccataaagtgaatgctttatacaaaaaaaattataatcttattataatgcaaatatcacaatgcttttgtatcgattctccaactttgtttcatataatctgtcagaggaaatctgttgatttactcttctcatattggaaattaaattatagatttacaatctttctttatcctctgccaacaaaaagtttcgcagtgaaatctgtttaattcctttgtaatttcccccgctttgcatttcatccattgtaactacatatttggggtaattgtctgctatttccaaaagattgccaaattctcgcctaacagttgcatcatcgggaagcatatatgctacttggatatagactttatggtcgtccttggaagcaatgaaatcaatttccttattgccactctttccgacatatacttcatatccatatcttaacaaatcaatgcatactacattttccattaacttgttgatgtcttttcgaaaatcgaaatgctgtatggaattatgtaatcctaaatcttcaaaataatatttctcaccaatctcaaagattttcatcccttggatttcagctcgttgaattttgtaaataaagaaactattgcacagtgcctttagatagttcagaattgtctgcgtaggaatgttgacgtgttgcgactttaaatatttactaatattctgggcagaaaaaagagaaccggtattatctatcagataagctacgagattctccaaaaaagatacattccggattgattcacgggcaaccacatcttttagtaggatagtagagtaaacatttctcaaatactcgaatatgacattcttgtccattgttagattatgaatgtatggcatacctccgaatgtaagatagagttttaaactttcggtggaatcttgacattgattgaaagttaagaattccccgtagctaagtgaatgaatgggaaattctatatatcttcctgccaattgagtagcaagttcactggacagcattttagcattacttccggtgcaatagatatcgcatttattttcgttcaataaactccgcagacacaattggaattcttcaatctcttggatttcatctacaaaaagatagttatgattatgcccagtaaccttctttaaaacatattgataaagatccatgtagttcctaatttccgtgaaggcaagttgctctttatctacaaaaatgatattggcttccggtatgtttttctttatgatatctgatatctgcaaaagaatgtagcttttacctatcctacgttggccggttattacttttattatacttttatcaataaacggttcaattctccttatgtataaagggcgggagatataatttttcatattcaaacatgatttagtttatatacaaagatataaaatatttcaattataattgaatcttgccgtatatattatatattcatcaattataaataacatatgtaaagcaaatatttctcaacaaaaaaatattttggaacttttatggataaaatttatctttcaagataaattcctctatataatctatcgttattcttgaataaaaaacatttattgggttaattagtacatcaccaattaaaagagtagaatgaaatgttacaataacgcgctcattatcagcttttaattattcaaaacggtatgaaatgggtacttcgagccacttacctccctttgccatatacctttatagataatatacaatagaataaactctgttctatagcaaacgtaaacaattgttttttagcaatatacacttattgtagttccgcgaaaactttggtgatttcttatattggtatgcagacgcaggaagtggcgattaagccgagtgtaaaggtgacaatgagaagcaatgcagaagctttggatgaggttgtggtagtggcatacggtactgctaaaaaagaatcgttgaccggttctatctcggtggttgacaataagaaaatagagaagcgcatcacaaccagcgtaaccggtgcacttgaaggtgccgcaccgggtgtacaagtgaacaatacatatggtgaacccggttctgcccccagcatccgtatccgtggttttggtacattggtttcaggtgcttcagatcctctgtatgtagtggacggagtccctttcgatggaaacatggccgaactaaactctaatgatattgaaagcatgtccatcttgaaagatgctgcttcggctgcattatacggtaaccgtgctgccaacggtgttgtcatcattacaaccaagagcggacgaaacactcacaaaccgagtattacgctgcaaatgaatcaaggtatgtataacagaggtattcccgagtacgaccgtctggatgcagaccgctggatggaagctacctggatggccaagaagaatgccatgatgagcaatgccggcatgtcggcaagcgatgctgccgcatatgccacgggacacgtggttagtgaatctatcggtcgtaatatctacaatgccgctggtgataagttgtttgacaataacggtaaactgattgccactcgcctggctggctatgacgacttggactggcagaatgccatcgaacgcacgggacaccgtcaggaatacaatctttctgccgccacttcgggagagaaatacaacgtgtattcttccataggctacttgaatgagaaaggatatgtaaaagccacaggttacgaacgtttctccgggcgtatcaacactacttatacacctaacaagtggttcaagggtggcgtgaacctgactggctcgtggaccaagcgtgactataacagtaatgccagtggcaactattacgccaatccgttctatattactcgttatatggctccggtctatccgttgtttatgcacaatgccgacggtacataccaactggatgccgatggtaacaaaatttatgacaccacctcatcttatctgagtaaccgcaacatcgcttacgaaatgttgtataataagcaggaaagtgtgcgcaacgtattgggcggacaagcttttgccaccatctcgttgccgtatggactttcattaactgtaaaaggtgacctgaacaacagcacttcgaacaataagaaatatgacaatcccgaaattggagacggtgctacgaatggcggtcgtttgacaagttatgcctaccaatacaagactgtaaccttgcaggaaattctgagctggaactatcaatttaatcaggtacacaacgtggaagctatggtggctcacgagaactatagttgggagcgcaagtacacttccggaatgaacaccggtatggctgtagacggaaaccttactatgggtaatttccttaacaactcttatttttccggaagtgatgatgaggacaagacggagtcttatctggcacgcgtaaagtataattatgacaaccgttatttcgtagaaggttcgttccgtcgtgatggttcctcacgcttccacaaggacaatcgctggggtaacttctattctgttggtgccagctggaacatgaaacaagaagctttcttgcaagatgtagattgggtggatgccttgaagttgcgcgcgtcctatggtgaagtcggtaacaatatgggcgtaagcctttatggtcacatggctctttataccattgacaagaacggtggtgaagccgctttggtaaaacaatcactttcagcaccggacatcaagtgggaaactacacagacggtggatgttgccgtagaggggcgtctgttcaaccgtctgaacttccaaataggctatttcgacaaacgttccaaagacctgctgtttgaggtacgcctaccgctttctgccggttcttatccttgggtcgatgatactgccccgatgaacctgacgcaatacaagaatatcggtaccgtgtccaaccgtggctgggaaatctctttgaatgccgatgtcatcaacaacaatgactggaaatggaacatcggcgcagacgctactttcctgaagaataaaatcgtgaaactgcccgatggaaaggacatcttgcatggtatgcaaaactactccgaaggacactccatctacgaatggtacacttaccacttcgaaggtgtggaccagatgaccggtacttctctctatacactggatccggacaagaaagccgccgcccaagaagccggtgcattgactaccatcaacggtacggactatgctaccgcgacttcatacgccaaacgtgactgggccggcagcgcacttcctacggtttacggttctatcagctcagctctttcttggaaaaactgggatttgaacatgctgtttacttattctttaggcggtaaaacatacgatggtagctatgccagcttgatgggtgtgtctgaatccggtgctgccggcagcgcttaccacaaggacatcctgaattcttggaaagaagttcctgcgggaatgacagaaacttctgccaatcgcattgatccgaatggaactccgcgcgccgacttttacaaatcgtccgacctgaatgccaccagtgaccgttggctgacaagctcttcttacttcgtattcaagaacctgaatctctcctacagcttgcccaagcgttggctaaaaagtgtaggtatagaaggcctttcgctgactgccggtgtagagaacctttttacattgacttcacgcaaaggattgaatccgcagtattccttcaacggaggttcggacgatacgtatgtgacagcccgtgtttataacttcggactgactgtgaaattctaaaggtataaccatataatttgtattagaaatgaaaaagattatcaataaattgttcgcaggaagcctattggcaggtatgatgctggtgtcttcttgcgccggtgactatctggatacagcacctactgactcaaccggagcaaccgatgccgtaggtaccacggccaatgccatgaaggcattgaacggtatcgccaaaatcatgacaacacaacactcctattttggaggtggatttgctggtgagaacaacataatgattcagtacgaaagctacccgagtgaaaattacaattacaattattacgcatccggatggtctcctatcttcaatcaagagttccacacacgtactaactccatttacgatgcttacgcatggtattactattataccatagcaggtaatgccaacaccattcttgccaatatagacaatgccgaaggtacggaagcggaaaggaattttgtcaaggcatctgcactgacttttcgtgcatacgctttcgaaaaactggtacactattattgctggcgctggcaagattccaacaatggcgcttcgcaggggatagtacttcgtttggacgaatctaccggtggacaaggttatgccacattagctgaaacgtatgcacagatttataaagatttggacgaagccatcatgctgtttgagcaaagcggtatggaccgtaatgcctcacaagtatggatgccgaacatcaatgtggcacatgccatctacgcccgtgccgctcttaccaagcaagattataccaaagcattgactgaagctaagctggctcgccagaactacccactcatgagcaatgcagaatatcatgcagggttctgtaatccaaccagtgaatggattttcggaagctttggtagtgcacaagagaataactggtattggagttatggtactcagtatgcatgcaacggatattatgccaatgcggcaggggcggcaaacggtgcaggctctatcggtcgtgaactgattaatcgcattcccaacaacgatgctcgtaaggcactgttcctaaccgaagacaaattccccggctataacttcaatgacggttcagccatggatttaggctacggcattcttggaatgggagatgatgagaaaaaagcagatgctctttgggaagaagcagctgcctattgccagaaaatggcggtcagtggcctggaagctccttatcaggctggttatatgtatctggggggacaactgaagttttatgtattcgacactccgggcgtcagctacctgcctttcatccgttcatcggaaatggtattggtagaggcagaggctaattatttcttgaatgacgagactgctgctcgtgccgcactggtagaactgaatgccacttccggacgtaatcctgaatacacttgcgacaagagtggcgaagctctttggaatgaaattatggactatcgcgaattggaactctggggtgaaggttttgcatggagcgactacaagagatggaaccgcgacatagtccgtcacagttttgccgaaggtggtaatgctcacatttccgttgcaaaaaccattcctgcctccggtgtcaacaaatggacatgggatgtacctttgaatgaaactgattacaacgatgagttgaatcttggaggaaaataattctaccggaattattctataaataaagtgttttttgagagaggggatgctataaagcattccctctgttattagaggagaacaataaaagcgtttccacactattctcaggatatttgcctgccatttggtattcatcaatgatcactagaggggagggctatctatatagcgcaagtgggaaaggcaagtactttgctccacctcaattcgtaaaacgtactttggtaaacagatatttcatcaagaagaaaataaggatagatgatatgtgagaaatgtggagttctcaaaagagtcctgtacttctcatacctgcggaacaatcaacttttaaaaaacaataactatcaattatccataatcttataaaaatattgtatgtttgcaattagataaatgcatgaatatggattctaaaaaacagctctacatcattagtggttgtaatggtgctggtaagactacggcatcttacactgtgctaccggatgttctggaatgcaaggagtttgttaatgcagatgaaatagctcgtggattatctcctttcaatcccgaaagtatggctattgaagccggacggttgatgttacaaaggattaatgaattgctgagaaatcaacaaaacttttctatagaaaccacacttgccacaagaacttacacccgccttgtccatcgtgcgcaagagcaaggatataaagtcaatttaatatatttctggttgagttcgcccgacttggctattcagcgtgtagcccaacgtgtacgtaatggtgggcacgacattcccaaagaggttgtgattcggcgttatcaagcaggtatcaataactttttcaatatttatatgccctgtgtggactattggctattggcagataatagcgagacaccccgtattattgttgctgaaggcggacgggggatggagatgcatatacatcatattgaacgatttaataaaatacaaagttatgtcagagaatgaaagaaaagaactgagcgaaaagttacatttcggtttggcattagccgaacgccgtatgcttgaagaaaaagcattgcgcaatgaatgcattatacaaggcttgcccaatggagaaattaaaagtgtacctgcacgtatcatgctgcgtaaactttatggagaagaactgaaacaataggagtatcctttcttcaataagcagcaaacctggattgcccgcacgatatgagagctagagtgggtcacaaaagcatattctgcatttcctgattatgataaaaatatctccacccaagcgacgtaatttcatgtagactatattttctcataataggtattcctcatcagaaaaatataatcccaaacaagaaaccaaaaacattgtttactacataaatctttggggaattaaagaactaaaccttgactgaacaatcgtttttccatccgaaaagggcaggtttacatttttgacatacttccaatagtagtttttcgcagttacagagttctttacttcaattacttttgtatttggaataaacaaacggatatctccatttaaaataaggacaattgcatagtgttctatgcataaaatggataaatgggtaagatggtatctatgtaacctttataatttcaataatattttatataatgctttacgttttcatggatgtaacaaacaatacaagtaaataattgacaaaaaacaactaaacgatagatgttgacataagcattcattcttaaaaaaaaagaaatcctaacgttatgattataacatattagtacagaatcagactattataaatcagcacattactattacaaatagtatcatataagtagattgtcatgtatagtgaacatgtatagagtatctcccaaaggggaacacttccttttgaaactttcttgaattattgtacctcctttattaccaacaagatacacatattgtagttccgcgaaaactctgctaatttcgtatgttggtatgcaaacgcaagaggtggctgtcgcaccttctttaagagtcatcttaaagtccgacagtgaaattcttgatgaagtaacagtcatagcttatggtactgcaaagaagaactcactaacaggttctgttgctactatcaaatccagtgatatggaaaagcttccagttacttcatttgaaaaagcattacaaggattgtctcctgggctgcagatcgcaagtgtctccggtcaaccgggttcgtctacacaggtacgtattcgtggtatcgggtctatgtctgcctcaagtaccccactttatgttatagatggagttgctattgaagctgcaaacttaagtgaagttgcaaataccagtaaatatgggacaagtgcaaatccactttcaaacttaaatccgaatgatattgagtctattaccatcttaaaagatgcttctgctgcttctctgtacggatcacgtgcggccaatggtgttattctgattacaacgaagcagggtaaaaaaggacaagccaaggttagctttaaagctcaaatgtcatcttccaaactcccttctggtggttataatttgatgaatgcctccgaacattatgctctgtattatggaggcttctataataataatattgctaaaggcatgtcctcagaagaagcttctgctgcagccaacaaatccacacaaagcatgtatgggcgaaatccatataatgttgctaaccctctggatgcttctggcgacttgacatctggcgctcaattgatgattgataccgattggttggatgaagtcttcagaaccgggatgtcacaagaatacgatatcagtgtaaatggaggaaacgagaaatcaaaatacttcatttctatgggatatatgaatcaagagggtattgtgattggttcggattttgaacgatattcaggtcgtgcaaatgtctcaacggaaattaaaccttggttcagtatgggtatcaattccactttctctttggcaaaacaaaacactcctgtaggtggaggtggtggtgctagtcctttgactaatggtattttcctacccaatgctgttccagtatatgatttggatgaaaatttccaaatgcaatatgatgagaatggcaaacctctttataacttcaagaatcccatatttcaggatatgaatgttatatcatttgcacaaactgacaaatatgcaactaacacataccgtgttttggtaaatccctacgtggatttcaacttttatggagttcattggaaaacaagtctttcatatgattatattaatttggatgaaacgcaatggtataatgcggagcatggtaatggtaaagctgcacaaggacgcttgtacaaatatgccatttggaacaacacttttggattgaccagtacattaaattataatttcaacataaaggaagaccatcacttctcggtattggctggttatgaaatctataataaagagtacaagcgcacttatgcacaaggaacaaaatttccgattggtggtttgacagagctgaatgtagctgctactccgcaagaagtaggttctgtaacagataaagagcgcatgctttcttattttggtcgattaaattatgattatcagaataaatattttgcctcattcagtattcgctccgatggttcttcacgttttgcaccgggacatcgttatggtacattttggagtgtcggattaaattggcgcgtcagcgaagaaaacttcatgaaatatattacctggatcgatgacttgaaactacgtgccagctatggtacttcaggtaacaaaacatctgattacttatatggttaccaagctttctatgaaggtggagccaattataacggagagtctggcttcagacattctcaattagcaaatcctgatttgtcatgggaaaaatccaaaaacttcaatgtgggattggattttgcagtacttaacagtcgcctgcatggatccattgactattatatcaaaaactctgatgaactgttattggaaaaacctttagccggttctacggggttggacataattatgtctaatttgggtggtatgcgtaactctggtatagaagtagatttgcattccctgaatattcaagccggagactttaattggggaaccgacttcaatatctcttttaacaagaatgaaatcacttcttatcccgaagaacaggaagttgttggtacaaaagttcgtacggtaggctacagcctttatgaattttacatgcaagaatgggccggagtagataaagaaaccggtgctccactttggtataaagacgtaaaagatgataaaggtaatccgacaggtgaaagaactaccacttcaacttactctactgcagacaaatacaaacttggttctgcacttcccaatgtatttggaggtttgaataacacatttacatttaaaggattagacctttcattcctctttacccttaattccgcaacactattacaaatataactttttaagtacctgagcaacaaaaagttgctcaggaatttgccatgtcagatttttcacctatcttagtgttgcaaatcaaaatatgtatcaaacccgacagacatggcaaaggtagcaattaaatccgagaaactcactccttttggaggaatattttcaataatggagcaatttgactccagactctcatctgtaatcgactcaaccctcggtatgagatgcaggctgtatggttatcaatacagcgaaatcatccgttcgcttatgagcgtttatttttgtggcggctcatgcatcgaggatgtcaccactcatctgatgtaccacctttcgcttcatccgacacttcgcacatgcagtgccgacacgattcttagagccataaaggaactgacccaggataacatttcctacacatccgacactggcaagacctacgacttcaacacggcagacaagctgaatacactgctcctcaattgcctattgtccacagggcagctgaaagagggcgaggggtatgacgttgacttcgaccaccagttcatagaggctgagaagtttgatgcgaagcctacatacaagaagttccttggttatcgccctggcgtggcggttattggcaacttgattgtcggcattgagaacagcgacggcaacacaaatgtccgtttccaccagaaggacacgctgaagaggttctttgaaaggtttgaacaaaacaagcttattatcaaccgtttcagagctgattgcggctcgtgttctgaagagatagtggaagagattgctaaacactgcaagaccttctatatccgtgctaaccgatgcagttcgctctacaatgacatctttgccctcagaggttggaagaaagtggaattgggcggcattgagtttgagctggcctccattctcatcgagaaatggaaagggaaggcataccgtcttgtgattcaaagacagaagcggatagacggcgaactcgacctgtgggaaggagaatacacctaccgctgcatccttacaaatgactacgagtcttccgagaaagagattgtcgaattctataacctccgtggagggaaggaacgcatcttcgatgatatgaataacggattcggctggaacaggcttccaaaatcctttatgggagaaaacacggtgtttcttctgcttatggcactcatacgcaacttctataaattcatcatggcgaggcttgacgtgaagaggttcggactcaaagcaacaagccgcatcaagacgtttgtctttaagttcatctctgtgccagccaaatgggtcaggacatcaaggaagtatgtgctgaatatctattcatgcaacaatgcttatgccaatgtgttccagaatgactttggataacaccgacaacttatagtcgtgattttgcgtattgcctcaagtcgcatggtggggtaaggggcatttatatgtctttatggtgacattcgatgcactgtgccccctttttactaacgatgcagattcttttcgcttctgtatcatattaggcgcgtagttgcggatttgaggtttacttatagttttggaggaaagatatatgatgcgtacgaagccaatttgctgaatgatggtaacaacaacggttatcaagccatcaaagatcaagcgaattattggacaaaagagaatccaaacgctccgaatcctgcattcttgcccaataacacttcaagttctcattctacatcaagccgctatttgcacgatgcagatttcattaaatttaaaaatatcaacttaggttatactctaccaaaaaaatggacacagaagatacagttggagacagtacgtttctttggaagtctggagaatatctgtgtatggaacttggatggtagtttcaaaggttacgatgtggaattgggaggtgtaaccggagtattggacggtgcaggtacggttccattgcctcgtacaatcttatttggtataaatgttggtttctaatttaaaattgagattacgatgaatagaataaagcaaactataatagcacttgcaataggtcttagcttagcaaattgcggtgatgattttttggatactacttcttcggaccaaatgtccgattctaacacctttactacgatagacggtgcgcagcaagtgttgaccggtgcttatgactggttgaccaatggctggttggctcatatgaccaaccaatatattttcttcttgcctgacattatgggagatgacgcattggtgacacctgaccccaactacaattatggacgttttgtgtctccttatcaatatacagtttctccaggaagtacctatactgatgacccgtggaagggatgttacagtatcatagataatacgaatgccattttggataatatcggaaacctggcagaaagtgcagagcgtaacagaattgaaggtgaagcgctatctctaagagcttatacttatcatttcttagtaagaatgtatgccaaacctgtgaacaagtacccggataatccgagcataattttacgtatttcttctggaacagaagaccttcctcgtgctacggtaaaagatgtttataatcaacttgtcgttgacatggaaaaagcatgtggattgttggaccagcattcttcttcatccaaggcatatatcggtgcgaatgctgctcatggaattcttgcacgtttgtatttggatttaggtgatgaaacaaatggcatcaaacatgccaatgctgcattgaaaggtgttaatttgatgaatacggcagtttacacagctgatttctgtgaagttaactcagaaacactttgggctttcgaatgtccaactgatgataatcaattctatctttcctcaaatccgcaactacgcgcctaatatgatacagaagcgaaaagaatctgcatcgttagtaaaaagggggcacagtgcatcgaatgtcaccataaagacatataaatgccccttaccccaccatgcgacttgaggcaatacgcaaaatcacgactataagttgtcggtgttatccaaagtcattctggaacacattggcataagcattgttgcatgaatagatattcagcacatacttccttgatgtcctgacccatttggctggcacagagatgaacttaaagacaaacgtcttgatgcggcttgttgctttgagtccgaacctcttcacgtcaagcctcgccatgatgaatttatagaagttgcgtatgagtgccataagcagaagaaacaccgtgttttctcccataaaggattttggaagcctgttccagccgaatccgttattcatatcatcgaagatgcgttccttccctccacggaggttatagaattcgacaatctctttctcggaagactcgtagtcatttgtaaggatgcagcggtaggtgtattctccttcccacaggtcgagttcgccgtctatccgcttctgtctttgaatcacaagacggtatgccttccctttccatttctcgatgagaatggaggccagctcaaactcaatgccgcccaattccactttcttccaacctctgagggcaaagatgtcattgtagagcgaactgcatcggttagcacggatatagaaggtcttgcagtgtttagcaatctcttccactatctcttcagaacacgagccgcaatcagctctgaaacggttgataataagcttgttttgttcaaacctttcaaagaacctcttcagcgtgtccttctggtggaaacggacatttgtgttgccgtcgctgttctcaatgccgacaatcaagttgccaataaccgccacgccagggcgataaccaaggaacttcttgtatgtaggcttcgcatcaaacttctcagcctctatgaactggtggtcgaagtcaacgtcatacccctcgccctctttcagctgccctgtggacaataggcaattgaggagcagtgtattcagcttgtctgccgtgttgaagtcgtaggtcttgccagtgtcggatgtgtaggaaatgttatcctgggtcagttcctttatggctctaagaatcgtgtcggcactgcatgtgcgaagtgtcggatgaagcgaaaggtggtacatcagatgagtggtgacatcctcgatgcatgagccgccacaaaaataaacgctcataagcgaacggatgatttcgctgtattgataaccatacagcctgcatctcataccgagggttgagtcgattacagatgagagtctggagtcaaattgctccattattgaaaatattcctccaaaaggagtgagtttctcggatttaattgctacctttgccatgtctgtcgggtttgatacatattttgatttgcaacactaagataggtgaaaaatctgacatggcaaattcctgagcaactttttgttgctcaggtacttaaaaagttatatttgtaatagtgttgcggaattaaggagaaaaaaggatggttacaagagataagctatatagctgcactcaacaatcaagctcaactattcacagatatcggcgattatgccggagcagtacaactatacgaaaaatcattagagctcactaagacaatatggggagataaacatttgcaatacttatgtacaatcatcctatggatagaaccctatatactcttgaatatcggaaacacaaataaacaggccatatttcaaaatcgggtaaaaaaagtctttattgatatccaggcacgctcactatcacctactgatatagctcaagaagtagatccggacaaattctatatggcaatagagaaattcctacatctatatttaatggacgcccctcctcaacaagaaaaacaaagccttaaggaatttatcagcaacctaataaagaatgatttaacaccgaatttaggagaagaacatcccatcaccatacagtacgaaaatgatttggcccatatcttatttcttcaaggaaattataaagaagccatcctaatcaaagaaaaactacttgagagttcaaaaaaaatatatggaacggttagtagcagtaatttagcagacatcggaacatactatttatacaacaacgatatttccaacagttgtatctactttgagcactgtctgcaacaaacacaacaacagatattctctgactttcgatggcttactgccaatgaaagagccttatattgggcacgatacaagaatatgattgaaaacatcatccccatgtcctataaagctcaagggtatgcacgcttcctaccattaagctacaatgccctacttttatccaaaggtatgttactcaattcggaaatagagttgcacaagctccttcaaagcaaagggaataagaatataagggaaaaactggacaaatggcgctcactgaacatgcaaattgaccgtttatcctcacaaacctcacgacctcaacctgaaatcatcgaaaagcttactgctgaagctaatgcaatagaacgcgacctattatcttcttccaaagaatttggagattacactcgtgcattggcaataacatacgaagacgtacaaaacagtctcggtcaaaatgatattgctattgagttcgcggctttttatactcaaccagactctttactttattgtgcctatgtccttgataaactccatcaaccccgtatggtcatactaggtacgcaaaaagaatatgaagctaccctaaaggaagcctattcaacaccggcattttacaacctcgtatggaaacctatcgaagaatacatgcctgaaaatggaaatatctatttttctgcattcggtatctttcacaaagtcggcattgaatacctacccaagacagaacaacgcaacatgatcagactttcttcaacgcgagaattggcactggcacataagaataatatcaagaagaaagcagtactttacggaggattagaatataatatgggggcaaaagatcgtgaccggatacgattagcttattataatagcgaaagcactcctgacttagtattcagagatgctcccaatatacaagacttacggcaaaaacgcagtaatctcagctatctaaatggagcagaaacagaagtattatctataagccaactattaagaggcaaaaagataactacactgttgcaaatgggtatggatggaactgaagaatcatttaaagcattatctggcaaacaaatctccttattacatattgccactcatggattttatgaagagccacaaccattcatctcaacatcaccgtatgacaatgattatagaactaaacatactgaagagaactctctttcacgctccggactatatttaactggagctgccgactatttaaccgataacaatcaatatagccctacagacatggaagatggaattcttactgctaaagaattgtcacgccttgattttcgaggacttgacttagtcgttctttctgcttgtcagacggggctgggagacattaccagtgaaggagttttcggtctgcaacgtggatttaaaaaagcaggtgcacaaactttattgatgagtttatggaaagtagatgatacagcaactttattgttaatgaccgaattctataacaaactgataaatggaaacagtaagaagcagtcactctataaagcccaacaatatttacgtacttatcaaaatggagtctatgataaaccagaatattgggcggcattcatcatgctggatggcataaattagaaaaacaatggcgatgaaagcatcatatattatatacatattattcatccttttaccaaatgttgtcaccatggcacaaagcgtagaatcagatgagctgttttctaaaggagtccatctatataatatgaagaaatacaaagaagccattcccattttccaagagagcgaccgattggataagatagagatggactcaactcataatcgacaggactattccgccatgtggcttgcaagttgccactaccaacttggagatgaaaaacaagctcaaaaaatatctccatattactacaagctctcccccatagaccgccgtctaaccattcaatcggactcgctatcagccttagcagataaagcattcgaacaccaggactatacaaaagcactgaaattatacaaacaatgtgacgctatagaagcaactattttaggcaaaaatcatatttggcgtatgacaacaatagccaatgaaggttattgttattcacaattaagcgactcaaccaatgctataaaatgttttgaagcacaccaggcagcttgtcaacaactgtacaatttagaatgcgatgccgcaatgaacaccctctttgccttggggcatgaatactacaaccatcaatttgaaaatcactaccccaaggcgttaaatgcttactttcaagcttacgaactggctaagaatctcaatgattccatcaattacaactcctccctatactgcatctctctctgttacttcagtcaatcacaagaaaacaacggcgatgagcaaggcaagtatcttgaaaatgcagaagtatttgtacgcgaactaagaaacgacaatgaagaagaccgatatttaaaaaatctaatttacgacaacctagctaatttttataacaagaaatcagaggaatacctgcaagattccatcacgctgcaacaagcgttggattatagccaaaaagcccttgaaacatatcaaaaaaagccggatgcagaccaaggcgtaaaaagactattagaaatatacaagatggattgcctgattcgctcaaacaaaatacaagaagcgatagaattgggagaagatttatatgcagctttcctacccatacgacaacaagagagtgaaaactaccagacactactacaaaatctatcctattcttataaagttttgggaaatgaagaaaaaaatatcttttacttaaacttactgagtacctcatacactcaatccaaccaaacacaaaacgaaaagatacttgatgtcttttatgagctatcgcaagcctactatagaacttctcaatacaaagaggcactccactatgctaaaacagccaaaaagatttgcaatcgggaaatataccctgaaaaatacccctacatattattcaatctagcacaagcctatttagaaaacgaacaaaccaacaatagtttagcatgtatcaatgagatactatctatcacacagccagatgtcgatatatatatacatgcgttacggttaaaaaccagcgcatacaactatatcgattcttcacaagcacttgacgcttgtttgcaatgtataaaacctgcaaagaagctatatggcgaacattcatccttttatcgggcattgctatatgacatagccaacctttattataacttgggagatgcatttagtgccttacaatatgcagaggaagagatgaggctaaatcagcaatatgcagacacattagatatcatctatttaagaaaccaaacaacattggcaaacttatatagtcactacgacctcggcaaaagtgcagcctatttcacttccgtagtaagaaaaataacccataacgaatttctgacagaacagcattggacttacctacaatggccgatggaaaagcgtatctcagagttattgttcctcatccaagtattcaataacatctttgataccataacatcgcttcccgatatggaaaataatcctgaataccgtacacaaatggacagtacacgaaacgaattcttaaggttatggaataagagtgcaagaaatttcgaggcgaacatacccaaaactacaagcaatagccatactttacgtgcttctatatgcaattctttagcaaccacctattacactttatccatgaaagacgaagcattagactatgctactaaagctatggtatatgtaccaagaaaaaacaaggagacttactcatccattctgtctgatgctgcatttatctactacaagtatggattatatgacaagatgattacccctctcaaaatcagccataatattgataagtcaatgttagtaaatacattcagaaatgttcccaaatctgtcagagaacgatatctcgcaatgatgcaatcctcttataactttattatagaagctgccgaacatactcagatgaaagagctttgcagtatggcctatgacgtaaatctgttcctgaaaggattaatgctcaacacagacattgaatttgaaaaactgatatacgagtctggcaacgactcattgcagacagcatataataaatggagagacctaagtctattcaacgatagactatcaaaacaagatacccaagattcattattctccgattctctgatgcatctggaacaagaactggaatatcgcctcatcagagaatcgaaaaaatatggcagttatgtcaaggggtactctacaacctggaaagagatatggaagggattgaagaaggatgatattgccattgaattctgtacatactattcgaataatactgaagaatatgctgccgttttattggagaaaaaaagcaagtatccaaccgtagttcgcctattttctcaaaagcagttatcaacgattccaactaccgattattacaatactacagcgctatccaatctcatttggaagcctctatatcattatctcgctgaaaaaaagaatgtctatttctcaccctcaggagaattaaacaatattgccatagaatacataccactaacagataagaaaacatttgccgaatactataatacatataggctatcgtctactcgcgaactcataaaaaataagagagaggacatacgaacaaaagcggttctttacggtggtctagaatatgaaagaggacaaggagacattgaggccatgcggaaagaactgcaaagtgcagaatccctaatagcattccgtgatgtcccggagatagactctttagtattacgcaaaggaatctcttttttggaaggaacagaacgagaagtgcagacgatagataccctattacgcaacaaacaaattccggtagccttgatgagcggcatggctgggaccgaagaatcattcaaacaattatccggtcaatccatcaccttgcttcatgtggcaacacatggtttctacagtccactgaccggccactacactgcccaaagaagctttgaagaacaagctctaagccggtctggtcgaggatgtaaattaaactgtgtcagcaaggaataaagtattaactttgctaacacagttttttttatgaaagaagaatttgatttcgagagtatcaagaacaaggccattgaacagctgaaagccggcaagcctttgttgggtaaggacggcgcctttgccccactattggaaagtatattgaatgcagccctggaaggagagatggatgcacatttgacagaagaagaacgccagatgggtaaccgtcgtaacggaaagatgcaaaagcaggttcagactcccttgggcgaagtaaccgtttccactccccgtgaccgtaattcgagttttgatccccagtttatcaagaagcgtgagactattctggcagaaggtgttgctgaccgtataattggcttgtatgcaatgggaaacagcacaagggaaatcagtgactggatggaagaaaatcttgggaatcgtgtttcggccgacacaatcagttccatcacagaccgtgtacttccggagataaaagcatggaaatcacggatgcttgattctgtttatcctatagtctggatggatgccattcattacaaagtaacggatgaacgtggctgcgcggtaacccgtgcaatctataatgtactgagcattgacagggagggacacaaggagttacttggaatgtatatatcaaggaatgagggagcaaacttctggctcagcgtgttgacagaccttcagaaccgtggagttgaggatattctcattgcctgtatagacggtctgaaggggtttcctgaagccattcaaagcgtttatcctaatacagccgtacagctttgtgtagtacatcagatacgtaactccatcaagtatgtaggatccaagaatcagaaggagttcttaagggatttgaaatgtgtctatcaggcagtcaataaggaatccgcagaaaatgagctcctcaagctggatgaaaaatggggtgaacagtatcctgtcgttatcagatcctggcaggacaactgggataagctgtccgaatacttccagtatactccggtcatccgtaagcttatctataccacaaataccgttgaggggtatcaccgtcagatccgcaaggtaacaaaaaacaagggcgtgttcccatcggatacagcccttgagaaacttgtttatcttgcataccgcaatatacgtaagaaatggaccatgccactggccaattgggctaccatctcgcaacaactggctataaagtttggaaaccggtttaaattattgtaattttacgctcgtcgggacgggtggtcccgccccttggcgcgggccgttccccgaccgatgagttttctagagataaataatgcgtgacacagtttattttacactaccgtctggtctgtttctgtccggagcagccgccagccttaacatgaagaaaatcccggaagatatagaagacggtatattgactgccaaggaactttctaagttagatctgtcaaacctcaatttggctatcctgtcagcttgccaaacggggttgggagagatcgtaggggacggcgttttcggattgcaacgaggattcaaaaaagccggagcccagacactcttaatgagtttatggaaagtagatgatactgccacccagctactgatggcagaattctataagaacttggtttccggacaaaacaaaagagcagcttttctaaatgcccaaaaatatctgcgtagctatcaaaacggaatctacgacaaaccagaatattgggcagcctttattatgctagatggaattcattaactaaatatttagaaacaccatgaaaagagccctaatcagcatgttatacttgcttacctttttaacaacatgtttttcacaaacagccacattgtcaaagaagatggcaacctatcgggatttttgtttgaaagtccgcgaaggagtagaactgaaaaatgtacaaaccttgaaagagtgtatagcagagtggaccggtgacatcaatactatcatatatcagaatgatacggtcagaattaccgactttgaccgattctccgtaacagatggcagtaacgaagtggggctaaacaaacacttactataccgtcccgaatttattgattcattgattgtctacgacataagctttgccaataactacattgagaaacccttactcttacgagcatcctacgactgtaaactcgtacatcgcgcgctggcaccacatagtaaaggtacatactcatccaaaggttccggaaagagagaacttctggttgtagcagagaatggtggcaccgtgaacctttacgtcaacgacgaaaaaaacggcatccatgtatcagacacatctcctcaaggaaaagccgccgcttgggtctgctgggagatggatagtttcggcatatatacaataaccgttgaaaacacttccgataaagagataagtttcgtgataacatccaactaattatgaaaatattcattgcattattactactgctgggcaatgtttatatacatgcgcaaagcaactacaatgaactgttcacccgtggggaagagttccgtagtaaaggtttatatacaaaagcacttccatattacgaaaaggcagaaaaggtagtaaaggccaatagtcataaattagccctatggagagtgatggcagaatcctataaagaaacggcagattataataaatctcgcttgtactacgagcaaatactccatacgttcaaaaactttccttacaaagacgacgtcttactgaatctcagtgacatttatctactgaccggctattacgaaaaagtcatcgagctactatctcctctcaacttaagaaaaggcgaagacaaacgcctgattaatctgtccaatgcttacgcacaaaccggtaactcccaaaatgcattagcacttttggacacagccatcagtcaacatgcaacaagcaaagacagcatcttcagaagtgccatccaaaataaaggatacattttgtggaatataaaacgccataaagaagctttcgagttattaagctccgctttgtctctatatacagaaaatgatgccgatcgctatttatgtttgggtaatctggccatcgtagaaagcgaattaggagattcagccaaagagcagtcttatttcaagaaagcgttggcacatatagacgaagccatatcctggcagcagataaatatcggaaacacccatccagactatattatctcattgcggaaaaaagcagaaatcctacttaagatgaacgctcttccagaagcaacaactcaattcaaaatatattttgagaaagaaaaagactacatcatctccaactttgcatacatgaccgaacaagaacgaattaacttctggaatacaaaaaagaaagtattggcagaatgttatgcaacggaaggctttgaccccgactttttgtttgatgtagctgtattctcaaaatctgtactattacaaaccaacatcaatatatggcaattggtatctggcaatcaagaatatacacaactttatgaaaggctccatgaactacgactgttactccgctcatcaaccggtaaagagagacaaactctacaaaaagaatatgaacaacaagaacgcctattaatgaaccgggtaaatgcttataaattctttcttgacaatttgaaagtcaatggaaaagacataagcagagcactgacaaatcagtcggacaaagccattgagttcatacaatatctcaagaatgacacaacacgttatgcagcattggttatgcagaaaaataaagcagttcgctttattcccatgttcaccttggaagaaatagaacaatacacaatacagaataagaagaacttcggtacgctaaaagaggctatatattccagaaaaatcatagataagaaccacctttattccgacacgatttctgggaaaaagatatgggataatcttcttggcgatacaccctccaaaactaatatttatttctcaccggaaggtatattccatctgctgggtatagaatacctctgctttgaccgccccgactgcaaaatattccgtctgtcatctaccagaagactatgtgaagacagaggaacagcatccaagccttctctgttactactcggtggattaaattacaatgatgactctgccgtcatacagcaccccgataccctgcctgatcgcagtgccagtgagatattaggtagagatatgttaccacccgtggtagggcaaggatatacatacctcaatggctcgctggccgaagtaaacaatattcgtacgcttatatcacccaatagttgccaactataccaatattccaagggaacagaggatatcgtcaaacaagatatgcagaaatacaatatgatacatatatctactcatggattttgtttcgactatcagataataccatccacattatacctcaaggataatgtttcagaagatttatccttgtcacgatgtggaatcatactttctggagccaaccggacagctaaacaagatgccaacaataaatacgtggaagatggcatattgacagcaagagaattatgtaaccttaatctaacacatgtggagctggctgttctttccgcatgtcaaacgggattaggtcgtattacggccgatggaattgcagggctgcccagaggattgaaaaaggccggtgccaacgccatccttgtttcactgtgggacgtaaacgaccacgcaacacagttactcatgacacaattctataggaacttgcttaaaggaaaaaataaaattgagtctttacatgatgcacaaacctatgtgcgtaattatgaaatcgaagtggagacgggagttggtaaacaacaatggaaatcccgggtcaggcaagaaatagacaaaaccaaagaaaaatctgcttctccgcaaaccaccaaaataaagaaatatcaagacccatattattgggcagcctttttcttgattgacgcgatttagaccatattatccagatatcacctccttggctatccacgcacaagcctccgcatctgccaatgcatggtggtgctgctccagttggtagccacaacaagctgccactgtgtgcaactgatagttgggcaatcctttcaggacgcgacgtgatacctgcaaagtacaatgaaactcataatccggataatccatgcagtaagtacggaaaacagctttcaagcagctttcatcaaaggccttgttgtgcgctaccaatggtaaaccttcaatgcgtggagctatttcctgccacacaacgggaaagataggagcatcctgggtatctgccaacgtcaagccatgcacgcgggtattccaataagtataatactccggctcgggacggataaggctataataatggtccacaatttctccatcgcgtacgataaccactcctacactacaaacactggtacgctgttcattggccgtttcaaaatcaatggctgcaaaatctttcatcctatcagagaatttaatgactcccaaagatagaaataatatttgcgcaagaaacatagtcaataaacaaatatgctactaactctaattaccagcgccttacctttaccaagtcgttactctattcggtaaaagcttttacttcatagtgtaacgaccattacctaagaatgtaaagcccgttaccccataatgtaaacacctttacagcctattgtaaacgcacccgtaatataaaaaagaactccgttcctttcatactacacctggtttccattatctttgtcccccggacaaaggctaaaatatcatggaacatccactttcgcaattcaaatattgtccgaaatgcggttcagcccatttcgaagttcataacgagaagtcgaagcagtgcgccgactgcggtttcgtctactacttcaacccctcttccgccaccgtcgccttgatactgaacgagcgcgacgagctgctggtgtgccgccgcgccaaagagcctgccaaagggacgttagacctccccggaggcttcatcgacatgaccgagaccggtgaggaaggcgttgcccgcgaagtaagagaagaaaccggcatgaaggtggcaaaggccgaatatctcttctccctacccaatatttacatctattccggcttccccgtacacacgctggatatgtttttccgttgtacggtggaggacaccttgcacttcgaggcgatggacgacgcggcagacctcttcttcctccccttaaaagatatccgtacggaagagttcggactcggctccatccgcaaaggagtgggtatcttcctggaagacatacggaagaacaaaagtgaatgattattcgttcctattatggtatatatcctaaaaaagccaaacaagtgtaacatttccgggttaaaacccgtatttttgtaaaatacctattttaacaaaagaagatgaaacataaaatctcccgaatattgtgcacagcactctgttgcgcacctttactcgcctcagcacaaacaagcgagaagagtacttctcccaagcgactctaccaggaaggacagacgttgttccaacaaaaggcatacgccgccgccatctccccgttgcaagcctatgtacgccagatgaatgcagacggcaagcctctgcccgataccggcgagcggcaagaagcggaatacatgctggtatgcgccgcatacgagctcagagaccccaaaagcatagacctgctccgcgccttcctagacgaatatcctgatactccccatgccaaccgcatctatgcattaatcgcctcctcctatttcttcgaaggcaattatgacgatgccctcgccatgttcaactccgcccgcctcgaccttctgggtaccgaggagcgtgacgacatgacctaccgccttgccacctgctatctgaagacgggcaatgtaaaggaagcagccatctggttcgagaccctgcgcagcaccagcaggaaatatgcagcggactgtgcttactacatctcttatatccgatatacccaaggacggtatgacgaagcgctcagcggtttcctgcctctgcaggacaatgccaagtacaagaacctggtcccctattacatcgccgaaatctacttgctgaagaaacagtacgacaaggcggaaattgtagcgcaaaatgccttgtcaacccaccccgacggtctgagctacacgcacacggcggagctgaaccgcatcctcggtacagccgaataccatttcgggaaataccacgaagccataaagtccttcgagcaatacctggagcacaatgccgaatctgccactcatagaagagatgccctctacatgctgggtatgtcctattatcaatgcggcgtgtattctcaagttcctgccatccttggcgaagtgactaccgagaacgacgctctctcccaaaatgcctacctgcacatgggactggcttacctgcaactggccgacaagaccaaggcacgtatggccttcgagcaggctgccgcttccaatgccgacccgaaaatcaaggaacaagccgcctataactacgccttatgcattcacgagacctcctattccgctttcggcgaatcggtgaccgtctttgagaaattcctgaacgaatttccaaactctccttatgccgagaaagtcagcaactacctggtggaagtatacatgaatacacgcagctatgatgccgcactcaagtccatcgaccgtatctcccatcccagcaaagccattctggaagccaaacaaaagattcttttccaactcgggacccagtcttttgccaacacgcagttcgaacaagccatcggttacttcaaccaaagcgtcacgttgaggcaatacaacctccagaccaaggcagacgccctctactggctcggcgagtcttattaccgcctgaaccggatgagagaagctgcccgcaatttcaacgaatatctgtcactcacccggcagagggatacggagatgttcgcccttgcctactataacctgggctacatcgctttccaccagaaagactattcgacggcagagaaccgtttccgcaactttgtccaactggagaaaggtgaaaacccgactgcattggcagatgcctacaaccgtatcggtgactgcaacctgcacgtccgccgcttcgacgaggccaagcaatactatacaaaagcagaaagtctgggaacacctgccggagactactcttactatcagctggcccttgtagccggcctgcaaaaagactattccggaaaggttactttactggaccgccttgccgtcaaatatcccaattcgccttatgccatcaatgccctttacgaaaaaggacgctcctacgtacagagcaacaacagcccccaagctatcgccgccttccgcgaattgctcggcaagtatcccgagagtcccgtcagccgtaaagcagctgcagaaatcggcctgctttactaccagaacgatgactatgaccgtgccatagaagcctacaaacatgtagtcacccaatatcccggaagcgaggaagcccgccttgccatgcgcgacttgaagtccatctacgtagatgccaaccgcgtggatgagtttgccgcccttgccgcccaaatgccgggagaaatccgcttcgaacccagtgagcaagactcgctgacttacatcgctgccgaaaaagtatatatgaaaggcgaagccgtacctgccaaagagagtttcacccgctatctgcaaagttatccgggaggcgctttcagcctgaatgcacactactacctctgcgtcataggcaaagagcagaaagatgacgaggcggtattggaacatgccggaaaactgctggaataccccgataacccatattctgaagaggctttgctgatgcatggagaaattctgttcaaccgccagcaatatgacctggcattggccgactacaaaaaattgcaggccaaagccaccacggcagagcgccgccagcttggcgctatcggtgtactgcgctgtggagcactgatgcatgatgatgcggaagtcatcaacgccgccacagccttgcttgccgaagccaagctgtctccggagctccggaacgaggcgttgtactaccgtgccaaggcatacctcaaccagaaagccgacaagaaggcaatggatgaccttcagctgctggccaaagacacccgtaccctttatggagccgaagccaaatatctggtggcattacaatggtacaacgccggtaattatgcctctgcagaaaaggaaatccttaatttcatcgaccagagcacaccgcatgcctactggctggcacgcagtttcatccttctgtctgatgtatatgtagccatggacaagaagctcgatgcacgccaatacctattgagcctgcagcagaactaccaggccgacgacgatatagcaagcatgattaacgaaagactggagaaattaaagtaagaaatatagcacattatgaaaaagatacaatatatcctcgcaggaactatgcttgtctccctctctttgggagcacaagcccagacacaaccccaagacaccaccatgaaccgtacggtagtcgtggaacaagaatataatccggacatcatggatgcctccaaagtgaacgtgcttcccaaggtggaacctcctaccgtcagcaaaaaggcggtggaatatgacgccaccctgatgccggcaacccatatcccggcaggtatcatgcaagcctataccggaaaagagacgcaggcgaaagcgctgcccggatatgtacgcttgggatacggtaactacggtaacctcgatgtacgcgccaactacctcttctctttatcccccaaagaccgcctcaacctgacattcacaatggatggcatggatggcaaactggacttgccggataatggcgggaagtggaattcattctactaccgtacccatgctgccatggattatgtacatgccttcagcaaagtcgatttgaatattgccggaaagttcaaccaaagcaatttcaatttcctgcccgacttcgtcagcaacaagcagaaattcgtttcgggtgatgtacatttcggggtaagttccacgagcgacgatatgcctctccaattccgtgccgaaaccaatttgttggtctaccagcgccaacacgacctcatggtgagcaatatcaaagaaaatatcgtgcgtaccaaagccgatgtcaccggttccatctccgatgagcagaccatcggcatggcttttgccatggacaatacattctacagcgacggacgtttcgagaatcacaccgacgtagacttcaatccatactatctctttcagaatgacgactggaaaatacgtctcggcgcacacgtcgacctggctttcggtttcggcaagaagttccgcgccgctcccgacgtagaaatacaatacatcttctcggacagctacatcctctacgcacaaggtaagggaggacggctacagaacgatttccgccgtctggaaaccattacgccttatggcattacaaaccagcaacttgacaatacctacgaacagctcaacgcagccgtcggcttcaaggcaagcccggtcagcggattgtggttcaacctatacggcgggtatcaagatttgaaaaacgacctgattgacactccgactgtcaagtccgacgggataagcaatgttttcctcacagaagacaccaagcacctctacgccggagccgacctgagctacaactacaaggatgttttctatctcgccgccaatgccgtctatcgccattggacaacggactcagacggttctgatgtcgtagtaagtttcaaaccggccgtagaaggcaatctcaatctcaaggtacgccccatctccccactgcttgtcggcatcggctatcagcacatctcacgccaaggcgtggagggcaacaaggcggaccccgtcagcaatctctatctgaacggcagctacgaactcttcaaaggtatctccgtgtatgcgcgcgtgaacaacttgctgaacaaagattaccagtactactggggatacccttcagaaggtctcagtttcttaggcggagtaagcttcctcttttaatagaggcagcacaagccgaagctctaatttgaacaaaaaaggtcatttttgctaaattctccttatattataaggtgggaagaatctttttttcctacttttgcgggcgaattcagtggcgggagtcactaaaaaacagaaatttatgcagaaaaaccttgtcatagtcgagtctccggcgaaagcaaaaaccatcgagaaattccttggaaaagatttcaaagtcctttccagctacggccatatacgtgatttgaagaaaaaagaattcagtattgacgtagacaaagacttcaaaccgcattacgagataccggcggataaaaagaaactcgtaacccagctgaaagaagaagccgagcaggcagaaaccgtatggctggcttccgatgaggaccgcgaaggggaagccatcgcatggcacttgtacgaagtgctgaaactgaaaccggaacacaccagacgtatcgtcttccatgaaatcaccaaaggtgccatcctgaaagcgatagaaaatccccgtgacattgacatcaacttggtcgatgcccagcaagcccgacgtatcctggaccgtatcgtaggttttgaactttcaccggtattgtggaagaaagtgaaacctgccctttctgcaggccgtgtacagtccgtagccgtccgtctcattgtagagcgcgaacgcgagatacatgcattccaaaccgaagcatcctaccgtgttactgccgtattcctcgttccggacactgacggcaaaacagtggaaatgaaagccgaactggcgcatcggctcaagacaaaggcagaagcccggaaattgctggagagctgtaaagcagctacgtttaccatcagcgacatcactacccgtccgctgaagaaaactcccgccgccccgttcaccacctctaccttgcagcaggaggctgcccgcaaactgggattcaccgtggcacagaccatgatggtggcgcaacgtctgtacgaatccggattgataacctacatgcgtaccgactccgtcaacctttccgaacttgccgtcaacgccagccgtgaaaccatctccaacctgatgggcgaacgttacgtacacaaccgccacttcgccaccaagaccaaaggagcgcaagaggcccacgaagctatccgccccacctatatggagaatgccaagatagaaggtaccccgcaggaaagaaagctgtacgacctcatctggaaacgtaccatcgcctcgcagatggcagatgccgaagtggaaaagacaaccgtaaccattgctatcagcaacgagacggagactttcactgcaaccggcgaagtggtgaaattcgacggtttcctccgtgtctaccgcgaatcatacgatgatgacgtagaaacccaggaagatgaggcacgcctactgccccctctgaaaaaaggacagaagctcgaacatgaaggtatcaccgctaccgaacgtttcacccaacaccctccccgctacacggaagcaagccttgtgcgcaaattggaggaactgggtatcggacgtccgtctacctatgctcctaccatttccaccatccagcaacgcgaatacgtgataaaaggagaaaaagcaggtgaagaacgcacctacaatgtgctcaacctgcagggtaatgaaataacggacaacaaccatacagaaatcaccggagctgaaaagtcaaaactgatgccgacagacaccggtattgtggtcaatgacttcctgatagagtacttcccggacatccttgactacaacttcactgcgagcgtcgaaaagcaattcgacgaaatagccgaaggtgacaagcaatggaccgccattctgaaaacattctataaaaaattccatccttcagtagaaaacacgcttgccgcgaaaaccgcccacaaggcaggcgaacggattctgggaacagaccccgtcagcggaaagcaagtgtctgtaaaaatcggacgtttcggcccagtagcacagataggtactgccgaagatgaggaaaagccccgtttcgctcaggtaaaaaaagaaatgtccatcgagaccattacgctggaagaagcgctggagctgttcaaacttccccgtactctcggagagtacgaaggtaagaatgtagtcgtaggtgcgggacgtttcggaccttatatccagaacaacggcttgtatgcctcattacccaagacaatggacccgatgactgttacgctggaagaagctattgaacttttgcaaaagaaacaagaagcagaagcccagaaacatatcaagaagtttgaggaagaaccggaactggaaatcctgaatggacgctatggcccttacatcgcttataaaggcagcaactacaagattcctaaagacatcatccctcaagacctaagccttcaggcttgtctggagattgtgaaactgcaaagcgacaaggatacgggcaagtcgaaacggactgcaaaggcggtgaaagcaacgaaaactacgaaaacaaccgccaaagcaactgccaaaacgagcaagacgaaataggatgaagccgatttactcttcctttcatatcggaagagtttcggacaatccgaaagaagcccaaggttcagagtaccaaaatacttttttgtacaaccagagttttcacggtatttgtcatctctgcatgcccgattcttcaggcacggatgatgcggataaagaaagccaatagtgccactgcaacatcactgcatatcttatgcagtgtcactgcaatagtgttgcagtggcgctgcaaaaggcgtgcagtagttttgcagtggagttgcactgattatcaacatcttattttacccacataaaatgagggaaaagatttatctacataaaatggaggaaaacactcctttagccagtttttgtaaaaaagccttgtgtcttcgttaaatattgcatatattcgccgtgcatgcaagatggataagtaaaactcaaccgtcaagatgcaaaaaagacaatataccatgaagcaaatcaaccttttatcggcactcctgctgctatgcctctatgcctgcaacaacaaaccatatcttcatactatgcaagtggcagataaattggtatatagtaatccggacagtgcctgcctattgctggaacaactccgtgacagtatcactacagaacccaaagccacacagatatattaccaactactgaacataaaggccagagacaaagcctatattacacatacctctgacagcctcatcctggaagttctgcattattatgaagataaaaaagacaaaacgcatttacccgaagcatattactatgccgggcgagtatatgccgacttaggagatgccccacaagcattagactactatcagaaagcagcagaactgttggaaggaagtacggattaccgattgcagaaagtgatttatagtcaaatgggagaattgttcctttatcagggagtatatgaagaggcgatgaaaacatacaaaaaagcttatcggtatagtgcattgaccaaagatgaaagaagtataattgtcaacctctgcaatatagggacaacttggatggctttcgataagcaagacagtattttacactattatacacttgcactagcacaagccgagaagaacaaagataaagaatcaataaccatgatgcactatcgcttcattgatctatatatccaactaaagcaatacgattcagccaaagccatattgcaaacggtcatactttctacaccaccacaagaaacagcgcaatatgcaaccgttgcagcttcatatcacgaaatggggaaatttgattctgcacagcactactataatatcatgctgaagagtgataatatctatgccctacaagccgctcattggggattagcaaaaatctcagaaagagattccaattgctcttccattttatatcacctccagcactacaatgaattgaccgattccatcaaaaacattacagacagcgaaagtatccgtaaaatgcagtcactttacaattatcaactacatgaaaaagaaagtaaccgattaaaaaaccaaagtacccgccaacagttctggatattatcttcactcttgacattaagtattctggtgcttgtcttccttatttatttttacacaaacaaacaaaagaaagcccgtttggagaatagcttgaaagagctgaaacggcaaaaagaggagcagtaccaaagaagtacacaatacattgaagacaataagcacaaaatagcgctattggaaaaagatttgcaaacaaccaatcagagcaacaatgctatgcaaaagctgctcttggcacaaaaagagcagatacttcacatgaactgcaaaatagaagcagaccaaaaagaacaatccttagccgaaatagcctttcgccaatccgatatttactgcaaattcaaagatgccgctaacgacaataaacctattgatgcccaagactgggaaatgctacgcatcaaagtggatcgttgctataaagatttcacagcacgcctgcaagccatctaccccgtaagcgacattgaaatgaaaatctgcctattactcaaaataggaatcaacgtaacaggtatcgcacagcttaccagaagaactaaatcagccattgtctctgcccgcaaaaagctgtatgaaaagacacacggggaagttggcaaaccggaacaatgggacaaaattattcagtcgttatagatgcctatataaaaaggtacagttatacacacaaaaatcgcacaaaatagcacgtcaaaacaagaaccgcacaaaaaccgcacagttcttaaatgagaaacaaattgaaatcccataaattcgcaaactaaaactcaaatacatcaaattatgaaacgtttgcttattattatttgttcttgccttctttacataggattatgttcagctaagacgaaaatatatttagagagaaagcaaaaaaacgcccaaacgcgttctttagtcacagaaccaacggccaaccacgaaggcaataccatctatctacaatccgatgtctccataaaggaacttcaagtaaccgtcaaagacgaaaaaggaaacatcatttcttcagagttcatttctctctcttcccagcaatcctatgctttttctataggaggtgcaaaagaaggaatttatattttagagttgaatgacggaaaagaggaatattacggctattttgaaatctactaatagaatcaaacatgaaaatagtttgaattaaaaaaacaataaacgagaactcaaaaacgcccaattatctacatctctaattaaatttgaaatgaagaaaatcttactcacactattaatatacatagcatattgtatttttgtacaatgcgaaaatgataagctacaagaaagtttagttattgccactatactttcaaaaactgtaaatacagtagaccctattacgcttaatgaaaacaaaaaaatgcaattattagaggaaaacagtaatgaaatagtattactttctctaaatgcaattaaagaatttacataccaagaaggatacgaatataagttaagcctattaaaaacaaaaattgaaaagccagaatacattgtagacgctccttcatttgaatacaaattattaaatacaatttcaaaaatgaaagtagagtagtaaactaacataccatacttcattaaaaaacgaaaatcatgaaaaagaaaatcattttttcaaactgtatttttttactttctttattagcttgtacaaatgagctaaaagaagaaacctcttctttaaatacaattcctattgatgtaattaatttagaagaagcatttcctaataagactaaagaaactgtgactttgcaaaatggaatatcattcgaaaggtataatgatttaattatttggggaggagatatgataatatccgaaaagatgtttaattcttttaataatcctactcagaccagaggcggaatcgttaataatccagactttaaatggcccaatgggattgtttattacaaatttgactctgcaatatcaaaaacgactaaagaacatattcaacaagccatggatgaatggaaacaatcaacttctaaaatcatcacattcacagaaagaacatctcaaaaaaattacatcaagttcatcaatggagatggtaattattcatcagtcggaatgagaggtggagaacaaattcttagcattagcaaatatgacagtaataaaggtactgctttacacgaaataggacatgcacttggattaattcatgagcagcaacgacgcgacagagacgaatatattaatataaattgggacaatattcagtctgataaaaaaagtaatttcaagatatgggaagaaagtcacgccgtgattaagtacattcctgatgtactatttgattataaatctataatgctatatccttcttataattcttttgctattgattactcgaagcctacaatgaccaagaaagatggttcgacatttaatgcacaaagaaacaaccttagttatattgatatagtagcaatttacgatatttatggtttccccactggaggaggaggtccttccgtcacttccatcaaataaacacttatctatcttgactactataatgaagaaaattacaatgtacgccacaaaacaaatttctatcacaagtatataaagaataagcccgaagaagtatcttcgggcttattctttattatagtgcggtgcttacattctgtcaggtacctcaattcccaataagcccatacctaagcgtaccaccttggctacattctcggacaatgcaaggcggaataccttcactgcttcgttctcctcacgcaaaatgctgaagtcatggtagaactgattatattccttcacaaggtcatacgtatagtttgcaatgatggacggactgtagtcctcacctgcctgcttcacaatagcggcaaagtcggcaaccatctgtatcagtccctcttccttctcactcagttcaatgccggcaggcaactgggcagggatttcgataccggcctcttttgccttgcggagaacagactggatacgtgcataagtatattggatgaacggccccgtattaccattaaagtcgatggactcttttggattgaatgtcatgttcttgcgggcatccactttcaggatgaagtactttaaggcacccagaccaacgatacgggcgatattgtctgcctcttcctttgtcagaccatccagcttacccagttcattgctggtttccttggctgtatcaatcatctccgccatcaagtcgtcagcatcaactactgtaccttcgcggctcttcatcttgccctcgggaagttccaccataccgtaagagaagtgcaccaaccctttaccccattcgaagcccagtttgtcgagcaggatggacaatacctggaaatggtaattctgttcgttgcctaccacataaatcatcttgtcgatgggataatctgcaaagcggagtttggcagtacctatatcctgcgtcatgtagacggatgtaccgtccgcacgcaacagtagcttgtggtccaacccctcacccgtgaggtctgcccatacagagccatcttctttccggtagaagaagcctttctccaggccctccattaccttctccttaccttcgaggtacgtgtttgattcgtaatatatcttatcaaaagttacacccatcatacggtaagtctcgtcaaaacctgcatacacccagtcgttcatcttcttccagagcgcacgtacttccgggtcattggcctcccactttaccagcatttcacgagcctccttcatcaaaggagattcagcttccgccttggctttggcttcttcctcattcatgccttcgctttggaacttggccatcagttctttcacttccgctttataatgcttgtcgaaggaaacatagtaatcgccaatcaagtgatctcccttcttgccggatgattcgggagtttcaccatttccgtacttctgccatgccaacatggacttgcagatatgaattccacggtcattgacaatatttgtctttactaccttattaccgttggcagccactatattagccagcgcatttcctaaaagattattgcgtacatggcccaaatgaagcggtttgttggtgttgggagaagaatactcaatcatcaccaatggagagttgtcagtaacagccacgataccgtactgcttgtccgcatgaatgccattcaacaattctatccacgcagaggaggcaatggtcaggttcaggaagcccttgatgacattaaatgctgcaaccgaaggctcgtttgcctgcaagtattcaccgatttcctgggccgtctgctccggtcctttcttggacatacggagaaaagggaatacaaccagcgtgaggtgtccctcaaattctttcttggttttctgcaactgcacttgtgcggcaggaacatcctgtccgtaaagcgctttcagtccgccgatgacggacgataccagtttctgttctatattcatgattcaaatgtattttcctgcgtgcaaagatagcgtaaaccgaaatcagtacaaaacaagcaggcttgtttttatggcctcacaagatattcaacatacaaagaggggacgctccttgtaaaacgtcccctctttgtatgttgagtatactgttcttattcagctgtcaattccgtacctggtttgaatttaacaactttctttgcagcaatctcgataggctttttagtagaggggttgatacccatacgcgctcctctttccaccacactgaaagttccaaaaccaaccaatgatactttatcaccggccttcattgccttagtgactgatgcgataaatgcatccaatgctttctttgaatcagtctttgacaaaccagactccgctgccatagcgctaataagttccgccttattcataatgcttaaaattaattaatatgttacacaaaagatatttttacttttcatcacaaacctccacaaaaatagagcaatatttctgaatatcaaataaaaacattaaaaaaatattggaaaacaacgaaaaagaaggaatagaatctgctttttctgttatagaacagaatttattcgtatttttgccggagaaagcaaaaacaggcaactgtttttgaactgtaaaatgaattgaaacaacagattatgaatactatacctactgtaaccaagaaccttttaatcattaatgtgctgatgtttctgggtaccatcgtcgcccaaagctacggcatcgacctcgcccaatatctgggattgcattttttccttgccgaagatttcaatgcagcacaattgataacatatatgttcatgcacgccggattcgcgcacatatttttcaacatgtttgctgtatggatgttcggacgtattttagagcaggtatgggggccaaaacgatttctgttctactatctggtgtgcggtataggagccggaattatccaggaggtggtacagtatattcattatgagacagtactttccgcctatgacagcgtaaatactggcatggccatcatcccgatggaggaatatctcaatatgatgactaccgtgggagcttcgggagcagtatacgccattctgctggcattcggcatgttgttccccaaccagcaaatgttcatcttcccgttaccggttcccatcaaggccaaatattttgttatcggatatgccttgattgaactttatgccggatttgcaaacagtgcaggagacaatgtggctcacttcgcacatctgggtggtatggtattcggctttatcctaattatgtactggagaaaaaagaatagaggaaatggctactattataactgatttgaaagaaaccttccgtagggggaacatttatatccaactgatttacatcaatgtagcggtattcatacttactacgctaaccgaagtcatgttccagttgttcaaccggagtatagcaggcgtattcgaatggttggaactgccggcatcagtcctacgcttcatcctgcaaccatggtcactactgacatatatgttcatgcatgcaggattcatgcacattcttttcaatatgctgtggctttactggttcggtgcactgttcctgagtttcttctctgcaaagcatctccggggtgtatacattctgggaggaatttgcggcggtctgctctatatggccgcctataacattttcccgtatttccgtcccatgacagactattctttcatgctgggcgcttctgcctctgtacttgccattgtagccgccaccgcctatcgcgagcccaactatccgatacggctactgctgttcggaaccatccggctgaaatacctggcactcatcgttataggcaccgatttactgttcatcacctccagcaatgccggtggacacatcgcacatttaggaggtgcgctggcaggggtatggtttgccgccagcctcagcaaaggtagtgacctgacctcatggataaacaaatgtctggataccttagtttccatcgtcagcttcaaacctagaaagccgaaaatgaaagtacactacggtactggcaaacaaaaagattatgattacaacgcacggaaaaaagcccaatccgacgagatagaccgcattctcgacaaattaaagaaatcgggatacgaaagccttactacagaggaaaagaaaagcttgttcgacgcgagtaaacgttaaaccaatggaaaatggaaaacggaaaatgaaaaatgagaatataaccgccactcttattttcagttttcacctttcaattttcaactattataatgaagcatctcggtaattttgtcgctctcctgattttagcggtcaatgccttatttacgggcctattactgttcaccgcctatagtccgcacatccagccggtcacacatccggtgcaatcgtgcctggggctgacatttcccgtgttcctgatgataaatgccggcttcctcattttttggctggtcatccagcgctataggtcggctttgctgcccctaatagggatgttgctctgctattcgcagatacgcacctatctgcccatcaacttccatacagaccacttaccggaaacaagtatcaaactgctctcctacaacattatgggatttgacggtgccgccaaacaagatggcaaaaacccgatattgacctatttgaaggaaagtggcgccgatatcctctgtctgcaggaatattccacagtacaatcctcaaagcatctttcgcaaaaagacgtagagcgggaactcaaggcatatccataccaccgcatcaacacagtgggtagcggaaagggacataccaacaagatagcatgttactctaaatttccgattctctcgtcacgcatattggattatcccagcgaatacaacggttcggtactctatgaaatcaagattggggaagacacggttaccctcatcaacaatcatctggagtccaacaagctgaccaaagccgataaagtcgtgtacgaagacatgctgaaatctcccgaaaaggaaaaagtgaaaagcggcgcacgcctgctcatacgcaagctggcagaagcatcggccatccgtgccccgcaagctgacactattgcacatgaaatagccgcttcaccgcatccttacattattgtatgcggcgatttcaacgatacccccatctcctatacccaccgcaccatcgcccaggatttggacgacgcattcacccaatcaggacgggggctgggcatctcctacaaccagaacagattctatttccggatagacaacatactgacaagcaagaacctgagagcctacaattgtacagtagaccgttccatcaaagagtcagaccactatccgatatggtgctatatcactaagagatattgaaaattaatacttaaccatttaatacttagaaaacaatgttcaagaaatgtattctaattttagcagtaagttgtatgatgtactcctgtgccacccagacggaaagcaatccgttccttaccgagtttcaaacacccaatggcgtgcctccattcgataaaatcaagttggagcactatgaacccgcattccagaaaggcatggaagagcaaaatgccaacatccaagccatcattgacaatacggaagcccctactttcgaaaatgtcattgttgcccttgacaacagctctcccaccctggaccgtgtaggtggtgtatttttcaacctgacggaggccgaaactaccgatgaactgacagccctttccatgaaactggctccgacattggccgaacacgaagacaacatctccctcaaccaggagcttttcaagaaagtggatgctgtctacagccagaaagatgctctcggcctgacccgcgaacaacaaaggctgctggaaaaaacccataagaaatttatccgttccggcgccaatcttccggccgacaaacaagcccgtctgcgtgagatcaacaagcagctttccacactcggaatcacgttcagcaacaacatcctgaacgaaaacaacgacttcaagctttatgtaggaaaagaggaagacctcgccggacttccccaatggttccgcgaaagcgccatggctgaagcccgtgccaccggacaggaaggcaaatggctgtttaccctccataatgcaagccgcctgcctttccttcaatactctgctaaccggccgctacgcgaacagatgtacaaggcctacatcaaccgcggcaataacaatgacaagaacgacaacaagaaaatcattaccgacatcgtacgcctgagacttgaaaaggcgcaactgctgggtttcgactgttactccaactttgtattggacaatacaatggcaaagaattccaccgccgtgatggacttcctcaacaacttgtggagttatgcactccccaaagcaaaagccgaagcagccgaactgcaaaagctgatggacaaggaaggcaaaggagagaaactggaagcatgggattggtggtactacaccgaaaaactccgtaaggagaaatataacctcgaagaagaagagattaagccctacttcaaactggaaaacgtacgtgaaggcgcctttgccgttgccaataagctctatggcatcacgctgacaaagctcgaaggtatccccgtctatcatcccgatgtagaagtgtttgaagtgaaagccgcagacggctcacaagtaggtatcttctatgtagattacttcccccgtcccggcaaaagcggtggtgcctggatgagcaattaccgcgaacaacaaggcagcatacgtccattggtatgcaacgtatgcagcttcaccaagcccgtaggcgacactccttccctgctgactatcgacgaagtggaaactttgttccatgaattcggccatgccctgcacggattattgacccaatgccagtataaaggtacttcaggcaccaatgtcgtacgcgacttcgtggaactcccctctcaaatcaacgagcattgggctaccgaacccgaagtattgaaaatgtatgccaagcattacaagaccggcgaggtcattcccgacagcctgattgaaaagatactgaaccagaaaacgttcaaccagggtttcatgactaccgagttgctggccgccgccatcctcgacatgaacctgcataacctgactgataccgaaggtcttgatgtcgttgcatacgaaaaagaagcgatggaccaactggggctgattccggaaatagctccccgctaccgtaccacatacttcaaccacatcatcggcggttatgctgcaggctactacagctatctctgggccaatgttctggacaacgatgccttcgaagctttcaaggaacacggtatcttcgacaagcagacagccgacctcttccgccagaatgttctggaaaaaggagacagcgaagactcgatgactctctataaaaacttcagaggaactgagcctcaattagacccgatgttaaaaaatcgcggtatgaagtaagatttgtgaaaaaaaagctatatttgcagccttgtatgcaacagaatttaattaaaaagtaatcataataaactaaaagtaacatgcaaaacaaaggatttgtaagggtttttgcgatattgctcacactggtgtgtgtgttctatctctccttctcttttgtaactcgccattacacaagtaaggccaaagagtttgcaaaaggcgatgtgaaagtagagcaggactacctcgattctctggctaatgagaaagtgtatttcggcaattggacgctgaaacaatgtcgtgagatggaaatcagtttaggtttggacttgaagggtggtatgaacgtcatccttgaagtttccgtacccgatgtcatcaaagtattggctgacaacaagactgacgaagcattcaaccaagcattggtcactgccgccaaacaagctaccacaagccaggatgacgtgatcaccctattcgtcagagagtatcacaagcttgctccgggtgctcctctttcacaactgttcgcaacccaacaattaaaagacaaggtaactcagaaatctaccgacgcggaagttgagaaagtattgcgcgaagaagtaaaggcagctgttgacaactcctacaatgtacttcgtacccgtatcgaccgtttcggtgtagttcagcccaatatccagagtctggaagacaaaatgggccgtatcatggtagaacttccgggtatcaaagaacctgaacgtgtaagaaaattattacaaggttccgccaatctggaattctgggaaacatacacagcaaaagacgttactccctatctgcaagctgccgacaccaagttgcgtgccatcgttgcaagcgaaactccggcagaagaggcagacagcgcagctaccgaagctcctgccgtagcccaagctaccagcacagccgacagtcttgccgctgctttaaagggtgaaaacaagacacaacccgctgaccttgcacaaataaagaaagaacacccgctgttcgcaatcttgcaagtcaaccccagcggacaaggtcctgttgtagcctatgccaactacaaggatacagctgaaatcaacagatacctttccatgccggaagttcaagccgaaatgccgaaagacttgcgtctgaaatggggagtatctccttatgaatatgatccgaaagctcagactttcgaactttatgccatccgttctacagaacgtaacggcaaggcgcctctggaaggtgatgtagtggttagcgccaaagacgaatacgaccattacggtaaacctgccgtaagtatgtccatgaacactgacggtgcacgccgttgggctcagctcaccaagcagaatatcggcaagagcatcgctatcgtgctggacggttacgtttactccgcaccgaacgtaaacaatgaaatcactggtggtaactcacagattaccggtcactttactccggaacaagcaaaagacttggcaaacgtgttaagatcaggtaagatgccagctcctgcgcacatcgtacaagaagatatcgtaggtccttcactgggacaagcttccatcaatgccggtatcatgtcattcatcgtagcattgattctgctgatggtttacatgtgctctatgtacggattcattccgggtatggttgccaatggtgctttggtgctgaacttgttcttcacgttgggtatcctttcttctttccaggcagcattgacgatgtccggtattgccggtatggtgttggcgctgggtatggctgtggatgccaacgtattgatttacgagcgtaccaaagaagaactccgtgcaggcaagggtgtgaagaaagcattggctgacggttactccaacgccttctctgctatcttcgactccaacttgacgtctatcatcaccggtatcatcctgttcaacttcggtacaggtcctatccgcggttttgccactacactgattatcggtatcttgatttcgttctttactgccgtgttcatgacacgtctgttctatgattatttcatgggcaaagacaaattgctgaacctgacattctcttccaagatttccaagaacctaatggcgaacgtacacttcgacttcatgggcagaaacaagctgtggttgaccatcaccggagctgccgtagttgtatgcatcgctttcctcgctacccgtggactgagccagagcatcgacttcaccggtggacgtaacttcaaggtacagtttgagaacaaagtggaaccggaacagattcgtgaacttatctccagcaagttcggcgatgccaatgtcagcgttatcgctatcggtacagacggcaagactgtacgtatcagcacgaactaccgcattgaagaagaaggtaacaacatcgactctgaaatcgaagcatatctgtatgagactctgaagccggtattgactcagaacatcactttggaaaccttcatcgaccgcgaaaaccatacgggcggaagtatcatcagttcccagaaggtaggtccgagtatcgcagacgatatcaaggtttcagccatctggtccgttgtacttgcattgattgccatcggtatctatatcctgatccgtttccgcaatattgcatacagtatcggttcagtagccgcattggcttgtgataccatcatcatcctgggtgcctactctatctgttggggctggatgccgttctctctggaaatcgaccagacctttatcggtgccatcctgacagctatcggttactctatcaatgacaaggtggtaatcttcgaccgtgtacgcgaattcttcggcctctatccgaagcgtgacagattccagttgttcaatgactcattgaacacaactctggcacgtaccatcaatacttcactgagtactttgattgtgttactgtgtatcttcatcctcggtggtgattccatccgcagcttcgcattcgccatgattctgggtgttgtattcggtacaatgtcttctctgttcgttgcatctcctatcgcttacatactgataaaaggcaaaaagagcagtgaacttaatgaagtttcagaataaaaggattttactataataatatccctaattaaggggctatctattttcgaatagccccttaattagggatattcagtaaatgtcataaaaaagtaagatggcatatgcagatgatttgctcctaccatctcatatgccattttattgtattttctctctctgagctaaaatcttatccgtttggaagaagcctaacaacttcctctataggatttctgttttcctgttccgtactttaattttcgatagtgagtaatactgtttttgtgtaccgaaacggccttcgagcctggtggctttgaaaattctataaacagaagttacttaacacctattcaatacaagcgatgatattcaattctaaaacttgaagcataattgtaaacttcagcatggccaagcgaagggttacatttgccaagttgagattgataggacccggtacctttcactgaaaagatctcttaatcaagcttcatatcagaatgagaaacacgagacctaaacaatgccagctaggcataaaactgattggtcatttcgactcctccttgtgattaagccatcagacaaacgttacttatgaacatttttaagtgttttcccagggacatcatgcagtttcgggcgacttggacgtacgttatagatgttcatccatttctcaagaatatcgcgtaattcttgcagtttctggccatatgagttttccattatcaggtttctcatttcccctctgtcattttgcatatcaaacagctgttcgcgatatcttcctttatcgtaaagcacatatttataacgttcgctacgtactacccagcccctcgtcttgctaccgtcaaaccgtgtttcggtgatgatatattcttgatgtaaagcttgcggatttccttcctctgcaattttccggaaagactttcctgctgctcccttcggcattttggcacctgcccagtcacacacggaggcaaagaaatctacaccgttactaataagctggggtaacactttgcctgcattcttcttgcctggcagcgttacaataagagggatattgataatctcctcatataaagcagacttctggttccaacgatgggcacctataccatcgccgtgatcgctggaaaagattaccactgtattttcccaaagattattccgatcgatggcatcaataatctttcctatttctctatctactttttctaccaagcgataataagtatatcggtacatacgccagtcttcgggggtaaaaccagcggttggatatacattgtagttattgattctttcactttcaatgacgtcagcatcatacgggtttttggcaaaattggcaggcaatcccggacaatcccgtatatcaggtatatcaatatttccataagggaagttctgacgacgtgcatattcgcagatattatgtgggttgtcataggaagccaccaaaaaaaacggctttttatgtttgcgcgagagatattcggcacaagcttctgccagcccatcatcactatgtttatatatattgtcgaagccatattctttgtctggaacttcgagtaaaggaagatgccatttaccgccataggcacaatcataaccggcattctttattaaagtgcccagtgtttgtgccttaagagagtcgggcatcggtgatccgttgacagacagccctactgcatccggatagtaccctgtaaacatagctccacgtgaggggccactgagtggagctgtacaataagcgttattaaatagtataccggccgctgccaaacggtcaaggttgggagtgtgcagatccggatttccggcacagctcatggcgctggccgtttgctgatcggtgaagatgtagatgatgttaggacgttcgatggcagaagccatagaagagcataacaacgaaaaacaagccaaatacttcattgaattttcttttaccatattatttcaataattcaattttgttttaaagtgatatcatatttcaagttccggtaaggcatcaaccagccttttttctactttctttccgtctacccgatctatgatggtcgtagcacctttgtttgagtcataattgaagtccagcgaaacaccgttctgtttattctctatatacaagaacgcattaccttcaccttccagattacattcgataacccattcttctactgttatgcggttcctttcacgattaattacagcatcggcacggttgtttccatgtacatcaatcacattgagaaaacagattttgctgcaagaagctgtcgttgctgtaaaatgataatgattggagagagttttgccaagtcgttttttccaatcaacagcagccacaaaaaaggtgtctgtttgcgcataagtcattttctgtgaggagaacagatgagctatagatactccgtctgccttgttctttcctaagatgcgcaatccgtctttctcttcagcgacttccatgggcagttctaccgtatgcagcagataattccattctaccggttctttaccaaccagttcgtcataaacaacgaacaaacccgaacgtcccagctgaacaatatgtcttcgaaaaaaatccagtttattctcatcccaacctttctccggtgtatactgagtaccagacaagcgcccacgttccagccacaacggagaaaccacttttccataagcgttagaagcatcacctacaacgtaggagatttcttctccttcataatagcgaggaatccatccataaccttccgttccaatcttttgtcccataccattcaccaatatggaattatgggcgcgagtattccgataagcatacatgcaatggtcatctgtaaagccggtacgatgtccactgctatagaaaattgcctttccaccaaagaaagtattgaaggcgttttgattagctaaagcatgggaagtggcaccataggggctgctacggaaagagagcatggcattgttggtgtgatgtcctatgtctgtgttcatcagtgcagtgcctgtctggctgaaaactttggactgaggcagctccaacagcttactactataagcaggcctctccttttttgtcgtacaacgataccaggtcaagtccgccggtttggcttcaaaagctttcgacagaatatcagggtcttcctgcataatttcgtgtacataagctgccgcccacggattgttacattcgcgtgccagcgcatctgcatatcctacgcgacctccattcggagtgcgctgtccctcatgcgaattgccatgtcctccggatttggaaaagggaggttgctggtaaatgacatataaagcattgttgttataccacggatcggcaaagaaattgaaaccggatatacgggagaaaaaggccggtacctctatcagtgtgcgtatatttacatgaaaatatgaatctccattatgccaagcaccatccttattcagtcccggaagacgggagatccattcattatagcaataatctgcccacacggatgcttccggaatctcaccaactgtggcaaaggccgccattgtaagaatgcggaaagtcatttgccatacatgattgtctgcaatacggttctccagatgattaacgtattcattatagaatttattcccgatattccggatattatctaataataactgtttttctgacggagacaacaggttgtagaacccgtcgtacgccgatgtgctcatagagagcaaagtggatagattgaagtcacctgcaaagtatttgcttgtttgccaggaaaggatttcactcaaccggttgatgccttcacgataatacttcttgtctttcgtcagcagataggcgcgtaccaatgcttccacattggcttcttctctatccacaatcttacggctctcgcggataagggctgactcacgctgtactacattggttaatgtaactacatttgttgtatctatctcttcctgaagatgcttcaacggatgagaaatgcaccgggaagctttgtccatataggcctgagcttccggattatttttattcttcgttataatttcctcccaatcatccgcatccaataatacgcgtgggtggtgagacgtatattttgccaagactttctccaatgtgggcggattaaattccggtgtatctttacctatatggaattgataaaccggtgaccattcttctttacctccaggagtgacgtaagcatattgccagtaccattttccctgagccaggcactggaaaggattgaaaaaagcccaggcgcgttccccaatcaacacttccttttgaaagttcttgtcctgagaaatacgaatccgatagaccactttcggtttttcatccacttgtcccggaactccatccaataccggacctaaatgcgggaatttatccggccacataaagcgcggcggattcatcttaacgcaagcaccattcgcaggagagggagttgcacgaacttcgtgcatcaatgtctcgccggaaactgttatgacagcagattgctcggaactgccacatgccatcaataggcaaaaggcgggtaagcctaataatatctttctcatctcagtattttatttttgtttttgaaaccaaccagttctttcaggctgactgtcttattgttgaccagtggatgtgcccaaaaaccgataaacgtaatatatcccatgaaaaccaagataaggagcattcctatgcgtaatgaagtggtatcggatagcagactgacaaacagcggacctcctgcgcctcccacaattccggagcaaagaataccggcaaaagaaccgtgattctgggctactgtgttcagagccagtgagaatacgatggagtacatcattgaaatgcagaaaccgattgccggaaatgcacataccgcaacttttgcagaaccgaacaatgcgatcaagagtaaactcatggaaagcagtcctgatatttgtaggagacgtttactgtctatcagcttcagcaagaacataccaaataggcaaccgacggtcatcgaaccccagaaataactgatactttgtgcaccgacagtttttggatcaatgccatgatactgttccaagaaggtactcataaaaatagagacaccctgttctgtactgacataacagaagattcccaaaaagaaaagccatacgtatttttgacggaacaattttttataggaagaggaggaaccactgcgttcatcatctttcaattcaatgcgcggaaaatgaacgaatgacacaacgagcagcatagccaacaacagtgctgtaaatacccaatacagagaaacccagggaagagtaaccggagtaacttttgccagaatatccagcaaaaagttctgtccctgctgataaacttccggttccagtgcatgtatcagccaagtgtaaaccaagggactgataaaagaggctactccgaatacaaactgtgccaactctgctataaacgcataattctcctctccgccgacaacacgttgcaaagggttgattacagtttgcaacatggccattcccaaaccaatgatgaaagaagacagaagcagtatcaggtaaaaagggaaacatgcaaacaaggtagtacctataaatggcattaggaagccggtaaatagcaccggcttttctccatatttatctattaatatacctgccggtatcgacatgatggcataggccaagaaaaaagaggtcggaataaaccctgccattgccagatccttcagttcaaagttatggataatgtcggggattaacggcccgagaatattcgtaatgaatgaaatagtaaaccaaaacatcatgattaatgtcagcatactccatttcttgttacttttcatgatatatcgttcattttaagattaatgatgccgctccgataaatccggctttattacccaatgatgcggctacaatttctgtatttaaggcacaatcggctataacatgctctcgaaccacttcccttattttctctaaatagaaaataccggattctgtaacccctcctcccaatacaatccgttgagggctgaatatattgacaaatccggcaattcctcttcccaaatagtaaaagtgttcactcatgcattcaacagccatcggaaaattttcatgatacaggcggactattagttctccgtttatttccatatcaaaactcagattccgctctttagccaacgtgctgaaatgccttaccaaagcagaagtcgaggcataatgctccaggcagccgatcgctccgcaggcacaacgttcaccgttagcaatcaatggcacgtgtcccagctccgtaccccgattggcatagccgttgaataatttgccatcaatgatgacggctccaccgatgccggttcccactgtcagaaacaccacgtgggtacaccccctccctgcaccatatttcgcttcccccaaccccatcaggttggcgtcatttccaacgactaccggtagtttcatctgttcttccaaaagagaagccacatctatgttttcccaaccgataatattttctgcacctcccaatacgatacggttcgtctcatctacaattccgggtgtaccaagcccaatgcccaatactgtccagttttgtttggcagcttcatcttttaacaacatgacagcttttatcaactgctctattacttttgcagctgaaacagaagcaaaagagggtaattttccctcaaagaaagaattacccgctttatccaccaaagcatattttatagatgtaccacctaaatcaatgccaattgcatattccatagtttattatatcaaataaggaaacattatgttctttctacccatataggagaactccatgcccattgctggtcacgctggcgaaccctgacatagtaatagtccgtatctctttcgggttgggtatcctccatataatgctcaaccgtaaagcaactttccggcattgcacggttgaagagaatagcctcactgagccaccctatcatgaaatgtgaacgggaaccttccaaaagttcacccaacgaatgctcaaatttcttgccattgaattcggctgtaatcacgccatctttaggcatagtcacatccagaatgacagcttgcgtggcaggagtcgtggtattggggtttttggaactgtacatatccaactctgtatccttgctcgtaacagacacaatacggttaacttttgtctcaaactctggttctcccggttgcggagaagtgaaggcagcgccacggaagcaaggttccactgcattgatagttcctttgtttatggacagctttccttgccaatgcacatactgttcttcgcggttccaaccgaaatcaacttttaccttgcaacgtaccatatctccttctggtatctcgggcaacaatgggccacttaaacgagcaatgcactttctgttcttaacgatgtcaatataatcaatacagctacctccctccacattcagataaatacgacggctatttccccgtacgacatcacccgggaacgcatcattcaaacgaaaatctatatttattttatcaccggtggcacagcagacatgacggttcttcatggcatcccagattttatcacggctcaacgattctgcaaggatacctatgcgaccgtcaccgtaactgcccggataacctgcatgttggtcggtcgaacccataataccgaatttcttaccttgctccaatccgcattgaatagtaccttcccattggcggggacccatgtcatgcagataactgtaatctccctgatcgctttctgccaatccatggcgggaatacatctctacaaacggggtctggtctccttccgtaaagaagttccaattgtatccgcgatagcctgtctgatatcccatatgatgcggagtaataaataccttatgcccgcgggctttccgtttccagtcttcaatggaggtacattccaccagcggtgcgtccaagtcataattcagagccacatggtcgccatgttccatgctgtgcgcctcataaccaacaaaagccaggaattctccttccttattgtattcattggtcatggcgacatatttctcataacctccctctcgcaaacgcttgaaggcaccggtatgataatcgatcacccacttcagacggggatcatcggctccgggaatatccggccacatggcatgaggagtgacagatacaaaatccagttgttctttggcagcctcaaatgcagaacgcatgtcgccatgaccgtaggttatgttacaatgattatgcaaatctccccagaaatacttcagattactggcagagggcatgactttctttcctgcggcagttccttgctgacatgcagataataggctaccggaagcggccagcccgacaagagaccagccggtatgctttaaaaaatttcttctgtccataatttaaatttagattatctgtttttcatcaatcgtctgtcacctttgaataactctttgaccttttcatcggggtcatcatccttatactgtttttgaatctttttcagcaatgaaatgagttccgcttgtttgtcggcatactccggtttaccaaacacactgttcagttcactcgggtcattcttcaagtcatacatttcccattcgtccacatcgttatagaagtgaatcagcttgaagtcagcggtacgaatgccgtaatgccttttaaccgagtgctctgccggatactcataatagtgataataggcggcttttctccagtcagccggtgttttccccccattctccagaatggtcctgagagactgtccctgaatatctgctggtatatctactccggcaaaatccagcagggtaggagcaaaatccacattcatggcaatagcgctcgatacactccccgccttgatggccttcggataacggataaccaatggcatgcgctggcattcttcatacataaagcgcttgtcgaaccagccatgttcgcccagaaagaaaccctggtccgaagtatagattatgattgtattgtccaattcaccgtttttctccagatagccgagcaaccttcctatattttcgtccacagctacaatagttgccaagtaatcgcgcatatattgctggtacttccaactgatcagttctttccctcttaagttgccgctacggtattctgaaatacgctgggcgtataccgaatcccacttatcttgtacatcagccggcatacgcttgtagacttgatagaggcgattggtcgtatctttcagcatttcttcacgggtcagcagtttcagatcccagtcattggtcaatgtatgctcgatggacatatcctgttctatagcagcagagcctctgccttcgtatgtatcgaaaagcgtagcgggttcggggaatacggtattgttgaacattcccaaatgacggggggcgggcatccagttacggtggggggctttctggtgatacatcatacagaatggtttgcttctgtctctgtgttccagatattcgatggccttgtctgtgataacgtcagttgtatagccttgctctacaatctgctttccgttctcgttgaaatcgggattataatagtccccctgttcatgttgtccggtcaggatgcaccaatagtcaaatccctgaggctcggtaatcagatgccatttgccgacaattgaagtctggtaaccagcggcctgcaacaatttaggaaaggtttgttggttgccgtcgaaagtgctggcattgtctgtgaatccgttgatgtggctgaatttgcccgtcaggatgcaagcccttgacgggccggataaagcattgaccgcataacaattgtccatacgaacaccttcattggcaatcctatccatgttgggagtctgaaggaaacgtccaccgtaacatgacatagcttgcgtagtatggtcgtccgtcatcataaagatgatattcggacgtttcacttcctctttgccggaactgcaagcggacattccgatggcagtcaaaggcagaaatatgtatgataaacgattcattataaaaatcttttataacccgttggcggaatttaagaaaatccggacgattgtgaactgcaataaggcacggaacagcaatctgcattccttacaaataatacagatgcaagaaatagcagtatactgaacctaattcagtcgtatattgaatgccattcagtcgtatactgaatagggttcaatcgtatactgaatgcaatgcatccaataggtactgataatcaaaatattacaaagcagattcataccttcaatatattacaacaaaccattaaagtatcattgcagtcattccgcagcggtaatgaattaattccgccaacgggttattatagtttatattccaattgacgtttctttccgccaacagatatttctattttcaccccattttcgtcaaatgccttgttcaggaacttagctttgaatatagggaaggaagctgtatttttcgacggataaagaatagttatgtaacgtacagcgtccgaatcctttttatctatatcaaaagatacagttgtacggggtactcgtaaacgataggcagttgaacgccagccttctttttctttcattgaaattttcttctcggcaaagcattgcagtttcacgttgcttgggccgtcataaactgtagtcagcatattattctttctgtctatatttacagtaccttcacacaaatggtagttcagattcactactccttgggcgtttcccacggcttcatctacaattacaaaataagattggtctacaaagaaaacagaacgtctgtgtttcaaaccatcataatgcggattctcagtcaccagaatctgctcattgccttcgggcttccatagtttggtgacagactgggttgtttgcaggtttttcccatccaatgtcaacgtattgtgagaacttgtccggcgaaaccaattacgaagtttcattacttcatcatcaccggcatagacgtaggaaccgctatccgggaagagattccggccattgaaccaaaactcaaaagttccgttgtccggctggcagtgccattcccctttgggaccggcctttacaaccattacggtagcatcctgcttccagccgtttctgaaagtaaagaagccggaagtctgcgcaccgtgagaaaggttgggcaagggagcgccttcacgaccttctgtggcataataacgaatccactcacaatcaggaaatagcttgagccaatcctgataattacggatttctgccggacggtctcccaacttggcatcactgaaacaaggattgctgtaatccggaaaacaaatattggcataaaactcaatcatgctcttgactgtattcacgtattcggctggaaattcctgacggaagccattaacatccgccatacgcaaagccttgcagaaaatattgattgccgccagatgataatgcgggtccaattcatattgaccaccatccggatagacttgttttttaatttcgcggttcaaaatgcttatcccactttttctccattcgcttgcttccttaaattcggggaaaaacgcacccgcatataccatgcgctgagcttcaaacaacaagtggttaccctgatccgagtaattgccaagaatatgcagtgcatgccggtgataattaatcagaaattcagtcaagaactccggagtgaaagcctttgaagaaacgaacaacaggaattgcagcgtttgatcctgcaaacggttgctcacctccagaggacgccatgcaaagcgtacattttccgcatttccctttacctcgcctgcgctgaccagttcgtattcttctttctctacccctgtcaaaggattctttttaatccaatccatatattggtatgcccattctttagcatatttctcgtctccagagattcgatatgccttacccattggggtgaaccatttgtggcggtgcaattgccagcgcaactcattgtcttgtaccggccaatattgccagttgatatctttgccgtaattataagaaggctgatatcctttgtgcacaaaaaacgtatgttccaaggcatcatccgcccatttctgttcttccttggagatcttgatattctgcatatcgatatcgggatgtcctatgccggtacgttggcggtaatagtccaataaggctttggcagcctcatcccattgttgtcggtcacatgcagctttcactctctccaatcccggataatccagattcagtaagtcgaaagcttccttccgcaactgctgtgcttccgcacataacacaaccagcagaaaagtaaagctaagaatatactttgttatcttcatggtatattaattttgtttatagcgatttataatcaattccttttacttgcatatatcgggttaaagcctccagatagtaataatcggcataattgataggtgtatcaatttcagaaccattaggcaatgaacctgtagagtgcatcaggataaatccctggttagtaccaacctttgccaagtaaacgtcggaagaaagagacttaagcagtttctcggcgtaatcaaaatagacttgtccgtcgtctacaagagtactgagttctatcaaggcagaagctgtgacagaagcagcggatgcatcacgaggtgtttccggtacgtccggagcatcgtagtcccacaaaggaatcgcatcgtcagtctttacacgttccatgattaatgccgcgatattttgagcctgctgtaagaaagctgcatctttcgactcgcgataacaagatgtatatccatatactccccaagcttgtccgcgcgcccatgaggaatcatcatttttcccctgatgcgtacatttcatttctacgctgccatcgctattgtagcttactacatggtaggacgaatgatcattcctaaagtggtttttcattgttgtctcagcatgtttcaatgcgacttctttatacttgggatcattcgtaagatgattgacgtaaaacaataaatccagattcatcatattatcaataatcacagggaaattccacttcccaaaatcccaggaacggatacagcctatgttcgagtcgaaacgaccgcacaaattatcagcagtctgtaccaatatctgacggatagtgtcggcaggagacagacggtgcgcattaccataactgcaattcaccatgaatccgatatcgtgtgtacctttataatctttcaacggatataggtaattcgtaaatttcaccgcatcttttttcaagtcttctataccagtcaactgatatgcgtaccacaagtttccggggaaaaaaccgcttgtccaatcatagatggaactgcaatatctacggcttcccaaggcatctttcacaggtttcatccgcaaggagtctttaaaagttacaggctctctttgtaactggctacagagaaaatccatatcgtatcccgtccagatggaacggggcaacaagactgaatcccctacatccgccactgtttcttccagttgttgcacagaagtgtctatcgcgtttttcaaccagccgtaatcttcctttggttgactgggtgaacagccagagaatccctgcaatgtagcaactgcgtaacaaaataataaaaatttcttcataaatatatgcatattctataggttatatctgctcaaattatcatccttacatacaaggatggagaaacagtaagatgtttatactttctccatccattgtcagttcatacccagaaaatgaaattactcaaatcccggattgttttctccattcaaagccgcgttcgattggatttcggccaatggaatggggtaaagttcatgcttgcctgtggtaaagttgtggcctgctacgtaattggacttagcccatttcaccggattccaatctttacgtgcagcatccgttatatattcatctggtcccggaatccatgattccatgtagttctgagcagcttttaaagatgcttccagaataccccatcgtagtaaatcatatttacgttgaccttcgtagcaaagttcaaaagcacgttcccaatacaatgctgtacggaatctgccggcatcatcaccatccggaataaatggcaaatcatacaatttcggagccttcaacaagcttgaataattggctgtacttataggagtagcaccggcacgtacacggacgtcattcaatagtttccatgcttcggttgtgttgccgatttcgttataagcttcagctgccatcagaacagcatcagcataacgcaacggagcataattgacgcctgtattgttgggatccacaaaacccggagccatccattctctgcgccatttgcccggatatctgttcagatttttgttgatatcggcagaagtatgcgatttttcctgagtttctttatttttgtcccacttgatagcataatccacgaaattcacgtcacgacgtacatcttttatgcttccatcctcatttgactcatagaaagacttccaatatggtaataccacaaagaaagcattggcacgtcccatataactgcttgtgccgggataacttcccggagcatctacaagtggtccgttgtaagttgcccatacaccggcattgtccttcaaaccttggttgggttcgaaagcgatctcccaaagagattcctgattgtccaatgtcagctgagaatagttcttaaacagttgctcataaccacctgcataaaaaccatggtagccttcagccttcagagcttcccattctttaatcaccgcttcaaaatatccctttcgggtagtatcatccggacgggtcaattgacgcgatgaacagttcaggctatagccagcgcgttgcaaatagacacgcatcagtaaagtatgggcagcaccgctacaaggtatttcagaagaagccacttcacgaccagatttcaaatatgtttttgcataattcaaatcttcgatgatttggtcataaatcagctcacggtcggtacgaggtttggatgtattagcaaaaccattcgtatattccgtgctgaacggtacatcaccaaagaatttcactaggtcaaaagctatgtaggcacggaggaatcgagcttgcccgtcaatttcctgcaggtttttgttttctgcaaaacctgacatagcctcgatgctggcaatagccacattggcacgatcgagagcttggtaagcacatctccatacactagcaatccaagtattagaagcattgtacagatagtgggatatgtcacggcgagttccgtccgaaccggttccacgtaccatgaacatgtcgtccgacccaaagaacggcatgatattttgtccataatagtctgtagtttcaagacagtcatagattccgactacagccatctgggcttttccttctgtcacgaaataagtatctttctcgtagaatgagctgggcttttcagtcaggtcacaagaagtaacccctacaagcatcattgcgccaagcgcatatatcattttgtttttcatcttattattccctttttaattctaattaaaatgctacgttcacaccaaatacgaaagagcggcttctggggtaagcaccgaaatcgacaccgggagttaacgcgctactcatggtagatacttccggatcgaaaccggtataaggagtccatgtaaacaaattattgcccgttgcatacagacgcaatttggtcagaccaattttatttatcactttcttggggaaggtataccctaaagtgatattactcaatttcaaataagaagcatcttcaatggcccaagaatgaatgtaggtgttgttggatccgttatcaccgaaatgagctactgtttttccctggttcactgctgccagttcttccggattcgtaatcagttcaccattggcattaatagtcacccaacgatgagcatcatcagctaccgacagaacgtttttattagtaagggcagtcttggtattggtcaacttagtagcattcagtacttccgcaccatagctgtaagtaaagaagatgctcaagtcaaaatccttccaactgaaagtattgttgataccgccatagaaatcaggcaaggcattaccaataatggtcttatcactttcagtaatttggttgtcttcactaccgtccacgttcttaaatttccagtaacctggctggatattcttcttgtcgccatgataaggtacaccgtccttcaatgtataagttttggttgtagcatcgtaattgaagtcttccacctgatacaatccgtcagtcacataaccgtagaattgtcccaatggttgatttactccaatctgatgggatgcccccgcaccactataaccaaagttggccagatacaactgtacatcttcacctgtcagtttcttaaccttgttcttgttgtgggagaaagtaaccgaagtgttccaagtaaaatctttggatacgatgtttgccgtattgatagtcaaatccacacccgaattttgagtttcgcctgcgttgataaccatactagtataaccggaagagttaggcagtttggcattcagcagcaagttgctactgcgattgatgtagaattccggcgagaatgtgatacgctggttcaagaaaccaaaatctattcctacgttgaatgtcttatttgcctcccatttcaaatcgggattaggcacctgacgagaagcatagcctgcttgtgcaccgttgccattggcagcagtaacagaattcataagagcaagactttgataactaccaatacgattgttacccgcaagtccataaccgatgcggaattttaagtcggagaagattcccagatccttgataaattcttcttcgcctaaacgccatgcagccgagaaagccgggaaatatccccacttgttgttcttaccgaacttggaagaaccgtcagcacggactgaagcagtaaaaagatatttatccatcaggttgtagtttatacgtccaaagaaggaaagcaatttatcatcgtagttttcactggaagtgggaacacctggaacacccagtgagaggtctcccaaacctatttcatcattcggaaactgactggcacttgcagaaaagctgcgtgaccatctttccacatattcatgtccggcaatgactgtaaagtcatgaattttgtttttccaagaataggtcaaaacattggaagtctgaaaactgctattttccaaattagtaattgaaccttgaatactggaacgcttacctgtaatagactcatcaccatagaatacatcattacggcgagtctgatagcgcatacctaccgtactacggaaagatagtcctttcagcagcttaatggtagcgccaccattggcctggaaagtacgccattccctatcgttgagctcttctgctgccgaaatcagcggattctgcataacgttgccattatcatctgccaacagaggatcttcgccgtataataaatcttcatctacccccataatacctactgtaggacgatactgcaagatgtgctgcatcttgttgaagcggtcaccaccttctgatgtacccatgccttccacacgcatctggtcgtaactgatacgtgaatttaccgttaaccatttgtttatctcatgattcatgttgaatgagatgttatgctttttactaccgctgtataccatagcaccttcttcgttgtagtatgagtaagccagactgtaattcatcttctccgtctttccggatacacctacacgatagttttgagtaatagcattacgacccaaggtttcatcttgccagtcgatacccttgcgaccattatatatggaagcgagatcgctgaacttaccgtatctctcttcccatttggtcataccatccgcaccggaatctcctgtacccattctccacaatgtacgttcgtaatccaatctggcaaattcaccggcattaagtacatccaatttgtttgcaatctttttgacaccgacataactgtcaaaagtcactgtagccttgccacctgatttactaccattcttcgtagtgattacaactacaccattggcaccacgagcaccatagatggcagtggccgaagcatccttcaacacgtcaatggtttcaatttcagcggggtcgagggtagacataccgtcttcactgggaaagccgtcgataatgtaaagaggttcgttactttgtgtgatagagatacctccacgcacacgtacggaaatggaagcacccggagtaccttcactctgctgcaccatcacacctgccatgcgtccggtcaaggcttgtgtaacatcacttactggcactttagaaagttctttgctgctaacggaggttaccgacccggtcaaatctctacgaggaacggcagcataaccaattaccacaacgtcttccagtaatacggcatcagcctgtagagtcacattgattacacttcggttattgactttcacttcttgcggagtcatacctacatacgagaaaaccaatacatctttggatgcatcattcactttcagagtatagttaccatttacgtcggtaactgttccaacaccggcaacacctttaatggttacactacctccaatcacttcatatccttcactatcaatcaccttaccagttactgtcaaactttgtgcgtatgcagccaaactgacaaaagcgaggataaacattaaaaacaattctttcaatttgtacataataaataatctaaggtttaactttagaatttttctgatgacaaacatacgacaagcactaaaaaaagtgcaaaagtattgtttttgttacttttacttttacactttttccataccaatattgttcactacacactatttttgtgcaaaaacaacttcacagattaccacaaaaggaaaatcatccgattaagcaatagctttatctgcttggattgcacgaaaaacaaattgtacaaaacatcttttcaaggcttatttcaagaaatcagctcgtatcggagcaaaacagtcaatcaaaactccaggctccagacaaacgcagccatgcaaaatatccggttcaatataaataccgtctcccgcttccacaatcttcttttcatcacccactgtaaactcaaatttaccacttaccacataagtcgtttgcgtgtggtaatgcgtgtgaggagttcctatagcccctttctcaaatttgactttaaccaacattacttgcccatcatagcccataatctgtctggccacaccttcacctgccggctcccacgctttttctttctctataataaaagtattgcttcttgttttcttaataggactatcaggcactctattattggcattcaaacccgttaccgcaaaaagaactactccaatcatacatacacatcttttccatgttttctttttcataattagtaaactttagttgattaaatatattattctgatattgtttcaaatttataaatagtgacctgccgatatatttctcccggcaacaaacttgtagcaggaaattgaggattattgggagcatcggggaaatgctgcatttcaagacaaaatccataatatctgccatatttcttttcaccatgaccaataagataatccatatttgaatttggaatataaaattgcattcccggttcagtagtgtatgctttcaacactctaccggatataggttccactacgatagctgccaactctaacgaacctgggtatttatccagtctataattcacatcatatccttttcccattttctgtactcttttttccaccgattgtggagaagtataatcatatacagtacccaccacaggcattaactctccggtagggatacccatggaatcggtaggagttatggaatccgcataaatcctataaatatgattcaacacgtttctggtgcaacctgttagattaaaataactatgatttgtaaaattaactaccgtaggcttatccgtagtagctgtatattccagaacaatctcattatgattagtcagtttataagctattgaaagctctatattgccgggaaatccaccttccaagtgagcacttttgtatttgaataccacgatagccgtatctttgacggtataaaatgtgtctgttttaaagacttgacgattgaacccgtttgttccaccatgaatggaatgttctttattgtttttttccagatgataagtttgtccgttcaggctgaattctgcatttctaatgcgattggcaaaccttcctatggtggctccaaacttaggatgtctttccagataagattccagactgtcaaatcctaaaaccacatgttcaaactgcccttgtctgtcaggaacggaaacgtcagtcagcgaagcggcataatttgtcactttgatagacatgccgcttgcattggtcaaggtgaacatttctatcacatcacttcctttccaaatgctaccatccttaaatacagacggccgacataaatccgtttgcccccacgagaccgacaaccccaagatggtaatcaacgttccaataatacgcatcttcataacctgatgatttatactatttctttccatattctgtaggcaaacaaccgatatacttcttgaaacgtgccgcaaaataagaaggagtgttatatcccaccataaaactgatttctgaaacggtatactttccttctttcaataactggcatgcccgattaaaacgtatcttatgtataaaatcaatagccgattttcccgttattgcctttaatttcaaatgaagatttgaacggctcatattcatctcacgcgcaaactgttctgtagaaaattccacattgtccatgtttttctcaacgacagcaatagcctttcgcaacagttcctcatccatcgtattgctcgtaagcttttccggtcttatttccgtcatattggaatatcgctcgaatatgcgataacgtgtacgcagcatattcagaatcttggttctcaacacttccatagagaaaggcttggcaatgtaatcatcggctcctacctgtaaaccttccaactgatacttgatatccactttggcagacaacatataaaccggaatatgacaagtacgtagattctgtttcactaacttacataacctaacgccatccattacaggcatcatgacatctgttataatcaaatctacatccttgtctttcagtatatccagcgctttttgcccattctccgtttccaatatatcaaacagcgcagacaggccgttcaccaagtactgccttaattccctattgtcctctacgaccaaaatagtaccacgtttacagttttcctcatccgtactaacttcttccccgaacttttcgtcatcaccgatataaatgtcgtttgcattggtggaatatacacgttgttctccttcatccccacttcttcctaacaactcttcttgtgtatatacggattcatcttgcggcagataaatcgtaaaggtagaacctttaccgacttcactctgtagaacaatccgcccatgatgtaattccaccagacgttgaaccaatgagagtccgataccactcccttcacgtccattttctatctgatagaaacgttcaaaaatcttttcctgcttctccaatgggatgccaatgccagtatctattacttgcaagacaagattgtcatcttctatgtaaagtttcacaatgatactttcgccgacttcggtatatttaaaggcattcgaaagcagattatttgcaattaaatccagatagttctcatcgaaaataacatttttatcttgcaactctgtatagaagttatagtctatatccttccttttagacaaactttcataattcataaaacagttcaatatccgcttataagcattggaatacacagccctgagttcaaatatccctaactcagcacgccggaaatccattaactgattaaccaaatgcaagaggcggttggtattccgctgcacataaagcaactgctcatgctcccaatgcccgctgatacgatcaagtaattcctgcaaaggcgcaacaatcaaagtcaacggagtccgtaactcgtgcgagatattaacataaaaacggattttcatctggcttatctcttcccgcttttctttatcaagccgttccattcgtatttcagcctgcatactcttgcgtagccagaagaagcgtacgataccgaacaccaacaaagcaaacgacaaagcaaacaaggaaagcgcccaccaagtagaataccaaaccggcaatatatgtatatgaagtatggcgggttcctcattccatttaccatcattgttcgctgcttttatacaaaaagtgtaatcccctgctggcaaattggagtaagaaacaaggctgatatcattctgcttataccatacattatcatatccctccagtttgtaggtaaatgtattatgtttacccgctatataattggaaacgacaaaagaaatggcgaatgaattctgagatgaagataaagttatacgattcacgtatgtaatactttcctttaaaattccggtttcatcatccggtaatacctccttattatgaacaaataatttattgatcacaggtttgggagcataaggattatcaatcaacgtttcaggacggaatgaagtaatgccgttgactccaccaaacaacatgtagccattgtcttttcgacaataagccccagcattaaactggttgccttgtaatccgtccataatcgtgaaattacgaaacttcccactctccgaattcagacaactcaacccttggttcgtgcttatccataaacgcccgtaagcatcttccagaattccataaataacattactcggcagaccgttttctgtagtatattgcagaaactgcttatcactttctttcaaagcaaacaatccgttacgtgttccaatccacagatatccggaagatgtttcgtaaaaacaattcacaaacgcttgcttcaacacagaagctatctgaaaatccgtattagggagcaaagaggtacctacctggttaaaaacagaaattcccatttctcccccagcccatatacgtttctttgagtcacaaaacaacaagcgattgtattgctgcaatttatgcccgtccccatctacatcaacaatcgtaaaattgcgtttatctatatcaaaatgcaataaatattccagcgatgccacccaaagccccccatacccgtctgaaataatagaatagatattattgctcggcaaattgctattgtgacgattataatattctatgtaaccggatttacgatgtaaaaccatcattcctccggcatgtgcccccacatatattctatcttgtacctcatctacatacaccgtcttgatatccttgaaaggtacatctagattgcccgaattgaatagataattcttatatagctgagaggcattatcatagtaattcaaaccgccatcgctcgtgccaatccacaaattatgcttgttatcctcaacaatgcaactgaccacattattactgagtgagttcaagaacgggacatgtttgatacgctggaaacggttacacaaaggatgataataattcagccctccccagtaagtacccagccacatgccaccctgcgaatctctgaaaatactccggactgaattctgcgataaacttccttcctgaatctcagagcttttaatggacgagaaactgtctgatccctccttgtagatattcaatccaccataggttcccacccataggcgattctctgtatccagtgctaaagaacgcacatagtttgagttcaatcctgatttcccatcttcataacggtaattcttcagctcctttgtcttcatgtcgtacagataaagtccatctccctccgtagccagccatattctattaaacatctggcacagaatggcatgaacccggatgccagtaggcacatccactagtttctccaaaataccgtttgacaaagtataaatatatacaccttcctcagtacctatatagatacaatcaccctggcgtaccaaagctgccggctgcaatccatgcaaagaagaggataatgtatccgaaaggaaacactctttctttacatcaaaaagcagaatgccttcggcagtacccaacatcaaccaatctttttttatcgggataatactggtcacagctacgttcaaaccatttctcttataataataattggaaaattcatccttatcctcaaatccgcaactacgcgcctaatatgatacagaagcgaaaagaatctgcatcgttagtaaaaagggggcacagtgcatcgaatgtcaccataaagacatataaatgccccttaccccaccatgcgacttgaggcaatacgcaaaatcacgactataagttgtcggtgttatccaaagtcattctggaacacattggcataagcattgttgcatgaatagatattcagcacatacttccttgatgtcctgacccatttggctggcacagagatgaacttaaagacaaacgtcttgatgcggcttgttgctttgagtccgaacctcttcacgtcaagcctcgccatgatgaatttatagaagttgcgtatgagtgccataagcagaagaaacaccgtgttttctcccataaaggattttggaagcctgttccagccgaatccgttattcatatcatcgaagatgcgttccttccctccacggaggttatagaattcgacaatctctttctcggaagactcgtagtcatttgtaaggatgcagcggtaggtgtattctccttcccacaggtcgagttcgccgtctatccgcttctgtctttgaatcacaagacggtatgccttccctttccatttctcgatgagaatggaggccagctcaaactcaatgccgcccaattccactttcttccaacctctgagggcaaagatgtcattgtagagcgaactgcatcggttagcacggatatagaaggtcttgcagtgtttagcaatctcttccactatctcttcagaacacgagccgcaatcagctctgaaacggttgataataagcttgttttgttcaaacctttcaaagaacctcttcagcgtgtccttctggtggaaacggacatttgtgttgccgtcgctgttctcaatgccgacaatcaagttgccaataaccgccacgccagggcgataaccaaggaacttcttgtatgtaggcttcgcatcaaacttctcagcctctatgaactggtggtcgaagtcaacgtcatacccctcgccctctttcagctgccctgtggacaataggcaattgaggagcagtgtattcagcttgtctgccgtgttgaagtcgtaggtcttgccagtgtcggatgtgtaggaaatgttatcctgggtcagttcctttatggctctaagaatcgtgtcggcactgcatgtgcgaagtgtcggatgaagcgaaaggtggtacatcagatgagtggtgacatcctcgatgcatgagccgccacaaaaataaacgctcataagcgaacggatgatttcgctgtattgataaccatacagcctgcatctcataccgagggttgagtcgattacagatgagagtctggagtcaaattgctccattattgaaaatattcctccaaaaggagtgagtttctcggatttaattgctacctttgccatgtctgtcgggtttgatacatattttgatttgcaacactaagataggtgaaaaatctgacatggcaaattcctgagcaactttttgttgctcaggtacttaaaaagttatatttgtaatagtgttgcggaattaaggcttataatgattgtaaagagacaacccctcacgagttcctatccaaatccggtctgaatcatccattgtgatgcaacgggatatatcgctggcaatacttttgggattggtatattgatgacgatatacaataaagttgtaaccatcatatttattcacaccatcatacgtcgcaaaccataaattccctcctttatcctgattaatcgcaaaaatcgtactatgcgacaatccttcctccaaaccaatatgggaaaagtgaatatcttcagtgacatcggcattcaacatgtaggggaataatacttctaaaagcactaacaaatattgctgtattttcatgtttgtaatctattatgaggcaaataaataaaacacattagcaaaagtaaatattaatctgtattttcttgccaatactttccggtattattcgcaaaggtacaaaagagaatcctggaaccggattaaagattcgtccatcactatctgtcggtgctacatctatatatcctgcttcgcaagtgatgtacaatatccccttatttttttttatggaagcttctcgcgtacttatcctcacctcttctttgggcgacgcgataactggcaacacaaggtaagccgagtcattgcaacgttccacgcttatgctcactccttgttctgaaaatgcatagttcacctctaccggtacttctccctgctttggagactgttgattgatatcaaccaaatgagaatttacattaaatcgacagaacccgtcttctataaaacaagtaatgtccgtattcaaatcgtccagattactatatgcaacttcatcctgaatcgattcaacccggggggtacctcccatcagatatttacggacattgtcctgcatattgggagcttcaatcaatttataccggttcatagtcgcagcaaatataggtcctgcctgagcatgccacaacaacgaaagagcacctcccattggatgagtccctttcactttatattcggcgtcatatccggtaaatgtggcacgccaatctccttgggataaaagccacgtacgaatatccttaaagaacttcactccgtaaacggagtcacggggaagcttttccaaagaagtcattttcacagaaggcagttctaaaaaagaagccaacgccttggcatgcccaaatgtatgatgaatacaaggagaaacaccggatgcaaaataatgcattcctccataaagaagtccaccatgggtagccttactcaataaacggatattgcggcgaatggcttccaaatattccggatgacgggcagcagccatcaaataataacctcccataaagccatcactggtacgcccgccccaataagtccatttaaagcttcgtgttccccaactgttgtcccaagcgccatcgggtaacataaactcaagatgagtatccatggaacgttccacaagcgaaaatagttccatgtcgtttgccatcactgcataatatgccatattaggcagtgattcttctacattataaagcaaatctaccggacggcaaccgtttggagtttctgaggcgatattaggtccctcgccatacaagaaacagtcattcacggtaaaatattcttttaatccgagagctatctcttcggcttccttcttaaattcaggccgattgcacatttcaccgatagcatatagtgcataggttgctgaagcagaataatttacattcatatttctcatgccttctcgccttcggctataaatgaaaggattgttcatcataaactcaccagcctctaccaatcgctgtttccaatgatgatgggttgaatcatccaatagatgtccgtgataatgcaaagcttcataaagagcaatcgctgcaaataccgtcgtaccgttccaatccgatacatgtacatcgttcatccatgacccgtccggacggtgcacattctccatccacgccatcaagcgcttggctccaagcaaatatttttggtttccggtcttttctgccaaatacatcaaaggaagtacggcatcacctatacgtccatgcatacgggcacatgcagggcataagactcctccatcaagtgcggaatcggaataggtgcactgataagccagaaaagcatccatccattccgtcaacagcttatccgcttcactacgcaatgaatcatcaaaagagttcgcatttacattctgtgcttgtcctgccaaagatgatacacaaaacagcaccatcataaacaacatgtttttcatatctctttcatggttagattttaatgctcaaagttagtcctttgttatcagtatttcactctctttttattcaatatcatgccaatgggcgtttaaacctcttgtaatattgttgaatcaatgctaatattgttgaaacctcacttgccaaaacaatattggtacacttttaaacataaggaagtctcagttaaacacaaacggactactttagctgcgggaaacaaatgttcttaattcttaatgctttatgagacacctacctttattaatgtgtactgccttctgcggattgtattccacacagacaaaggcggcagacacaaaaaacgaaaagcccaatattctttggctcacctttgaagatactagtgcatacgaattcggttgctacggcaacagaggagtacatactcccaatgcggacagccttgccgcccgcggcatacagtttatgaacgcatggtccgtagctccccagagctcggctgcccgttcttcactgattaccggatgctattcaagcacttacggcatggacatccatcctgtgccctacgatacacctgctgacatcttctttccacagaaattacgcgaagccggatattactgtacaaacaacagcaagacacactacaactctaccactgacaataaaatatgttgggacgaatgtagcaacaaagcctcatacaatagtcccaaacgaaaaaagaaccaaccctttttcgctgtattcaacacggtaacctcacacatgggacgcatccgaactttccatacagacggacgcagagattacacacgggaaggcatatacccggcactgctttcattgcctgcttatgttcccgacttgccggaagtacgttccgactatgccggtcatttagaagcagtacaagacgtggatacctggctgggattcttcctgaaagacctgaaagagaaaggcttggatgaaaatacaattatatttttcttcagtgaccacggcggttgtataccccgtggtaaaggatatttgtacgaaagcggtctaaaagtacctctgattgtctatttcccgcccaaatggcaacacctggccaagcaggcttcaggcaaagagtacagcttggtcaacttcacggatttagggcctaccgtacttagtcttgcaggggtaaaaccacccaaacagatgcagggcaaagcactttacggcaagtttgcaaacaaagaaaaacgccagatgcaatttgcattagcagccaatcaattgcatcatttcatgccggtacgcgccgttaccgatgggcgtttcaaatatatccgtagttatatcccctatcgtcagtttgccctgcgcaattattatcaatggggaatgccttccaacaaagcatgggataaactagtattggaagggcataataccaaccctaactggaaactgactttcgaagcccatccggcagaaatgctgtttgaccttgaaaaagatccggatgaactgcacgacttatccggtactcccgaatatgcagaaatcttgtccaaaatgcgccaagcactatctgaccatattcgtgtcaccggtgatttggggttcttccttcccacttcacgcaccggtcatattctttacgacaaagtgcgcaaggagaaatatcctctgaacgaactttatactcttgttgaaacagctggaacagcaaccaccgcctctctgtctatgttagaagaagcaattaccaatccgctatccgaaatgagattctggggagtagtaggatatgccaaacttgccagagaaaagcaaatatcttcttgtccgcaagccttgttggcactcctccaagacagtaatccctacatcgcttccgaagccgcctatgccgcagcctatctgggtaaaagtcaagaaagcgttgcccgcctaattattcccacagaggaaaaatacagaaaaatagggtactcttcactggaatgcttatctttagaccctgatatgcgtgactgtatccgtcctttcctgtcggagctgagagaagccgcagaaaccctgccacgccttgaaaacgaagatgccggactcatggcgcggggaatcctcgtgaacttgggtgaaatggatatccaagacctatatggtcctgaagcttataaaagaggtctgaaatttaactatggtcgtagagcaatgataccgttgcccaactaaaaggaataaatttatgcgtagtacaatcaaaatcgtaattttattgtttttcatatgtacttccatgtccggagcttcgtttccggacatggaaaagtatatgcgccaacatgccttgatatgggaacaattacccatgcaatggaatgaaggtgcttttttaggtaatggattggtcggcatgatggtatatgccgattccacactcaatgcattagttttccatctgggacgtcccgatgtcacagatcataggaaagctccctaccgaaaaacctccatcggcacggaagaggcagataaaatggtggatttttgcaggcttgatgtcggtaaaatgctattattccctgaagggaagatactttcaggcactttttatctcgacatttacaatgccgaactgaccggacacctaaaaacagacaaaggagacttgactttccacgcctatactccccaacccgaagaagtgaatatcgtggaagtttcctccggagtcccttaccgctggaaggggattcccgggaacccatgctctccccgcataagagtatttccccatttgaaagaaaaattaaaatacaaggacaaccccgcacctgtcgtcgaccaaaaagacaaagaaggtagttgggtacagtccttgttggcgggaggagactatgcaacctactggaaagaggtgccgggcggaaaatcacgttccgtattgtacgtgtctacagccaatgaagtgccggcttcatccctctctcttgccaaagccatgaagactgtagaagcaacacagattacaggaactaaattgttgaaacaaaagacacgccagtggtggaatgcctaccacgaacgttctttcctttccattccggacaaaaaactggagaacttttatttcatacagatgtacaaacttgccacttgttctcatccggatggcccggcaatggacgtaatgggcactttcttcaaactgagcccatggcccagtttctggtggaacctaaatatacaactgacttatatgcccataggaccagccaataggatggaacaaggcaaaaacttccagcgactgatggatgaagtgtttccttcacttgtccgttctattgaaccatgcaagataggtgactacacctgggcattgcaaaactattatatgtacctgcgatatgccggtgctgactggcaagatatcaaacaacaagtagttccaaaagcactggacgcatttgccgtattcgataaaatactgtgttataaagaaaacacatggcatctcacccatattgagtctcccgaatatgaagggttccaaaaatacaatgacagcaattacggattagcttcactgagctggttgctccaaacattgatagcatgtcatgacagaacttcaagcactcatcccgactatgcacgctggaaagaaatcctgacacgactggctccatatcccaccaatgaaaacggtctgatgattgccgccaacaaaccgctggagaagtcccaccgccattattcacacctattggccttctaccctttccgacttttacatcccgatgtaccagagaaccgtaaattcctggagaaatccatcgaacactggttgtctttagaagatgggaaaggattagcaggatattcctataccggagcagcttctctatatgcctatttgggtaacggtaacaaggcttacgaacgcttggcacatttcatcaacaaaccaatcggaatcagcattctgctacccaatacattctatgtggaaagtcaaggcaagaatccggtaatagaaaccccattaagtgctgcggcctcccttactgagctgcttatacaaagctgggatgagactatacgtatcttcccggctgtgccagaccattggaaagattgtgctttccatgccctcagggcggaaggaggatttaccgtctcggctcaacgccaagacggaagaaccgaatgggtcagcctgaccagtgaaaaaggacaaccttgccgtatacagttatccggatgggatgccgtccatcagctatctgcaggacgtaccgtctccatcaaaccgctgggtaatgagacctatgaactggacctgaaaaccggagaaagcgtaacgctggcccctgacaaatcaacaaaatgcaaactacgccttatccgggcaaaaaacaaatcccaatccaacttctatggagtgaaatcaagaaaaggtttgcccgaaataatggaatggccggaattaactcccatcaaggaacgtgtgaatgtacaggccgactctgctcgtatccgacagattgtcgacggctgttgggtggccgtaggtaccaataagtcccatgccatacaactggactactcccgtccctttcaaggacagccttcttaccgttttgagctgaaacaagatgacaacactctggaaggctactctaaaggagaaaccaaaggtcgcgccgaactatgctattgctatgccgtatccgacgatttcaaaaactatccggcagatgaatatcccaatgctcaaaagatgaagaccgtctatcattatggcaagggaagttgcccgcaaggttcatccatgagctacacattctctgtttacattccacatacccttgacaaaaacgtatctaccatctttgcccaatggcacggcatgccaagccgtacacttgtgtccgaccctgatggcaaagtaatgagactcagtaccaaggagtttctggaactggagaggcgaatgattttcaagaaaaatacggcatatgataaaattatcaaaatcaacgcccaaggagataccctctacagagcagggaaaccgaacggttggctgatagaacaaggcggttatcccccgcttgccttcggcttttcacaaggttatttctacatcaaagccaattcggaccgcaaatggctgacggacaagaccgaccgctgtaatgccaatcctgacaaggcagaaatcatgcatccagtcacctctaccttcaaaacctcgacaatagcatataaaatgccattcgagaatttccccaaagattgctggataacttttcaggtaaatatagactggaccgaatatggaaaagaaaaagaaaccattcttaaacccggacttcttgacgtaaccatgtcctaccgtcaatcagaaaaggaagtgaaagaacatatcgtaaacaatgaggagatactgattggccgcaatgacgaagaaggatattacttcaaattcggcatataccgtgtcggcaacagtaccattccggtttgctataacctagccggttataaagagcagttccgaaaagtaacgacaagaatcacgcaattttaaatcccatatttttcaactcaacacagaacgattgatttcttgttttttcgtagaaaaacaaaaaaggaagaaataatagccgaattcaacaagcaacaaaaagcccgccaccttaatggagacgggcttgaaaagtagctccgaggggaatcgaacccctatctaaaatttaggaaattcttgttctatccgttgaactacagagcctcaactgataatcagcggaatatgtagaatatttatagaacttctacactatttttacacgacgcaagctgattacggatgcaaagataatgtattctgccgattttccgaaaaaagttttgttaatccgattaactttccgaaatttgctgcctatgtaaacggaatagtaatcctcaaataatctatagtaattcgtaagttatggcaaacgacatgatggtcaaagaactggagcaagtggtagtccgcttctccggagactccggcgatggtatgcagctcgccggcaacatcttttcaacagtttcggctaccgtgggcaatgatatcagtacattccccgactatccggcagatatccgcgccccgcaaggctcactcaccggtgtttccggttttcaggtacatatcggtgcagagaaagtctataccccaggtgacaaatgcgacgtattggtagcgatgaacgccgccgcactgaaaacccaatataagtttgctaaatccactgcttgtatcatcatcgatacagatgctttccagaagtcagacttggaaaaggccgctttcaagaccgataatccgatagaggaaatgggtattaagcaggatgtcatcgccgcccccatctcgaagatggtgaaagactgccttgccgacaccggaatggacaacaagtccatgctgaaatgccgcaatatgtttgcagtaggcctggtatgctggctgttcaaccgcgatctgaaaatagccgaagatttcatccgcgagaaattcgccaaaaagcccgaaattgccggagcaaatatcaaggtcatccatgcaggatatgactacggacacaacacccatgcttccgtagcccatacatataagattgaaagtaagactaccgttcccggcagatacatggatatcacggggaacaaagcaactgcttacggtttcatcgccgcagctgaaaaggctggcttgaagctgttcctcggctcctatcccattactccggcaaccgatgtactgcacgaactctccaagcacaagtctctgggcgtgatgaccgtgcaatgcgaagacgagatttccggttgcgccacttctatcggcgccgcttttgcaggtgcgctggctgtgagctccacttccggtcccggtgtctgcctgaaatcggaagctatgaacctggcagtcattacagaacttccgctggttgtgctcgacgtgcaacgtggcggtccttctaccggtctgcccaccaagtcagagcagacagacttgttgcaggcattgttcggccgcaacggtgaaagcccaatgcccgtcatcgccgcctcttcacccacaagctgtttcgacgcagcctacatggcaagcaaaattgcactggagcacatgaccccggtcgtattgctgaccgacggctttgttgccaatggctccggcgcctggaagctgcccaaactggcagactatcccgccatcacccctccctacgtgacttccgaaatgaaggacaactatactccgtacaaacgcaatcccgaaacaggtgtccgctattgggccatccccggacaagaaggctatatgcacatcctcggcggtctggagaaagacagcaataccggtgccatctccaccgatcccgaaaaccatgacttgatgtgccacctgcgtgccgagaaggttgccaaaatccccgtacctaatgtagaagtgcaaggctgtgcagacgatgccgatttgctgattgtcggtttcggcggtacatacggccacttgtattcggccatggaagagatgaacaaggcaggcaagaaggttgccctcgcccacttcacttatctgaatccgctccccaagaacacggaaaccgttctgaagaagtacaagaaggtggtagttgccgaacagaatctcggacaatttgcaggttatctacgtatgaagatagacaacttcaccccgtaccagttcaacgaagtcaaaggacaaccgttcgtcgttgccgagctggtcgcagcgttcaataaattaattgataattgacagttgacaattgataataaccatgcgtaatatgcggattatcaatgaccagccaccaattatcaactatcaattatcaactatcaattaaaaaagattatgtgcgaatatacagcaaaagactataaaaaaggacaaccccgttggtgtccgggttgtggtgaccacttctttctggcttcactgcacaaagcaatggcagaaatcggcaaagctccttgggagaatgccgtcatctcaggtatcggctgctccagccgtctgccctattacatgaatacgtatgcgatgcagaccatccacggacgtgctgctgccatctctacaggtgccaaggttgccaatcccaacctgacggtatggcaaatctccggcgacggtgacggtctggccatcggcggtaatcacttcatccacgccgtacgccgtaacatcgacctgaacatgattctgctgaacaaccgcatctacggtctgaccaaaggtcaatattctccgacctctccacgtggtttcgtcagcaagtcgtctccctatggtacggtagaagatccattccacccggcagagctttgcttcggtgcccgcggccgtttctttgcccgcgcggtagctaccgatgctccggggacagtggaaatattgaaggcagccatggctcacaaaggggcttccgtttgcgagattctgcaaaactgcgttatcttcaataacggtacgcatgactccgtagccaaaaaggaagaccgcgccaagaatgccatctacttgaaacacggcgaaccgatgctcttcggcgagaacaacgaatacggactgatgcaggaaggctttggtctaaaagtcgtgaaactcggtgagaacggcattacagagaaggatatcctcatccacgatgcccactgcatggacaacaccctgcaactaaagcttgccctgatggaaggtcccgacttcccgattgcactcggtgttatccgcgatgtggaagctcctacttacgacgatgctgttcatgaacaaatcgaagaggtgtctgccaagaagaagtatcacaacttcgaggagttattgatgacgaatgatacgtgggaagtaaaataaaccactaagatttattaatatcatgtttgcacgaaacaaataaggtgcaaacatgatattaatttcctaaaagtaagagtacctccctatcctttctctcccaaacatagatacttattacgccaaacatgcagttcttccatcaagaataactatatttgccacagtaaccatagtagtcacattttgaaagtaattctctgatttatactggcttaatatcaatctcacaaaccgcaggctgatagctctttcgttcgagtaatccttcccggataaaggtcaaaaacactcccaccctgaaaagaaaatgcaaccactgcaactgcaccagattttattgtagtgatagagcatacctccgatgaacaaggctaccaataagggtcgacaacaagacttcaagggaagggagggaaattgtagaatacctactgtggattttttccacatctccacaccacaaacacccgaacttccctttttcccgatagaaaataagcaattgattatcaacattattcatccttaaaaggatagtctgcctttcgtttggcatacctcttgctaaaatatccgccgaaaggacgtaacatttataataagataaatcaattatttttcagtagtatgaaaatcaggatgagaaaacggtgtgacattccacattcagcgtcgcacttccaaaaaagtttgattattgcaagttggttattagcatttcttttcaccggaacagcctttgcacaagagaaccgaaccattacaggcattgtaagagatgtaacgggagaaccgcttatcggtgccagcgtcatacagaaaggcaccaacaacggcgtcattaccgatgtggacggcaacttcacactgaccgttcctgcagatgcaacactctctatcgcttacatgggctatgctacccgggagataaacctggcaaaacgaaaaaagcaaggcgacctgaagattacactcagcgaagatacccagcaactgaaagaagtcgtagtaacggcaatgggtatcaaaaaagatacgaaacgtgtcggttatgccatcagtaccatcagtgcagacgagttggtaaaggcaggagcacccaattttgcctctgccatgtacggtaaagcaccgggagtccgcattacacaaacacagggcggttctgccggagctgtctccatcaacgtacgcggcctgacctctatcactggaaataaccagccactcatcattctggacggtgtacccatccgcaacggcggcacgggcaaaagcacggacttcgctgaatttggcaacgacggacaaatccgttccaatggtctggtagacatcaacccagaggacatcgagagcctcagtattctgaaaggagcttctgccacagctctctacggctcggaggctgcaaacggtgcggtagtcatcaccagcaaacgcgccaaaagtggcaagctgacggtggacttcaatgcccaagtcatggcaaacttaccggcttatctgccgaaagtacagaccgtatacgggccgggaacctacaacaccgcatacagcgattatgagaaacagacgggaggcttctatcagagaaccctaaacggacaaagctacaaaagcctccgttccaccaccttgtccttcggcccgaaatacgacggtagcgaggtactttactgggacgggaagatgcgcccctaccaggcactgaccgacaacccgtggaaagagttgtttcgcaccggctggacccaaacttacaatctcgccatctcacaagggacggaaaccaccagcaaccgcttctcctacacattcatggacgagattcccaatgccttgaccggaagcttcaccaaacacaacttcaagctgaccggttcgtatcaactggcgaaaccgctgaaactggaatactcccttaactacatcgtacagaatgtagaagaccgcccgcaaacctcgctcaacctatacagcggtttcggcaacatgttctccaccttcctggacattccctatctgaaacaaagttacgtcaccagtctgggataccgtaatacctttgtcggaggaaacgccacgctgactcctgaggaatcatgggcctacgaccccagttacgccaccggagtgaacaacatgctgtggaatatgtaccatcaccatagcgacgagacagagaatcggctcatcggtatgattcgccccacctggcagataaccaactggctgagtctgcgcgcccaggtttcaactgatatcacagatgtgaagcaaacactgaaatatgaaagcgaacaacccaattccctatacgaccccaacggtagcttccagtccatcaaccgccgttacgacattgtctatggagatgttatgttgaacttcaactataatatcaaccgcttcgacattgccgccaccgtaggctggaccggacgctacgaaaatatgaacaatatgagggtctccaccaatggcgggcttgtcacggaaaactggttcgacctcaatgccagccgctacacgccaagcagtaccctgcaacgtatggaactactgaaaaccggctatatgggtacactaagcctgggatgggacaactatctattccttgaactgaccggacgccaggaacgctcgtctaccctaaaagaccagagctttttctatccttccgctaatctgagtttcctcttcacccaagccttccacatgccgtcatggtggaactatggaaaactgcgcctctcatacggtatcgtaggaaatgctcctgaaacctataccgccaatatcgtctacgagcaaggttcggacaacggattcacctggaacaccattccctcttcatgggggaatgcagatatccgtccggaaaagaagtacgaatacgagataggtctggaaagcaagttcttaaacaaccggttgggtatagatgtatcttactacaacaaccgtgtaaaggaccagatactctccacaccgcaaccttccacatcaggcgtaaagaatgtgttgatgaatgtgggcgaggtagccaaccacggctgggatatatcaatcagtgccactcccatactgaccagagatttccgctgggacctgacagccaactatggtgtatataagaacaaagtagtgaaactggccgatggagtgccctatctggaaatactcaactccggaggcagtggaataaaaatacaagctgtggaaggccagccaatgggtgacatctatgcgcaggttccccaggtgaacgaaaacggtgagtacctcgtttccgataaagggctttacctcaaccaaaccgaattgcagaaagtcggcaacatcaatccggcaggcgtaggaggtctattcaactctttctcctacaagaatgtattcctcgatttcagtatcgacttccgcatcggaggagatgtcatcaacgaaatgaaccaatatgccaccgcagtgggtctgacacccgaatccctaaagtaccgcgatacggaacacggcggactgtcctattactatccgggcgacaacaattccagcggaattccggtacaagtagacccttccacgggtgccggccccaacggagagataatctaccacgacggcatcatccttccgggtgtagtggcctccactggcgaaagaaacacacgtatcattccggcaggctattactacaacaccacctataattggggaacggaggccgaacagctgacataccgccattcggtattcgacaattcttatgtcaaactgcgtgaattgaccatcggctaccagtttcccgaaaagataatttccaaactgggactgggccggctgagtgtgtcggtcttcggacgtaacctcttctacttctacaaagcactgaaaaactacgatgcggagtcgtccgtcggaacatcctgggccaaccaggctaccgtgggaagttctaccacagctacccgcagtttcggtgtttcacttcgtgcaagtttctgacaaaacaaccatccaaaaaacaacaaagagtatgaaaaagacaaagatattatctcttgtttcattgggagcattcctcctgacaacatcaggctgtacggattatgacttcgacagcaaatacgaagacccctccaaagtaacccaagtcaccatcagtaatctgatggtaggagtcttccaaaaagtaaaggactatgatgtttacgaatacaaccggttcttcggattcgattcacagtttacaggcaagtatgcacaaaccttcggctactccaacactacagatatgtatacccccggctatatacccgccattgacggacagtgggacaatgtgtattcggcactggcccagttccgcaagctggaatctctctacaaagaagaaagcgcggcagagcaagcacaggatgaggcattctatcttgccgccaaagtacagctgtacgattttttcgccgccacagtggacattttcggggatatgcctttttcggaagcttgcacactaccgcttaccaacgatgtaggtaaatcgtatgctcactatgacaaggccgagaatatatataaaaccattcttgacgagctcaaagaaattgctccgcggttccgctccatccccacaccgaggaacttcaatacacaagactttatcaacaacggggacatggacaaatgggaacgctatgcaaactccttgcgactgcgccttgccatgcgcgtagccgcgcaaggagacttgcaggcagaaggccgtaccgccatcaaggaaatcctggaaaatccgtcggcctatccgttgatagaggaacaagaaaacaacatcctcattgtcaaccagaagtctgggcaactgaacttcactgcaggccacggactgggtgactgggtaaccaaccgactcgcttcgggcgccatcatcgaccgcatgctgggccatggcaactacgatatgacctgcaatgacccactgagcggcgtttatgtgaaaggagaagacgacccgcgcatcctactcaacttcaatcccgtgaagattaccaaccagaacaccggtcaattggacgaacaccgttatctgggcacagaccttaccgtggcagatgagctgacggaatattacaactcgcaggcacaagacgaagtcaataccagcaacaccggtttctcacaaatcacgcagaaaggtttcttttgggaaaacgataaattcgacatgctgataatggcctcacccgaaatccatttcctgaaagcggaagcctatgaaatggggtatggagtggcaaagaatgaagcgaaagcggaagaagagttcaaaaaggctgtcagccagtccatcacgctttactactattacgattcggtaagtacgggtgaaaacgcacgccggtatgatgcccctaccgccgaagaaaccgcctctttcgccgctgccaaatggaacagcacgaaatatacagacaagctggatgccatcattacccaaaagtggctgcatttcggtttcctagccagtcgtgaggcatggagtgatatccgacgtaccggctatccgtccggcctagccttccccgaagtggccggtaccatcacaaatgtgccgaaccgctggagatacccgaatacggaagtcaactacaatccctactataaagaggtgtcagccgaagacacttactaccacaaactgttctgggcaaaataaggactttgttcgcaaacccattttgcccgaagagtatatcatactcaccacagaataacacggattaacacagattgccttaggagttctgataataaagagcttttagcagtgttaatccgtgctatcctgtggtgagtatgtatttgccccctctgtttcttttattccgaacagtatccctccttttttagaaatcttaaggatttcccggtagggagattgcgggaaaccactgtctttaatgaacgacggacaaacatcgcttccgcaaaaactgaactataacataacggactaaatgaaaaagtatccaaatgacttgattggcgacatcatgaaagccttcggcaaatatgccgaccgaccggcattcgtcatcgaagacacggcctgcacttatggagagctggcaacttgcgtacagaaaatatcctccctattcaaggacagagaagacaaaattatcggcatcgtcgcagaaaacagactggaaacatacgcatccatactatctgcactgatttgcggaaagacatacgtcatcctccatccttcctaccccaaacataggaacgacagaattgccgactcggcaggcattcgcctcgtgctgcataccgagaatatccatgtcttgaacctcgacacccggaatctggaactgatatgtacctccgaaatagagcaggcagagaactccgccacgttccatgccgcagaagacatcctccatacggcagaagaggaaaatgcctacatcatctttacctccggaagcacgggcgaacccaaaggagtacccatctcccgccgtaacctgaatgctttctataccgcctaccaccgcctcggctggcaactggacgagaacgaccggatgctgcagatgttcgaactcacttttgacgtttccatcgtatcctttctatatccgctgacgctgggtgcttgcatatacaccgtttctccggaaggcgtgaaatacatcaacgtaattgaaactctggaaaaatacgacctgaccttcgctgccgtggccccttcactgctccagctgctacgtccctattttccggaaatacacctccccgcacttagatatctagtggttactgccgaggcttctgacgcggagctgttggatgctttcagaaaatgtgtccccaatgcctctttcataaacctatacggaccgacagagggaaccatctactgcactgcctaccggatacccgtcacctcctgcaagcatcacaacggcatgaccgctatcggaaggcctttcgaaggcatcgatgccctaattatggataacgacggtcgcccgctgcctaccggagaaaccggcgaactatggattagcggcaatcaagtgatgggtggatactggaatgctcccgaaaaaaacggggaatgcctcgtagagaccgccaatggaaaagtatactacaagacgggagacctctgccggatggatgccgacggtgacatcatctattgcggacgaaaagactcacagataaagatacaaggatttcgcattgagctgagcgagattgaacatgtggcaaaaaactttttcaacggtgaatgccgtgtagtcgtcattcccaaatacgacaacgacaaccagtgcgaactgcatctcgtcgtagagaagaaacagctcgacaaacagcagatagaggaatatctgtgtagcaggcttccctactacatgattcccaagcatatgcattgtctggaacagtttccgctgaacaccagtagcaaaacagacagaaagaaaatacaagaactaatttaaacttgacaatggatacacagactattttgaatgaaatgagcctcatctttcgagaggtactgaaaagagagaacatcgtacttgacaatgagaccaccgcccaggatatagaaggatgggattcactgaccaacatgcaactgataaacaagatagagaagaaattcaatgtacgcttcaccttcagagatattgtaaaactcaaaaacgtgggagacatctgccatgccattttaaccaaaaccaactaggaaatgtcattcatatccctgaacttcgtcgtactgtttgcgtgtactttcattctataccatacgcttccttcacgattcagaaaagcgaccttactgacagccagctgcctcttcataggcttctaccacctcgcttttctgataacggccctcatcctcacgcttaccaccttctaccttggcaaatggataggacaggccaagcgggaaagcggcatgaagggaatttatttttcaggtgtgtgttttctggttgtaagctggttggcattccggtatgctgaccggcttacaaactgccacattctctttccactgggaatctctttctatactttccaggccatttcgtacctgacagaaatctactggcaagaagaagaaccggaaaagagcctgcccgacttcatgatatacatgctcttcttcatgaagttcctttccggtcccatagaaagagcaagtgacatgctcccccaactgaagtcctgcaaagccacggactatacatccatggtctacggaatgagactgattgtcgtgggactaataaagaaactgatactggccgactccatcgccccatacatagacggtgtcttcgggtcggtatacacagcctcgggcgtgcaattgctgatggcatgcctcctatatccgatagagctgtatgccgacttctccggatataccgacatcgcattgggaggagcgcgcatgctgggattcaagctcagcccaaacttcaaccggccgttcattgcacagaccactgccgacttctggcgccgatggcacatgtcgctttcattctgggtacgcgactatctgtacctcccgttgtcctcgaacctgcgtggatggggacaatggggcgtatttctaagtctggcgctgaccttcacgggactgggtatctggcatggtgccggatggaacttcgctgtctacggactaattcaaggtgtcatcatcttctacgagatgaagaccacagcatttcaccgcagactgaaagcccaattgggaagccgcttatatgccacattatccgtcgtaaggacctacctactttttgccgtatctctgatattcttccgggcaagttctatggccgaagcgttccactacatcagccacctctccttcggcgtacattacagttggaaggaaatgaacatcggaatgccggaccacaacagcattgtggcaggaagcgcactcgtactgatattggtttacgaatatttcatgtccaagcatgatttgctagaagccctcggacgacagccggcagccgtaagatggagtatctattatctgctcgccataatacttttcacactgggacagttcaactcggacagcttcatatatttacaattttgacaataaagacacatgatgaagaaaaacagcgaacggaacgcagccatacgtttcatgaaaaagctctttatcctttttatcccttttatagccctactggcagtctatttcctggacgaccctttcatggtcctgaagaactatgaacgatacgaccaaaccccggttgtactaaacgaagggcacgtggggtggcagatgtatctgaacaaccgggataccatccccatcgactcctatatcatgggaaactcctgcactatggcttatcaatgccatgaatgggagaaatacctccacggcggaagagccgtacggctattcggaaatgccgaaagccttgccgccgtctgcctgaagctgaaggcactggacaaggcaggtgcaacaatcaagaacctgctgctgattatcgacaaggaatcattgcacaacgaccgttgcctcaccggacattccaacattctgccgcccgccatatcgggaataagcagcttcaagtttcagaaggaattctgccaagccttcttctacccgaactttctcctcccctatctggactacaagctgttccatacctatcgcccttacatgaaaggggttataaacccctatggctccacccgaaacccggtaaccaatgacgtgttaaatcccagagagaaaatgataaaggaagagggagataagtactgggaaaaccggaaaggagaattcaccaaagagaaaatgaagaattatagagacgggaaataccgggaagccccccaagtgctcagggaaaagcaaatcaatctgttgcaggaaataaagtggatttgccggaaacatgataccgatgtaaaaatcattatcagtcccgactacctgcaagtcaacataaaccctgccgacgtaaagacactgaagcgcttcttcggaaaacggaatgtatttgatttcaccggtatcaacgaatacacggaagacatccacaattattatgaaccgggtcattataggcccgcacttgggaaaaggctgatggaaaagatatatgaaccttatatcttgtcaccgaacgccaaatctccggcatctcccagcccgggaacgatataggaatgctcgttcatctccgggtcgattgctgcacaccacaaggtcacttcatctccagggaacagcttttccagatgctctacgccctgctggctggctatgacacaagctatctgcaacttggccggcatccccttggtgacgaaggccttccaggccaattccatactttctcccgtggcaagcatcgggtctacaatcaataatgtcttcttggacaaatccggagtagcgatgtattcgatgtgtacatccaccgtacggcattccttatccttataataacggtaagcggaaacaaaagcgttcccggcatggtcgaacatattcaagaatccagtatgcaaaggcaatccggcacggaaaacagtggcaatcaccacctcgtcatcgggtgtgctgaccgacgccacccccaagggagtctgtacctgcttgacagaatacgtcagttccttactcatttcatacgccattatctctccaatgcgttcaatattacggcggaaacgcatacggtcgccctggactgctacatcacgaatttccgccacgtattggttcaagacagaatttgtctcggcaaagttgataaccttcataactataaatgtgctaatgtgcaaatatgctaatgtgcaaatgtggtgtacgtaatgccgcatggcaattagcacattggcatatcagcacattagcacattaaaatctgctgcaaagtaaacgaatttcactcaatttgcaacattcagttagcagatattgttatggttttataaaagatttcctattagagaaaaatttctctaatagagcttttctttaaaaagaaagtattacttttgtaggcgaaaaacaagggacctgctgaaaagcaggaaaaaaagagcttttctacacccgttttcccttgtaaatcaaaggtaaaaagagattaaggaaagagattataaaccaaataccaacattttaaatcattaaaagaaatggcaaatttagatttaagcaagtacggtatccaagacgtgaaggaaattatccacaacccgtcttacgatgtactgttcgcagaagaaaccaaaccaggtttggaaggttttgaaaaaggtcaggtaactgaactgggtgctgtaaatgtaatgacaggtatctataccggtcgttctcctaaagataaattcttcgtaatgaatgaagccagcaaggattctgtatggtggacttctgaagaatacaaaaacgacaacaaaccttgctctgaagaagcttgggctgacctgaaggctaaggctgtaaaggaattgagcggcaagcgtctgttcgttgttgatactttctgtggcgccaaccccgctactcgtatgaaagtacgtttcatcatggaagtggcatggcaggctcacttcgtaactaacatgttcatccgcccgactgctgaagaactggctaactacggagaacccgatttcgtatcattcaacgcttctaaggcaaaagttgacaactacaaggaactgggtctgaactctgaaacagctactgtattcaacttgaagaccaacgaacaggttatcttgaacacttggtacggcggtgaaatgaagaagggtatgttctctatcatgaactacaagaacccgttgcgtggtatcgcttctatgcactgctctgccaacactaacatggaaggtactgactctgctatcttcttcggtctgtccggtactggtaagactaccttgtcaactgacccgaaacgtctgttgatcggtgacgacgaacacggatgggatgacgaaggtgtattcaactacgaaggtggttgctatgctaaggttatcaacctggataaagaaagcgaacccgatatctacgctgccatcaagcgtgacgctctgttggagaatgttacagtagctgctgacggtaagattgacttcgctgacaagagcgtaactgaaaacactcgtgtttcttatcctatctaccacatcaataacatcgttaagccggtttccaagggtcctcacgctcaccaggtaattttcttgtctgccgacgcattcggtgtattacctccggtatctatcctgaaccctgaacaagctcagtactacttcttgtctggctttactgctaagttggctggtacagaacgtggtatcactgaaccgactccgacattctctgcttgcttcggtgctgctttcttgagcttgcatcctactaaatatgcagaagaattggttaagaagatgaacaaggttggtgctaaggcatacttggttaacactggttggaacggtagcggcaaacgtatctctatcaaagatactcgtggtatcatcgacgctatcctcgacggttctatcgacaaggctccgacgaaggttattcctttcttcgacttcgtggttcctactgaattgcctaatgtagatccgaagattcttgatcctcgcgatacttacgaatgcgcttgccaatgggaagaaaaagcaaaagacctggctggtcgcttcatcaagaacttcgctaagttcactggcaacgaagctggtaaggctttggttgctgctggtccgaagctctaatctgacaataaagttagaaacatatggaaaaggtatctcctccgggagatgccttttttcttttttaatatctctatctcattgataatccgaaagttttagtagttttgcagaaaccattattcaaataaagcaatatgaaaagtatcagattgatgttggcaggcgcaagtttgttactgctctgcagttgcggtgcccaggtccagaaagagacccaagttgccaatgcaaatgaaagcaaagagaatgcggtgattgaaaccatcatgtcacgccgcagcatccgccagtacaaaccgcaagccgtgaatcgcgacaccatgcagattatcctggattgcggtatcaatgcacccaacggacagaacaagcaatcgtgggaagtgcgtgtagtggataacccggatttcatcaacggcatcacggaaatctacaagaaggaaaatcccaaagccgccgaagacccgaaattcaagaacatgtttcgtaacgcttctacagtagtatttattgccaatgacccgtcttatgacctttcgcagattgactgcggactgctgggtgagaatatgattctatcagcctggtccatgggaatcggttcttgctgcttgggcggtcccacgcgcttcatgacctctactccggctgctgccgaatacctgaagaaactggatattccggaaggctatcagctactttactgtatcgctttcggctatccggacgaaacgcccactgccaaaccccgtaatgcggcaaaggtaaaattcatcgattgactttcgtttgaatgacgacaataaaaaggagtgcctcacctttcggcggggcactcctttcatatataacaactaaaactcttctgtttatcagttcttgtttgcgcgtttacgctcaagctcatcgaggataaccttacgcatacgcattgatttaggagtaacttccacgtattcgtcttccttgatgtactccagtgcctcctcaagagagaactgtacgggaggaatcagacgtgccttatcatccgaaccactggcacgcatattggtaagcttcttggacttcgttacattaatcaccaagtcgttgtcatgggaatgctcgcccactacctggcctgcataaacctcttcctgcgggaaaatgaagaatttgccgcggtcctgcaacttgtcaatggcataggcaaaagccgtaccggactccatggcaatcatagaaccgttggtacgccgttcaatctcacccttatacggttgatattccttaaaacggtgtgccatgatagcctcgccggcagaagcggtcaacacattggtacgcagaccaatgataccgcgcgacggcatgtcgaactcaagatttacacgttcgccggcactttccatcttcaccatttcacctttacgacgggtcaccatatcaatcatcttgctggcatattcttcgggaacattgatggtaagctcttcaataggttcgcatttcacgccgtcaatctccttgaagattacctgcggttgccctacctgcaactcatacccttcacgacgcatggtctcaatcagtacggaaagatgaagcacgccacggccggaaacaatccacttgccgtcttcctcgctcttgcgcacgcgaagtgcaagattcttatccaactccttcatcaaacggtcgtggatgtggcgggaagtaacaaacttaccttccttaccgaagaacggagagtcattaatggtgaagagcatactcatcgtaggttcatcaatggcaataggcggcaacgcttccggattttcgtaatcgcagaccgtatctccgatttcgaatccttcgatacctaccaacgcacagatgtcaccggaagacacttcctgcacctttacacggcccataccttcgaatgtatgcaattccttgatttttgatttcacgatactcccgtcacgctttgccaaagacacattcatgccttctttcaatatgccacggtgtacgcggcccacagcaatacgcccggtatacgaagaataatccagcgaagtaaccagcatttgcggtgtaccctccaactgttcgggggcaggaatattctccaagatacagtccagaagcggataaatgttatcagtcggctgctgccagtcggtactcatccaattattcttggcagaaccgtagataacggggaaatccagctggtcctcggttgcattcaggctgaacatcaagtcgaacaccatctcgtacacttcttcgggacggcaatttggcttatccaccttattcacaacaacgataggtttcagaccaatctgcagagctttctgcaatacaaaccgtgtctgcggcataggaccttcgaaagcatccacaagcagaatgcatccatccgccatattcaatacacgttccacttcacctccgaagtcactgtgtcccggagtatcaataatgttaatcttggtgtctttgtagttgatagaaacgttctttgagagaatcgttatacctcgttcacgctccaggtcattgttatccaacattaattcacctgtgctctggttgctgcggaaaaggtttccggccaaaagcatcttgtcaacgagcgtcgttttcccatggtccacatgggcaataattgcaatgtttctaatcttttgcatataatacctattattttcaggcgacaaagttagtgattttggattagatatgcagtatagatatgatttttttgctgaatatcattgtgatataaaagtttatccctatctttgcagccccgaaagggaatatttataataacttttaattaaacattatgtatttagacgctgctaaaaagcaagaaatcttcggcaaatacggaaagtctaacactgatactggctcagctgaggctcagatagctttgttttcctaccgtattgctcatctgactgagcaccttaagctcaacagaaaggattatagtacagaaagagctttgactatgttggtaggtaaacgccgtgcattgctgacttacctgaaggatcgcgacatcaccagatatcgtgctattgtcaaagaactcggcttgcgtaagtaatctacttgcggcaaaaccattaaaaaaggaagttttccaaaaggaaacttccttttttgtttataatccgatttatacgtaattttgtatccatgaaaaggaaagtatcagcagcaaatctttcgatagcaatcacttttctattggtactgctatcattcggcttcggttatcgcagctattcgcaggcagaacaacgcgtggtctctgacctgaatcaagcgctgcaacacacagtattgcagcacaagggattatggttgaatgcagataccatccaaacctatgccaagttgcaagaagtgatgggtactcccgtttccgtaagcggtttccacagagcctttaccgaagcattgtccatcaccggattgaaagatgtttctaccctttcgctacatatactgaaaaagaatgctcccgccaccgtattcaatgagattcctgccggatgtcttgccagcgacacattggtatggctctccaccacagccgatgcatctgggctgacactttctttccggggatatgcccgctgctcagctgccatgctgttcagcttatccaagcagacaattccggcaacattgctattggcagccttgctgtggggaggattcactttcttctatttccaccggcacacaaagactaatgccagtaacgggcagcaacaagaaaacttcattaccttcggcaacctttcgctttccctccaggaagcctgcttctataacgaacagcaggaaaagctaaaactcacccccatgcagtacacactgatggagatgttctacctttcttcctcacacctacttttcaaatccgacatctgccaatcgctatggccgggaaaagacaatgcagacgaaacgctttacacattgatacggcgtctgaagcccattgtcgaggacaacagcaacctcagaataacaacagatcgtggccgcgcctacggactggaaataaaaacctaaacattatagaatcatgaagactaacaaacttatcctattagggctaatctgcctgactgtcgcaatgccgacaaccgcccaaaaccgtaacgaaaagaaagagcgcactgaacgtgctgtaaaagaagctattgctgctaaacaatacaaaatcaacgtagatcggatgcaaccgatgagaggcggtagccgtaacttgaccaccaactacacactggaaatcagaaacgactccgttttctcttacctgccttactttggagtggcctacaatgccccgtatggaggaggcaagagcctgaatttcaatgcatccatcaccggatacacaaccagagcactcaaaaaaggcaaaatccaaatagacttcaagacccgtagtgatgaagacaattatgagtaccgcctcaccatctttcccgatggttctaccagtatccatgtgcaacccatgaacaaacagtccatctcgttcaccggagagatggatacagaaaagtaatcatcttccccctttaaaaggacaaaagaaagtattgtcagtctattgtcaggcaaatgtcagacaactatccgctttttgtttcttccatcccggcagaaagcagataccttcgtgtcccgaaatcaaacaacaaccggaacatgaaacagataatatgtattcttgccctgctcctaatgagcgtcacgacaacaaaagcacaaaccagcccggcaacaccctccatccgaggtaaaattctcacagaggaaaagcaaccgatagagtttgccaacatcgccctcctttccgaagattccaccttcatacaaggaacgtgcagccgaagcgacggtagttttgaacttctccctcccgctcccggaaactatctactacaagtttcttccatcggttacaaaaccctttgccagccttgccccaccgggagtacccacaactggatattgcaaaccgatgccgtgctacttgcggaaaccgtcatcaccgccgcccgccccgttttccgactaaagggcggaaagttggagacaagcgtacggcaaaccctgctagcatccttgaatgatgccaacgacgtattgaaacatatccccggactgcgctcctctgatgaggggtataccgtttttggcaaagggacaccggtcatctatatagataaccgccttctgcaagacaactccgaactacaacgcctctctgccgccgatattgaaaaagtggagctcatcaccaacccgggtgcagagtacgatgctaccgttaaagccgttgtgcgcatacgcaccgtacgtaacaaaagagactgttttggcggtaatttccgtgcaggaatcacccaacggagacgcagcaaccattacggacaagtcgatctgaattatcagaagaaaggactgtccctactgggcatgctatacatcaattatgaaaacagaaaacgccaccaggaggttcgctaccagataccgtccgaaatacaatgggatgtaaataaccgggttcacttgtataataagggactgcttgccggaggaaaagcaagcgccagttacgacttcaccccccaacacagcctcggtgcctcctatgagtttcatcgtacccccgattatcacagcagtgaccattcggcatataccgtccgggcaaatgaagaattggccgatcataccatacattcctcccaaaacttgcagcaaaccaaccggcaccagctgaatgcctactatcagggcagcataaagcaactccacataaacttcaacaccgacctggtatacggcaaaagctatgatcaccaggaggctcaagaagaaagccagaccgaaggcaatcgcgacatcagctctttcaaccacgccgacaaccgcctttatgccgccaagttgattctgacccatcccctttggaaaggtgaactgaagaccggtgccgattacaccttcatccggcgaaatgacaatttcctgaaccggcagcacatacttcccgatacagacagtcaaatcgacgaaagcaagtctgccgtctttgccgaatactcactgacattaggaaaaatcagccttcttgcaggactgcgcttcgagcatgccgtctccgactattgggagcaggaaaagtacgtgtccggtcaaagtcgtacttacaatgactggtgccccaacctatcggtagactttcctctcggcaaagcccaagccaatctcagctatacagccaaaagcaaccgccccagcttcttccagctacgtagcacactgagttataacaaccgtttcatctacgaaggcggaaacccactgctcacccccgaaaccaaccacgacctgcagttcacggccctttacaagtgggtacaattcggacttaactaccaataccgccgcaatgccattgccttcatgaccaaagaatacgaggacaatccggatgttgtcatcttcactaccggaaatttcaaacggatgcagtatctcaccgcctctgcccatctgtcacccaccgtcggcatctggaaaccggagctcggcatctacttcgcccaaccgttcttcaaagtcaccaatcaaggcagtagcaagaatatgaaccgcggcagcatttacctctttctgcaaaacagtctccagcttccggacgagtggattctctcccttgatgccgactaccagagcgaaggcaacttcggcgccatgctgcaacgttcctattggggcataaacgccggcatccgcaaaacattcttcaacaaaaggctgacgctcggactgcaagccaatgacctgtggaattcccggtatggctccttcatgctgttcggtccccggctgacctatacgaaaaaggcaaacccggactcgcgcagcttctccctgaacctaagctatcgtttcaatgcagcaggcaaagcgtacaaaggaaagcacgtatcggaacaagacttgaagcggctataaacagaactttggggaagaaagagaaacagaacagaagaatattatacaaataagccgaccaccggagatatttcagcaatattttccctcagaatgttgcatcaagtaaaagtttctcttatttttgcggtttaacagctataaattataacctttagacagaaaatactatcattatggataccagcaaaatcgtaggagaaaaaataaaatcactccgtgaaagccaatccatcagtatggaagaactggcacagcgttcgggacttgctatcgaacagattgaacgtatagaaaacaacatcgacctcccgtcactggctcccctcatcaagatagctcgtgtgctgggtgtacgtttgggaacttttcttgacgaccaggatgagaacggtcccgtggtctgccgtaaggacgagtcgcagaacagtatcagtttctccaacaatgccatccacagccgcaagcatatggagtatcattcactctccaaatccaaagccgaccgccatatggagccgtttatcattgatgtggccgctacggacgacagtgactttgtactctcctcacacgaaggcgaagaattcatcatggtgatggaagggaccatggaaatcagttacggcaaaaatacctacctgctcgaagaaggtgacagcatctattacgattccatcgttccgcaccacgtacacgcctatgaagggcaggcagccaagatacttgcagtagtttatacacctatttaaattaatggaaaggtgaaaatggaaaatgataaatactttctattttcacctttccactttcaacttccacatcatgttatacgaacgcaccctcggccaatggttggaacattgggccgaaacaacaccagacaaagaatatatcgtttactctgaccgcaacctgcgcttcacctggagccagttcaaccgccgggtggacgacatggccaaaggacttatcgccatcggcgtggaacggggaacacacgtaggtatctgggcagctaacgtacccgactggctgactctattatacgcttgcgccaagataggtgccgtctacgtaacggtaaacaccaactacaaacagtccgagctggaatatctctgccagaactccgacatgcataccctctgcatcgtcaatggcgaaaaggacagtgactttgtgcagatgacctataccatgcttccggaactgaagacttgccaacgcggacacttgaaaagcgaacgtttcccttatatgaaaaacgtcatctacgtggggcaggagaagcaccggggcatgtacaacacggccgaaatacttctcttgggcgacaatatagaagacagtcgcctgaatgagctcaaaagtcaggtcacttgccacgatgtagtgaacatgcaatacacctccggcactacgggattcccgaaaggcgtcatgcttacccactacaacattgccaacaacggtttccttaccggtgagcacatgaagtttaccgctgatgacaagctctgcgtctgcgtaccattgttccactgctttggcgtggtacttgccaccatgaactgcctgacacacggctgtacagaagtaatggtggaacgcttcaacccactggtagtgctcgcctctatccacaaggagcgctgcacggcactttacggcgtacccaccatgttcattgccgaactgaaccatccgatgttcgacatgttcgacatgtccagcctccgtacgggtatcatggcaggttccctctgcccggtagagctgatgaagcaggtggaagagaaaatgtacatgaaggtaaccagcgtttacgggctgaccgaagctgctcccggaatgaccgccacccggatagacgacccgttcgatgtacgttgcaataccgtaggacacgactttgaacatacggaagtaaaggttatcgaccccgaaaccggagaagagtgtcccgtaggcgtacaaggtgaaatgtgcaaccgcggatacaacaccatgaagggttactacaaaaacccggaagccacagccgaagtcattgatgagaacggcttcctgcactcgggagaccttggaataaaggacgaggacggcaattaccgcatcacaggacgcatcaaggacatgattatccgcggtggtgaaaatatctatccccgcgagatagaagagttcctctatcaactggaaggcgtaaaagacgtgcaggtagccggtattccctctaagaaatacggtgaagccgtaggcgctttcatcatcctgcacgaaggagtggatatgcacgaatcggatgtacgagacttctgcatcggcaaaatatcccgctacaagatacccaagtatatcttcttcatcaaagaattccccatgacgggaagtggcaagatacagaaattcaagctgaaagacctgggattacagctttgcaaggagcaggggattgagattgtgtgataataaaggataagagataaggggttagcgattagggattatttggggccgcatagactttaatataggcataaacccatccttaatccctaatcgctaacccccttatttttcttctttttccggatacttcatattctcctctttcatctgttccaagacctcatgcaggtatttggcagactcccatttagccatcggaaggtcgtggagcaggtagttgccgcaatcttgcggagcggcaccggggacttcaccttcatattcggcaacaaagcggaaggtgtcctgcatcagcgccagtatgtcctgcggcttcaagtcacctttcatcagcagataattaccggtgaggcagcccatggggccccaatagataatcttgtcctgccactgcgggtcattacgcaggtaggtggcggcaagatgttcgatagtatgcagagcaccttgtcccaaggcaggctcacggttgggctctttcatacggatgtcgaaagtagtgactgtttctccgttcacttcatcctggcgggatacgtaaataccgcgcaacaagcggatgtggtcaattgtaaaactgggaatcttcttcatgagttatgagttataagttatgagttataaattgctgggaagggtggagaggaaggtccatatcgtgaggaacgaacgctctgccatggttccccagaaatcggcatactgcgaagcatggtcctctactccgggtgtgtcgctgatgatgcggaagctgagaaaaggaacattgtacagatagcaaatctgcgcaatggcggcagactccatatcaacggcaagaccgtcggggaaacgttgcttgatggtatccagctccgtacggttggtgatgaactggtcgccggtacagacaagtccactgtggatgcggctttccattccggcttcgttcagcgacaaggcatgtttcaacagagaggaacatccctcgtaagaggcgggaaaaccttgcacttgtccgtactcgttaccgtcgccgcaccagacgtcgtgatacaccagacgttggcttgccactacatccgtcaccttcaggcaagcatcaatgccgcccgccacaccggtgctgacgatgcagtccggagaaaagcgccgtatcagttccgaagctcctaccgctgcactcaccttaccgatgccacattgcgtcaagattacatggttaccgcccaatgtaccttccacatagcggaaactaccatcgcccgacgtattcttatcctgcaagcgctccaccaaccggcggtgttcgctgtccattgcactgattatccctattgtcatatctataataatttaagcttgcatattaccattaaagcactttaatctttttttggaaaggcaaaggtacaacattctgccgataacgtgacaataacaatctgcatttatgtatctttgccacaaaagcgaagataggctgcacctcaacaaaactttttcacgcaagcatgaaagttctgtattcggtttgcactatctttgccccacaattgattaattgataactcataacttataactcatgaagaagcttcttcccgaccttattgccatcttggcattcgtcctcctttccttcgcctacttcttcccggcggatatagaaaaccgtattctctttcagcacgacacggctgcaggagcaggggcaggacaagaagtcaaggagtattacgaacagacgggcgaacgcagccgttggacaaactcgctgttcggcggtatgcccatgtatcagatagccccttcgtatgactccaccaagtcactgcagtgggtacagaaagcctaccaactcttcctgcccgactatgtgtgcctcacattcatgctgatgctcggcttctacatcctgctgcgcgtcttcggcataccggtctggctggccggactgggcggtatcatgtgggcattctcgtcctatttcttcatcctgatatctgccggacacatctggaagttcatcacccttgcctacgtgccgcccaccatagcaggcattgtgctcgcctatcgcgggaaactgctgtggggaggcatcctcaccgccttgttcgtggccctgcaaatcacctcgaaccacgtgcagatgtcctattacttcttcttcgtcatccttttctttgtgggagcctacttcgagaaagcatggcgtaccaagacattgccccagttcttcaaggcaagtgccgtactgattgtggcagccctcgtcggcatagccgccaacgtatccaacctctatcacacctatgcctacagcaaagaaaccatgcgcggcaaaagcgaactggtgcagaccggcgacgctgccaagcagaccagtagcgggctggaccgcgactacatcacccagtggagctacggcatcgacgaaacactgactctgctggtgcccaacttcaaaggcggagcatccgccgctctcagccagagtgaaaccgccatgagcaaggcaaacccgatgtacagcagtctgtacggctcactgacacaatatttcggtacccagcccatgacgtcgggtcccgtctacgtcggagcattcgtcttgtttctgttcgtactgggatgcttcatcgtgaaaggaccgttgaagtgggcattgataggagccaccctcttctccatcgtcttgtcctggggcaaaaacttcatgccgctgacggatttcttcatcgattacgtcccgttgtacaacaagttccgcgccgtgtcctccatccttgtcatagcagagttcacgatacctttgctggctatctttgccctgaaacgcctgctcgaagagccggaaatcttaaagcaggaaaagaagcccctcggcatcagcctgctgctcactgcaggcatcgccctgctgcttgccgttgccccgggcagcatcggctccggctacgtgcccgcccaagaggcacagatgctgcagaatgccgtcaaccagcagatgatacccgccaacgaactctccggcatccttgccaacttgggagagatgcgtgccgaactcgtcagcagcgacgccctgcgtagcttcatcatcataggcatcggctgcagcctgctctggctctatgcaagcggcaagctgcgcagctcgctgaccattgcaggtatcaccatactctgcctggcagatatgtggggggtcaacaagcgctatctgaatgatgcccagttcgtgccccactccatccgtacggaaaccttcaccaagacgaatacagacgagttgatactgcaagataccagcttggactatcgtgtattgaactttgccaccagcaccttcgatgacaacaacacctcctactggcacaaaagcgtcggcggttatcacccggccaagctgcgccgctaccaggaaatgatagagcatcacatctctcccgaaatgcaggcggcctacaaggccattgccaccgccggaggtgagatggacagcgtggatgccaataagttccgcgtactgaacatgctgaacaccaaatacttcatcttccctgcaggacagcaaagacaaaccgttcccatcctcaacccgcacgcctacggcaatgcatggtttgtaaacaaggtgcagtatgtgaacaacgccaatgaagagattgacgccctggacagcattatacccacagagacagccgtagtggatgcccgcttcaaggatgtactgaaaggtaccacggaaagttataaagacagcctctccagcatccgcctgacaagttacgcacctaaccgcctgacgtacgaaacgaacaatgcccaagacggtattgccgtattctccgaaatctattatccggacggctggcacgtaaccatcgacggacagcctgccgaactggcacgcgccgactatatcctgcgcacaatgtatgttcctgccggacagcacaccatcgaaatgcgctttgaccccaccagcctgcacgtgacggaaggcatcgcctacggagcactggcgctgctggtgataggtatcatcgtggcagtgctgatagctaaaaggaagtatgtaaaggcataagaacaaatatcatatcattcccccacaagcacccgacgcattccgctattcataccctgatacggaatgcgtcgagtgcttatgtccgttccgttatcccctcatgtttgttctgtcattcccttatgtctgttctgtcaacccctatatattgatgaaaaaccacggctgtgaagcatattcttcacagctgtggcacgtcttcttcacgactgtggaaaaggcgtaccacagccgtgcgcacatgataagcccaaaggcttctcaagacaaaccaccgtgcaaaacacaacagaagcctatgtagcacacaacggaagcctatgcaagagacaagaaagcccggtcagatgcgcaaaaaaaccgtttctaccctcccgggtaaaaacggttcaagtcaataatacatgaaaaaacgctatttagagagagtctcttctataacggaatggttctcttccttcttcactcatcatcagcagttctccgaactgacatcaaagttagggaagcataacaagaacaacaaatagaatctacgaaaaggcatatctcatcgacagaacggaaaagaatgaaccctacaatagggaaaagaatgaaaaaaaagctataaacagtcggcagaacgatatatttcagtaactttgctaacgtgaaaacaggctgcaccccagcataaaaaaatgaacagtatggaaactaccagacaaaataaaatagcccgtctcctgcagaaggaactgagtgatatcttcttgttgcaaaccaagtccatgcccggcatactgatttccgtcagtgccgtacgcatcagccccgacatgagcgtggcacgcgcttatctcagtatattcccctcggaaaaaagcgaagaaatagtcaagaacatcaacggaaacatgaaatccatacgctttgaactgggtacccgcgtacgccaccaactacgcattatccccgaactgaagttcttcgtagacgactcactggactatctggaacgaattgatgaactgctgaaataatgtcccttcccttctttatagcccgccgctacctcttctccaagaagaaacacaatgccattaatatcatctccggcatttcggtgtgtggggtggcattggctacgttggcgttggtatgcaccttgtccgtgttcaacggttttcaggacatggtggcaggctttttcacagctttcgacccggaactgaaaatcaccgtccgcgaaggtaaggttttcgacccgcacgaagcgtgcatccggcaagtacacgccctgtccgagattgacgtgtggacggaaacactggaagagaatgccatggtgcagtacaaagaccgccaggcaatggccgtcatcaagggagtggaggacaatttcgaacagcttacctccatcgacagcttgctctatgggacgggaaagttcctactgagcgactcggtggtggactatggttttctgggtgtggaacttatatccgagttgggcaccggcattcagttcgtggacccgttgcaggtctatgcccccaaacggaacgtacgggtaaacatagccaaccccactgcggctttcaaccgggagtatctcttctcgcccggcgccatctttgccgtcaaccagcaaaaatacgattcacgctacatactgacgtcactcgactttgcccgccgtctgttcaattatgacacggaagtctctgccatcgagatgaaactgaaacccggttccaacatcggctccgtacaaaagaaaatagcaggcattctcggcgaccggttcattgtacagaaccgctacgagcagcaggccgatgttttccgcatcatggaaatagagaaactcatctcttatctcttcctcaccttcattctgggtatcgcatgcttcaatgtcatcggttcgctgtccatgctgatactggacaaacgggaggacgtggagacactgcgcaatctgggtgccgatgaccggcttatagcgcgcatcttcttgttcgaaggcaggatgatttctgtattcggcgccctctccggcatcgttttaggattgttgctgtgctttctgcagcaacgtttcgggttgatttcattggggggaggcaatggaagttttgtagtggacgcttatccggtaagtgtacatgccacggatattattctggtattcttaacggtcatcactgtaggcttcttgtccgtatggtatccggtgagatacctcagcaagcggctgctgagaaaaagataaaaaaacagttacttcttacggataatcgtcaatccgtcacgcaggggaagaatgactttctccacacgcgcatcccgcgccaccaaatcattgaaggctttgatactgattgtttgcaggtctgtgcgatggggttgttcttccagcacatggccatcccacaaggtattgtcggcaatgatatatccaccgccggaaaggcgggcgagcaccatttcataatactctatgtatttacgcttatctccgtcaataaaggcaaggtcgaaagtgaggtccagttgcggtacccgctccaaggcatcgccaatgtagaacctgattttatccgcgtaatcggaattctccagccacggacgggtgaagtcctcctgctcgtcgttgatttcaaacgtatgcagcatcccgccctccggcagtccttctgctatgcaaagtgcggaatacccgctataagtccctatctccagcacctgccggggacgaatcatccggacaaacatcttgagcatacgcccctgcaaatgtccggaagccatgcggggatatagcaacttgacatgcgtgtcgcgatagagcgctttcagataatcgccctcatcatcaatgtgctgcaaaatgtattcgtcaatcgtcactttgttaatggattataggttagggataagggattaggggttaggggttagttctgcgcacaattattaattaatcattaaccgctaatccctaaccccttatccttaatcccttatcctacaagtatctgttactgttaggcagcacactatcttcagcatgcttcaaggcatcttctacgacattgatttcaaggaaagaggtctgtgtgccttccttaccgctactcaggtagcccaccatgtccgtaggacataaacggccttccttcaacaagcgacgcaaggctgcaaagtaatattcctgcccgttggcaagttcgggcatatagatagcttccacaccgtaggaaagggcaaggtgccgcatggtcttttccttgtagcagatggccaacaccggatatttgccacggaaagcggcaaggttacgggcagtacggccgctgtaactgtcggtgatgattgcacggattttcagtttggtggtagcctttaccgcttgtttggccaggaacgcagtcacgtcgttgctgttctcgtccagcggaatacggatatcgttgtcagacagcttgtctttctccgcttgggcggcaatcttggtcatcgtcttcaccgcttctaccggatactttccataggcggtttcaccgctcaacatcaaggcatccgtacgataatagatggcattggcaatgtccgttacctccgcacgggtgggacgcggattggaaatcatggtatgaagcatctgtgtggcaacaatcaccggcttcttggcaagaatacacttgcggatgagcacacgctggatgcccggaatacgttcctgcggaacttcaataccgaggtcaccgcgagctatcatcacaccgtcggctacttccaggatttcatcgatattatcaacgccttcctggttctcaatcttagcaacaatacggatatcgctgttatgagcgtcaagaatcgccttgatgtcgagtatatcctgcttattgcgcacaaaggagtgggcaatgaagtctatgttcttctcaatggcataaaggatattggtgcggtccttctccgtcagagaaggcagattgatgcggacgccgggaacgttgacgctcttgcggctgcccagagtagcctcattctgtacttcgcagagcaggtagtcgggggtcttctctacaacaaccaactccaagtcaccgtcatcaataaggatatggccgtccacattcaagtctttgacgaaatggggataggataccgagatacattcacgggtagtctcctgctccgggttgcctaccaccttcacgcggtcgcccgccttgaaaggaatgggctcagccagaaccgtcgtgcggacctccggtcctttcgtatccatcaggatagcgatgcggttggaaaccgaacgcacattgttaatcaacttctcggcaccttcacggccaagatgtgcagtattcatacgtacaacattcatacctgcatcgaacaactgctttataaaatcaacatcacagcgctggtcagaaatcgttgcgacaatcttcgtttgcttcaataacataatctatatacctattttatttaataatcttttaatgcctccatggccagacggtaggagttcagcccgaaaccgagaatgacacccttgcaagcgcaggaaatcatggacacatgacgaaaagcctcgcgggcatgtacattagagatatgcacctcaatcaccggagaagtgaccgaacggatagcatcttgcagagcgatggacgtatgggtgtaagcacccgcattcaaaatgatgccgtccacatcaaaacctacctgctgaatcttgtctatcagctctccctcaatgttggactggaaatagtcaatctgtacatccgcatatttcttacggagttcggcaaggtagtcttcaaaagtaacgctaccgtaaatggaaggttcacgtttgcccaagagatttatattggggccgttaataatctgtatcctcataacacaattttttatacctttgcggtgcaaagatagtgcaaaccgaaagcagatgcaaatttatttgcaatttgctgaaatgcagcctattttcgcgaagcaaaggtagaaaaaagaaatgaaatcagaagaaaaatccacgaataaggagaaacaaacgctgataatcagaaagtaccaccagtatctgaaactggaaaaagcactctcacccaatacagtggatgcttaccaaacagacttacagaagctgctgcactttctggaaggagagggtatcgctatccttgacactaccctggatgacttgcagcattttgcctccggactgcacgacatcggcatccatccccgctcgcaggcacgcatcttgtcgggcatcaagtcattcttccatttcctcgtcatggccgactacctggagggagaccccagcgaactgttggagggacccaaaatcggattcaagcttccagaagtactgacagtggaagagatagaccgcatcatctccgccattgacctaggcacaaacgaggggcaacgcaaccgggccatcctcgagactctatacagttgcggcctacgggtatcggaactgtgcaacctgaaaatctccgacttgtatttcgacgaaggcttcatcaaggtagaaggtaagggcagcaaacagcgccttgtacccatatcgtcccgtgccatcaaggagataaggaactggttcgtggaccgcaatggaggctggaaaatcaagaaggacttcgaggactatgtattcctggcacgctggggcaaaaatatctcgcgcatcatggtattccatctcatcaaggaactggcggagaaggccggcatcaccaaaaacatcagtccgcacaccttccgccattcctttgccacccacctgcttgaaggaggcgccaacctgcgcgccatacaaagtatgctgggtcacgaatctatcgctacaacagaaatttacacacatattgaccggcacagattgcgcagtgaaatcatagaacatcatccccgcaatataaagtaccgcaaagagcgggaaattcattaaattatgataaaattgctgcgcgagttaacaaactataataggatttaatatctttgcgttgttgtgtccatgcccaaacagtacactaaaatggaatagacaaatttcaattacaaacaattaatttatacctaaaatgactaagaaattgtatctgccgtttttaatggcaatggttgttgcattaatgacatcgtgcagcaaaaagatgggtgaattgtcatcagattatttcaccgtaactcctcaagttctggaagctgtgggtggtaaagttcccgctacaatcaacggaaaattccccgaaaagtacttcaataagaaggctgtggtagaagtgacccctgtgctgaaatggaatggcggcgaagctaaaggccagtcggctgtgttccaaggcgaaaaagtagaaggtaacgaccagactatctcttacaagatgggcggcagctacactatgaagacatctttcgactatgtaccggaaatggccaaatccgaactgtatctggaattcaaggctacagtaggcaaaaagactgtcactatccctgctgtaaaagtagctgatggtgtaatctccacttctgagatgctggaacaaacattgggcagcgctaaccccgccaatggtgacgacgctttccaacgtatcatcaaagaaaagcatgacgccaacatcatgttcttgattcaacaagccaacgtacgcgccagcgaattgaagactgccaaagaattcggcaaagaagtgaaaaacatagacgaagctgaaaacaagaaaatcagcaacatcgaaatctccgcatacgcttctcccgatggtggtgtaggcttgaatactacactggctgagaaccgccaggacaacacggctaaaatcatcaacagagatttgaagaaagcaaaaatcaatgcagcagtagacaccaagtatacggctcaggactgggaaggcttccaggaactggtatccaaatcaaacatccaagataaagaattgattcttcgcgttctttccatgtatcaggatcctgaacaaagagaacaagaaatcaagaacatctcttctgtttataagactttggctgacgaaatcctgccgcaactgcgtcgttcacgcctgactttgaactacgaaatcatcggtaagtctgacgaagaaatcgcaaacctcgccgacagcgatgccaagcagctgaacatcgaagaattactgtatgccaccaccttgactaaagatgctgccaagcaagaagccatcttcacaaaagctactcaaatctacccgaacgatttccgtgcttacaacaacttaggtaaactggcttatcaggctggtgatcttgacaaggctgaaagctacttcaagaaagctctctccatcaaggatgctcctgaagcaaacatgaatctcggtctgattgccttgaccaagggcgacagaacagcagcagaaagctatctgagcaaggcttccggttctaaggaactgaacgaggcattgggtaatctgtatgttgctcaaggacagtacgacaaggctgtcagctcatttggcgacactaagactaacagcgctgctttggcacaaatcctggctaaggactacaacaaggctaagaacacactggctgctatcgaaagaccagacgcttatactgactacctgatggctgtacttggcgcaagaaccaacaatacatctatggtaaccagcagtctgaagaatgccattgcaaaagaaccggctttggcaaagaaggctgcttctgacctggaattcgccaaatacttcactaacactgactttatgaatatcatcaaataataaaggttagattgaaaagaacgtgcccggcatagaaatatgtcgggcatttctttttattcacaccaaaaagaagtattttcgcgacgaagtatcagaaaaagaaccggaatgaagaaaatatatcttgcataccttctgcttattatattgtctgcctgcggcagcaaaaatacaaattcagtctacctaaatggtgaaatcaaagggctggggaatgataccctttatatatatggtacggacaagttctataaccgtatggacactctgcttgtcaaggatgacaagttctctgcaaccctcaccaccgacacacttgcctctacatggttgcaattcagtgacggtacggaatatccgctttacctggacaaaggagacaacataaagataaaaggttctgccgccgaacttacttcactggaaatcacggggaatgttcccaatgaagaactgaccgcctttcagaaagagttgaaaggtttgagtactccctcggagaaagcattggaagaaaaagcagaagccttcatcaacagccatccttcttcactggtaagtatctatctgctggagaaatatttcgtgcaaaaaccgcaaccggacttctccttaatcaaagaaatgacagaacacatgaccggaggcctgaaagaccgcccatatgtggacgaactgcttgaccttatccaagaagaagagaaggtatccgtcgggaaaaccatcccttacgtcaacctgcccaatgccaaaggcacacaaatcagccgtactagctttaaggacaaatatctgttgatacatttttgggcatcttgggacccgcaaagcatggaagccaacgctgccctgcgccggatttacaagaaagaagaaaagaacaagctattcgcactctggggcatttccttggatatcgacagaaaggaatgggaagaagcaatcaaaagagataccctgaagtgggaacagagttgtgatttctccggatggaacacagcgcccatcaaacagctcgccatacaagcattgcctgccaatctgttccttagcccttccggaaaaattgaagggaagaatatgagtgaggaagacatcaaaaagaaactggaggagatagagcaaaaggaaaaagagaagaaagagagtgaaaagaaactcaaaaaacaaaaccgacggtagcctatcctgccatcactaacccctaatcactaaaaacgtgctcataaaagtttttggagcggctgttcaaggtattgacgcaaccctcatcaccattgaagtcaacagttccagaggctgtatgttctatttagtcggtttgccggactctgcggtcaaagaaagccatcaacgtatcatatctgctttgcaggtcaacggctaccggatgccgaccagcaatattgtcatcaacatggctccggctgacatccgcaaggaaggtgcagcttacgatttacctttagccatcggcatacttgccgccagcgaagttatccagtccgataagctggaacgctatctgctgatgggtgaactaagccttgacggcagcctgcaacctatcaaaggagcactccccattgccatcaaggccagagaactggggtttgagggtatgattgtaccgcaacagaatgcccacgaagcggcagtagtaaacaatctgaaagtgtacggagcgggaaacatcaaggaagttatagaattctttaatggcacgcaggaattaacccctacgttagtcaacacccgcgaggaattctattcccagcagagcaacttcgatttcgactttgcagaagtaaaaggacaggaaaatgtgaaacgagccttggaggtagctgcttcgggcagccacaatatacttctcatcggttcgccgggcagcggtaagtccatgcttgccaagcgtctgccatctatacttcctcccctctctttgggagagagtctggaaacgaccaagattcattctgttgccggaaagttgggcaaagacggtggactcatctcgaaacgcccgttccgcgcccctcaccacaccatttctacggtagcgatgaccggtggaggaagtttcccccagcccggtgaaatcagtctggcacataacggaattttatatcttgatgaactgccagagtacagccgtaacgtattggaggttcttcgccaaccgctggaagataggaagattaccgtgtcacgcatccgatgcaatgtagagtatccggcaagttttatgctggtagcctctatgaatccgtgcccatgcgggtattacacgcatcccaccaaggcttgtgtgtgcagtcccggacaagtacaaaagtacctgaaccgcatatccggacctttgctcgaccgtatcgacctgcaaattgaagtcaccccactcccctttgaagagatggcagattctcgccccggcgaatcgagcgccaccatacgcgagcgtgtgatacgtgcccgacaaattcaagaagcaaggtatgcagacattcccggcatatattgtaatgcccagatgaacagtaaactgcttgctcgccacgcccgtccggatgacaaaggacttgccatgctcaaaactgccatgaaccgactgaacctttcggcccgcgcctacgaccgtatattgaaagtatcacgcaccatcgccgacctggaaggctgcgaattgatacagccggcacacttggcggaagctatcggatatagaaatctggatagggaggactgggcaggatgaaaaagggattagcggtgagcgattaacagccagcccctttaatccctaatctctaacccttatttctctatccgaatgcgcgcatccaccgctatcacctgcttttcagtcgccaacaatggattgatatccatctccttgatttccgttgcaaagcgcagcaaggtggaaagccgtacaataatttcggcaaatttatcttcattcactcccttctgcccacgcgtacctttgataatcttataggcacgcaacgagtgaatcatggagtaagcctcctcgtaggacaacggtgcaagaccggaagatatatccttcagcacctccacaaaaataccgcccagaccgcagagtaccacatgtccgaacttctcttcatatttggcaccgataaacaattccgtccctttcaacatcggctgcaccatgatagcactagcttcgggaatctgcatcatacggtcgaattccaatgccaaatgctgttcactcttgatattgagcacaacaccgcccacatccgacttatgcaccggccccaccacctttgccaccaccgggaaccccgtgcgacgcgcaaaggcaagcacttcttccttgttgtccgaaacaaactcctccacaataggaatacctgcagagcggagcaatgcctgcacatagtgcggggcgatataaccgtccgcaggaatggaatctataatccggcggatacggggaacatccactccaaagagctcgatttcattattggcaggccgcggggcattcattatccgcgaaagtgccgtgccgagagtcacctcatcggcaaagttcacatggccctttgccaggaaagcggcaacctcggctcccgccgtattgatggaaggaagaatcggaaaaatcggcttcttgcaatgcagcatcttctcgtgcagcacatcatacatttcaaacatggtcaccagccccggagtgccgaaaatagccattacagcatcaatattgtcaaacttctcctcacaatactccagacagaggcgcagatgttccggcgtacccgtagccagaatatcaatgggattccccacagccgcaccggggaaaagcttacccttaagttcctccgccaccggtccttccagtttcggaacattcagtccacccttactcaatgcatcggtcagcatcactcccggaccgccggcatgggtaatgatggcgaagtttttccctttcagttccggcagtgtgaagatacaacctacggtcgtcaactcctcgcgcgaatagcaacgcacaatacccgccttacggaacaaggcctctaccgccgaatcgctactggcaatggcccccgtatgcgaactcgccgcccggctgccgctttcgctactgcccgccttgatggccgcaatcttgcagcccttcttgatgagcgaggatgcatgaaacagcagacggtcggggtcaccgatactctctatataaagaagttttattctggaatccgcttccggattgaagtgttcgtccatgtattgcaacacatcctccacgccgatttgcttggcattgcccacagaccatacagagttgaactgcaatcccttggtcacggcgctctccaatatgaacaccgctgtggcaccggagctggaaatcaggtccaccccttgcggatgcagttgcgggatgggctggctgaatacactgtgatgccacgagttcataaaaccgatacagttggggcctatcagagaggctccataccggttcaccgtttccagtatgcgatcttccagcacagcaccctcatgggtctcctcaccaaaaccggcagaaaggataatgaacgccttcacctgcttctccgcagcaagcatctccaccgcatcgggacaaagcgcggcaggtatggcaaggatggcaaggtccgtatcgggaatgtccttcacatccgcaaaggcagcaacaccctgcacttcagtctctttcggattcacggcacgaagctcaccggtatatccgccgctaagcagatttttcaggatagcccctccgggtttgtgtacattgttggatgcccccactaccacaatactggccgggtgaagtaattggcttgttatcatagtctgttttacattaagttaatgattcatgcacaaatatacattttccatacataaaagcaatcggtaaaagagaaaataagcttaatccctttgcaaaatataaataagtttacggaagtatatatatttgtgccatcaataacaatacgcagaaaactaccctatatggaaagccgtgtcaaagagatagattatctgaaatgcatcttcatcaccctgatgattatcttccaccttgtatatataggcgacaagtatccgtatgcgaaacaaatcgtctatacgttccacatgtccgctttcctgattatttcgggctatctggccaataaccggaaggatgcccgaagctttctccgcaagtttctatggattttcattccgtatgcctgcatggaggcggcctatacggtgatgtcgcatttcctgcccgtacgcgaaagtgtagatgccattactcctaccgtattgctcgacaagatattcctccatccgatggggccttactggtatctgcatacactgattctgtgcagcctcatctattatatcacattccgctatgtaaggctgtcggttgtctcccggctggttgtgaccggtgtctgcctgtttgccctttcccattggggaggattgatgaacttctccaatgccctctatttccttatcggcatgacagtgagccaaagcgggcttcgttttacacaagtctttcgtgccacaaccttcgccattgttccattcgtaatactatgctgttttcccgccaatctggataggggtactctggcaggagtcgccatcacctggctttccatcagcctgctgttggcagcctacggctatctgccggtacaagccaaacggctttccttctttatagggcgcaatacgctggtcatactccttttctcacccattttcaccattctgtccaaggcgtttctgcccgtgttcgccttcgaccctacggggatgctgttccttgtcactgccaccgccttcactcttagcggctgcatgggtatggcgtgggctatggacaagatgcacgtttccagattcttcttcgggaagaggactatattgtgctgagacggttcacgtcttcgcccacaaagggaagtttcaccacaaactccttttcgtccttaagaatctccaccagcgtgccgtatagggcatactgccgctgcaggttcttcaatcccgctccattactggccacatagttgcgcaactgaagattgttgcgtaccgtaatcctttcgtttcctatggatatatggactatcagcggcgacttctttgtactgatattatgcttcaaggcattctccacaagcatctgtatgctggcaggaatgacgagacaatgatgattccgcaaatcatcttctatctccacatgcagcgcatcgccaaagcggatatgctccaggtataaatacgactctacgaacgacagttcttcctgcacggtcaccgtagctctgccatgcgtagtgagcagataacggtacaccgtagacagcttcttggcaaaccggttcgtcttttcggtatcctgataagcaagggaggcaaggacattcagactattgaataagaaatggggattaatctggtttttcagcacctcgaactgatacagcgccttctccttctcgatgacagccatctgcttctctatctccgaacgttgcaggctatagaagaatatctctatctgcagaacgataatccagttccacggcactaccggcagggagtttctcaggatatgccagaaatttccatgcccgcccatcagcaggaagttcaagatgtacgtcaacagaacagccagtgcagtggtcaacacaatatccaccagaatcctcaccgcattgttgcgctgtttcagtcttttatatatcaagttgataaccccaaagtcgatgaaccccagccctatgcacaaaggaagattcagaaagaactgcaccatgatattcgcataccacggcttaccgctgatgacgttataaacgcaccctatgacaagcaacgagacggaaaccgtcagtataaaaaggaatatgtatctcttatgcctcataacttataactcataccactccgtccacccatttcaagaaatcggccacgcgactgcggctcaccaatacctcgtgcgggcactccggctcgaagtaaagcttcaagcgactgccgaagtacctggaactcttccggatggacctaatgttggatatgcagctccttgaaaccctaaagaaaacatccctatccagcattccctccaactggtccagcgagtagctgatgatataccgtttcccggagaagaggtgcagataagtcagcttgtcctcactataaaagaaagcgacatccggagtttctacgtagcggaaggtatcgcccacctgcaccagaaaacggttcttcttgttggctgccaagtagccgagttccagttgccgatattcgggagccgcagtacggagggcactgttgcgctcgaacttgcacaaggctgcttctaggtcgctttcttcaatgggtttcagcagatagtcgatgctgtttaccttgaaagctttgatggcatattcgtcgtaggcggtggtgaagataacgggcaaatcgacgggacactgctcgaatatctcaaagctcaacccgtcggacaagcggatatctacaatcatcaagtccaggctgccctgacgcaagagcagtacagcctgctccacgctctctgcccagcccgccaactgccaggaagggcgcagccgttgcatcatacgcttcagctcttcgtaggcgaagcgctcatcttctactaataaatactttaccataaaacgtgtctgttattgcgacaaagatactattttacctcttgtctttactaaaatggcatttgtcatttcagcgtatacctgaatcccaccgtcaggcgcagagtcggtctgaagcaaggctcgtcctcatcgttcttgaagttattgagaaaacctttcaaactacggtccgacatacttattccgcgtatccagttaccgcccactcccagataaacagccgtcttcctactcaactggtacgaaggactgatgtatgacctcagcatgacggtagaatagattttcgatttcccgtcgacttccatcacggcagacatgccgtccatatcgagggcggtcagttccagcttcagcttcttgttcagccaggtggcgacggacactttcatgccgctggacatatccactttcagctcatacctgccggcattcctccaactgaagtacatcatgggcagtatcatcgggataccgtaagagttcgtcaaccccgcaccgatgcccaagtcgaggttcttccgcagtttatagacaaagatgattgctccattagccagtagggtcttcatggaaaccccgtccaacgaggcatagacaccgccgcccacagaggctatgatactccacttgtcggacaggggacggatgtgggagatattcagactggcattcagcagattgtccggattcaactcccgcgcctgccccttattatggaatacgccataggcagcattgacggttgccgaccacgccaccagcctgcccttgtcgtcatgcctgacggaaagcggcaggttataccttcccgataccatcatcaagctgcccgaaccatactcgttgccgaggtcatccttcaacgaactttcgggcagatagtcgtaactgatatagccttgcccccggcagcagaacggccacgccgcaagccacaacaccaatagaatcacagagtttgtcttcatgggaatatgcaaatgttttctgcaaatataggcctgcggcaagtaagcgggaagcatttacggacgggatgcggaatggggaggacgaaatgcggaaaccggaaggcggaatgattccatgttttacgttacgcatttcacgttacgtaaaatacataatattttcgggataaaacaaatatcaggtgaagcacccatcaatctccaaactaattgtacctttgcggaactttaaacaaaaaaatgatgaaagaagaaactttcgattattccaaagttccccataacttcggcttatgcgctactgacacatgcccttatactgacacctgcctgcgccggattgcatatacgtatgcaccctcaaacaacatcttcctatatgtactgaatccgaaagcaatagagtccacagcgggaaaatgcaaatattattgctcgaataagaaagtgcgctatgccaaaggctttatccatacggcagaagccatctctgtcggccagtccggcacgttccgctaccggctcatcggcttatggggtatccgaagatattatcagaagcggaaaggggaaactttgctctcaccaaccgagcagcaacaagtcattgcaattgcccgtaacttaggactccaacggacggagtacttcgacgcttatgtagaagagtacgacttcacatgacagctccggtcacctcacatgataactccggttaccccaaacggtaacttcatttacactacgaggtaaaaggctttacactatggtgtaacgaccgttacaatatggagtaacggccgttacaccctatggtaaacggctttacattagaaggtaaacaagcggtaaatacaatacgctgatttaaagggaagtattcagtataagattatggcagtatttcaccttccgctgtcacctttacgtagatttccctttccccttgctccatctctaccaaaaagtaactgccatcgggagtctcaataaagtcggcatcatcaatgacataaccgggatgggcagccgtaacggcgttcttcactacatcctccagatgtctcttactgatatcccagatagtataggcccatgcaccctcagcggtgaacatcacatccttgctgatacttccgtgcacgatttcgacttccgtcataccgttcttttctttttcaatatccacaatgcgggcattgggatatttctctgctataaaatctttgatggcagcggaaatatcagaagggagataatcttcgggagaaccgccgttgtgcgcatcggccacttccttcaccagaatgccgtcctccgaataatagaggtccatttcctgattacctttctccacttcgatgatgtagacaacagccatttccttacgttccagcttgtctacatcttccaccttccatacattataataggtactactctcgtaagagcttttcaccggagcgggaaggtctgcataacggaggtcggtttcggtcatctgccatacaccgtctttggtgaaccaggcctccttttcgaaattgtcctcatggaaatcagccacataatatgcaccttttgtttcccattctatacgctgggcattgggatgctccttggccaacgcattactcagttccgcgggcacggagattccgtcgttgtcgtcatcatcacagctttgcaaggcaaaggcaaacacgcctaacgccaataataagaagtacttttccagtttcatagtcatttcgtttttttacattatcaataccaagtttgttcattttgtatggcaaagatgaagcctaaatctggaaagaatctggaagaatactcatattttgcagaaaacagctatctttgtgccactaaaagcgttcataacaaaagagatacataataacacaatggaaaagaaattcaaacgtaccaccgtgacctcggcattgccgtatgccaacggcccggttcatatcggacacctggcaggcgtttatgttcctgccgacatttatgtccgctacctgcgactgaaaaaggaagatgtaatcttcatcggcggctccgacgaacacggagtgcccatcaccatccgcgccaagaaggaaggcatcacccctcaagacgtggtggaccgctatcatacgcttataaagaagtctttcgaagagttcggcgtctccttcgacgtgtacagccgtactacttcaaagacacatcacgacacggcttccgacttcttccgcaagctgtacgataagggagaattcatcgaaaagaccagcatgcagtattacgacgaagaagccaagaccttccttgccgaccgctacatcaccggcgagtgcccccactgccatgccgaaggcgcttacggcgaccaatgcgagaagtgcggcaccagcctcagccccacggacctgattaatccgaagagtgccatcagcggcagccagcccgtgatgcgtgagacgaagcactggtatctgccgctggacaaacacgaggaatggcttcgccaatggattctggaagaccataaggagtggcgtcccaatgtttatggccaatgcaagagctggctcgacatgggcttgcagccgcgtgccgtgagccgcgacctggattggggtattcccgttcccgtagagggtgccgagggcaaagtgctctatgtatggttcgacgcccctatcggctacatcagcaacaccaaagagttgctgcccgacacatgggagaaatggtggaaagaccccgaaacgcgtctggtacacttcatcggaaaagacaatatcgtgttccactgcatcgtgttccccgccatgctgaaggcagagggtagctacatcctgccggacaacgtgccgagcaacgagttcctgaacctggagggcgacaagatttccacttcacgcaactgggcggtatggctgcacgagtatctcgttgacttccccggcaagcaggatgtgctgcgctacgtgctgaccgccaacgcaccggagacaaaagacaacgacttcacctggaaggacttccaggcacgtaataacaacgagctggttgccgtttatggcaacttcgtgaaccgcgccctgcaactcaccaagaagtacttcgacagcgtagtgcccgccgcaggcgaactgaacgactacgaccgcgagacgctgaaagaatttgccgacgtcaaggcagaagtggagaagttgctggacgtattcaaattccgcgacgcacagaaggaagcgatgaaccttgcccgcatcggaaacaaatacctggcagacaccgagccgtggaagcttgccaagacagacatggagcgcgtagccaccattctccacatctcgttgcagttggtcgccaaccttgccattgctttcgaaccgttcctgcccttcagcagcgagaagcttcgcaagatgctgaacatggacagctttgactgggcagagctgggacacaccgacctgttgcctgccggacatcagctgggcacccccgaactgctgttcgaaaagatagaagacgacgtcatccaggcacaagtagacaagctgcttgccaccaagaaggcaaacgaagccgccacctacaaggcaaaccccatcaagccgaccatcgccttcgaagactttgaaaagctggatatccgcgtaggtacagtgcttgaatgcgaggcagtgcccaagatgaagaagctgctgaagttcaagattgccgacgggctggaaaaccgcaccatcgtcagcggcattgcccagcactacaaaccggaagaactggtaggcaagcaagtgctgttcatcgccaacctcgctccacgccaattcaagaacgggctggtaagtgagggaatgattctctctgccgagaattatgacggctcgctggcggtgacttcactgctgaaagaggtgaagccgggcagcgaggtgaaataaaacagtaacaaggtaacgagttaacaaggctacaaggaggaaggaaaagcctcgtggccttgttaactcgttgccttatcaaccaataaactatgtccgatacatcactcaaagaaaaaacagccaaaggcctcttctggggaggattcagcaacggcatacagcagttgttaaatctgggattcggaatagtccttgcccgtctgctggatgcttcggattatggtatggtagggatgcttaccatcttctccgccattgccgccgccttgcaggagggtgggttcatttcggcactgaccaaccggaaggagactttgcacaaggattacaacgccgtgttctggttcagcctgatgtgcagcactactatatatatattactcttctttgccgcaccgctgattgccgacttctacgatacgcccgagctgataccgctgtcccgtctctccttcttgggattcgtcatttccagcatgagcattgcaccgagggcatatctattcaagaacctcagaatcaaggacactaccgtcatttctatttcaagtctgatagtctccggtattgtgggcatcacattggcggcaaacggattcgcctattgggggattgcattgcaaagcatctctttcatcaccgtaatgacgattcttaacttctacttctcgcattggagaccccgcttccggttcgacttcacacccattaaggagatgatagggttcagcagtaagataatcattacgaatatcttcaccataatcaataacaatttgttttccgtcttgttgggtaagttctattcggaacgggaagtgggtaactttacgcaggcaaacaagtggaacggcatgggacataccacgattacgggcatgataaacggcattgcacaacccgtctttacccgggttgccgacgacaaggcacgacaacttgccgtattcagaaagctgctgcgcttcaccgcctttatctctttccccgccatgctgggattgagcttggtatcgaaagaactgattataatcactatcacggagaagtggctgcccagtgccgatatcttgcaactgttatgtatttggggagcatttattcccgtcatcaatctgttctccaacctgctcatcagccggggacattcttctatctatatgtggagcaccatcagcttgagcctgctgcaaatagtagctgtatgtgccatatacccatacgggttggaatggatgctgcgtattttcgtcattatcaatatcggctggctgtttgtatggttccgttttgtcaagagggagataggattaagactgcgcgatatgctgaaagacatctctccttatctctccctatccattgtactcgtagtgtcaactcactatgctactcagcccatagaaaacctatacttaaatatggcagccaaaatcattatggtagctgggctttatgcactggttttgtggaaactacaatctaccatcttccgggaaagcattgaattcctcttaaagaaaaaaagagcatgagccgcatagcctacatcatatccgcctacaaggatgccccacacttggcacgcctggttgccgcactggatgaccgggcagacttctacgtgcacatcgacctcaatgccgatatacacccttttgaagaagccttgggagacaaggtcactttcgtgccccgccaccggataagctggggaggatgggaacaagtggaatatcagaaagaattgcttgccgccgtattgcacagcggtatcccctatacccgcgtagtatgcctgagcgggcaagactatccgttatggaacaacaacgccatccaccactatttcgaggagcatcaagacactgaattcatcggcggtttcaacctgacacactgcaccgtgaaacagcagttgcacaagataacccattaccaccctttccgtgacctgccttggaagagtatatggtggaagaacaaactcatcgtagcatcgcgcaagctggcacagatactccccatccggaaagcccctttcgcacccttggaaggcaagcaggcagatgtctatttcggttctgactattgggccatcacgctgccctgcgcacgatatgtatatgaaaagttgtgcacggaggagaaactggtgaagtatttcagaaccagctttgtacccagcgaactgtgcatacagaccatcgtattcaactccccttttgcctcaaaagggcttcttttagagggggaataccccggacttacccgtctcacccccttgcactacatagactacggcgcatccatccgcgtgatgacactcgaggacctgccggtattgcggcagtctggaaagatgttctgccggaaagtagtaagcggggagtccgacacactgatagaaaaactcaagtccgatttcgcaaaagaagattgaaatggaaagtgctcctttcaactattatcattatttttgcagacatcaatcaaaaatggtatccatggtgaagcaatataccccagaagaactgacccaactacatcaggtgctatacgaaatactggaagagattgtgcgcatctgcgacaaacacaatattccctattttgtaatcggcggaacagcaataggggcactctatgacaaagcgattcttccttgggatgacgacatagatataggtatgaaacgggaagactacaataagtttctccagatagcttcccaagaactgagagagccatactttctttcatggatacataccgaccctcatagtccttattactttgccaaagtcaagaaaaacaacaccttatttgtcgaagagatgtttaaagatgtacctatgcatcaaggaatctttgtcgatatattcccttttgaccgtattccaaacaataagctattaaggaagatacaatatgaagctgtcaactttctgaaatgctgcctgatgggaaaagaggtatggctatggaaacacttcggaaaatgtcaaatatccaaccctaccaatcgtggagctgttgcctgccttctgaaccggatagttgatatgacactctctaaaaagacaatctaccgtttgatggtgataatgcaaagttgtttcaactcatggaaaactttgtattacaacaatgtgattaccactaccgaccatgttttggagacgagtctcaaccatttacaaccaatcaaattcggtccactttatctgaaagcacctgatggattggaaaactttctacggtacaactatcccactttacaccggtatacagaagaagagcaggacaagataaacaatcattatccggcagttctttctttcaacataccaaatgaccatatagccacctcctaatccaacaaaattgccatgaaaccagcccttgtagatgtatctgtactgattcttttcttcaaccgccccaaactgctggcgcaagtattcgaacaagtgaagaaagcacgccccgcacgactgtttctctatcaggacggcccgcgcggcgagcgtgacatgccgggcatagaagcttgtcgcaaagtagtggcagacatcgactgggaatgcgaagtacaccacaactaccaagagaagaactacggctgcgacccatcggaatacatggcacagaagtgggtattctccttgtcggacaaatgtatcgtgcttgaggatgacgacgtgcctgccgtctctttcttcggcttctgcaaggaactgctcgacaagtatgagcacgacacacgcatcagcatgattgccggattcaacaacgaggagattacaccggacatcacttccgactacttcttcgccaccaccttctccatctggggatgggcgagctggcggcgggtgacggaccaatgggatgaattctacaccttcctggacgacaaggagaacatgcggcaactgaagaacctcatccacacacggcgctaccgcaaagacttcatctacatgtgccaacgccaccgcgaacacgggaaagcctattacgaaaccatcttccacgcttccatgttgttcaattcgggtctgagcatcgtgcccacccgcaacatgataaacaatctgggagccactgccgactccacccactttgccggctccgtgcacaccatgccgcgcggttaccgccgcatcttcaccatgaaacgccacgaagtggagtttccactgaagcaccctcgccacgtcatcgagaacacagcctacaaggatagcgtttaccgcatcatggcatggcggcatccctggataaagattgcacggtcgttcgaggaactggcgttgaacctacggtacggcaacttcaccatcatatggcaaacgctgcaaaagcgtatccggaaatggacgaaacaagaccggcatctgtaacaagaaaaaacattcaaaaaagaagaaacgaacaacagtcatgagagtactacttatcaatacctccgaacgcatcggcggcgcagccatcgccgccagccgtctgatggaatcactcaagaaccacggcatcaaagccaagctgctggtacgcgacaagcagaccgaccaaatctccgttgtgtcactggaccataactggcgcatggtgtggaagttcgtctgggagcgcatcgtcatctggagcgccaaccgcttcaacaaaaagaacatctttgccgtggacatagccaacacggggacagacatcacctcactgcccgaattccagcaggcagacgtcatccatctgcactggataaaccaagggatgctctcgctgaggaatatcgagaagattctcgcctcgggcaagcccgtcgtctggaccatgcacgacatgtggccctgcaccggcatctgtcaccatgcccgcgagtgcacccgttaccggcaggaatgccacaactgccccttcatccacggaggcggaggcaagcgtgacctttcctaccgcatcttccggaaaaagcagaatctatatcgcaaccgtcacatcaacttcgtcacctgcagccgctggctggaagaacgtgcccggacaagcgccctcttctgcggacatgccgtgacgtgcatccccaaccccatcaacaccaacctcttcaagccccgcaaccgacaggaagcccgcagccgttgcctactgccgcaagacaaaaagctcatgttgttcggctcggtgaagattacggacaaacggaaaggcatcgactacttgatagaatcgtgccgactgctggctgacaagcatcccgaactccgggaacagttgggtgtcgtcgtcttcggcaaccaatcgcaacaactggaaaacctgcttccattcaaagtctacccgctgaacttcgtcagcaacgaacaccaactggtgaacatctacaatgccgtggacatctttgtgaccccctcgctggaagagaacctgccgaacaccatcatggaagccatggcatgcggcattccctgcgtcggattcaacgtgggcggcatccctgagatgatagaccatctgcacaacggctacgtggcacaatacaaatcctcggaagactttgccaacggcatctactggacgctgaccgaacccgactaccccagcctctcggaacaagcctgccggaaagccatctcccactattcggagaacgtcgtcgccaagaaatacattgacctttacaacaaagtgaccggaagaaatgcataaccaccccaccccgaaattcagcatcatcaccgtgacctacaatgccgaagcggtactggaggacacgattcaaagcgttatctcgcaaacctaccaccacgtagaatacatccttgtggacggtgcgtccaaagacggcacgctctccattatcgaccgttaccgcgaccgcatcacccgcatcgtgagcgaaccggacaagggactgtacgacgccatgaacaaaggtatccgccttgccaccggcgattacctctgcttcctcaatgccggcgacagcttccacgaggacgacaccttgcagcagatggtgcgttccatctccggcaacgaactacccgacgtgctgtatggcgaaacggaactggtggacaaggaaggtcacttcatccgcatgcgccgcctcgccgccccggaagtgcttacctggcgaagcttcaagcagggcatgctggtctgccatcaggccttctttgccaaagcttcccttgtagaaccctacgacctgcaataccgcttctccgccgacttcgactggtgcatccgggtgatgaagaaggcacggaccttgcacaatacccatctcaccctcatcgactatctggaagagggaatgaccacccagaaccggcaagcatccctgcgcgaacgcttccgcatcatggcgcggcattacggactgatgagtaccgtagcccatcatgcctggttcgtattacgggccgtgataaagaaatagcacaaatttcgaggacaaatatactttgttcccgcaagacctataccttgcgggaatctcccctatacccagctctctacagtataggagtgagtacccaaaacatccccatgttttcacctaaaacatccggatgtaatggagcaaaacatccccatgttttggggtaaaacatccgggtgttttggagaaagacatccggatgttctgcatattaagtcctataccgtgaggggctaagtcctaagacgtaggagattaagtcctaaggcaaaggaggctgggtaactgtaagcagcgccttcaactcttttaccccttccgaagctcccttttgaatgacatgtatcggacgcatgacgtgcgtgtccaccggcttggggtctatcagatacacttcggcggcacggggcacgtagttcagtagtcccgcagcgggataaacgttcaggctggtgccgatgatgacgaagatgtccgcctgctccacataccggatggcagtctcaatctccggcaccgactcgccaaaccacacgatgaacgggcggagctgcgtaccgtcgcccgccttgtcgcccaactttacttcatattcctccggcgccagttccttgacgaaatgcggattataagggtcgcggctggaacaaaccttcgtcagttccccatgcaagtgtatcacgtgcgtactgccggcacgctcgtgcagattatctacgttctgggtgacgaccgttacattgaaatccctctccaggtcggcaacgcccagatgcccggcattcggcaccacatcgagcaactgcttgcgacgttcgttatagaaattaatgaccagttccggattacgtgcatacccctcgggagtcgccacctgctccaccggatatttgtcccataatccgcccgcatcacggaatgtgctgatgccgctctcggcgctcataccagcacccgacaatatgaccaagttcttcattttccgctcctttcctttattaaagtaagacaaatataagaagaatgttcaagttgtgatataaataagaaaaattaaatacttaaaagccttatcattcaaataaaagacgtacttttgccactcataaatttgcaatagactggaaaagaaaccaatccggtcgtcaacaaaagaatcttatggacaaattcagttatgctatcggccttggaataggtcagaatcttttaagcatgggtgccaaaggcattgcagtagatgactttgcacaagcaatcaaagacgttttggagggcaaccagacggcaatcagccacacagaagcccgtgacatcgtcaacaagtacttcgccgaactggaggagaagatgaacgcagcaaacatagaagccggcaaaaagttcctggaagagaacaaaaaacgcgagggagttgttacgcttcccagcggacttcaatacgaagttatcacagaaggaaacgtcggtcactatgccaaagcaaccgaccaggtacaatgccactacgaaggcacactgattgacggaacgctgttcgacagctccatcaagcgcggccagcctgccacattcggtgtaaaccaagtgatacccggttgggtggaagcccttcagcttatgcccgaaggtgccaagtggaaactctacatccccagcgacctggcatacggagcgcagggtgccggcgagatgattcctccccacagcacgctcgtattcgaagtcgaattacagaaaattttatctaaataaacaaacaagtaaaagcaaaatgaaaaaagtaacatttctcatggctcttgcagtagctgccggcatggcatcttgtactgctcaaagtccgaaagctgatttgaagacggacatcgactcattatcttacgccatcggtatggcacgtacagaaggtttggaccagtatcttgcacaacaaggcattgactcaacccagatgtcagaattcctgaaaggtttcaacgaaggcgcagccaaaatcgataagaaagacgtggcttacatggccggtctgcaagtaggccagatggtcagcaagcaatgggtggaaggcttcaaccaacaaatcttcggcaacgactccacacagagcatcagccgcgaaaatctgctggcaggtttcgtagcaggtgtcatcggcaagggtggtgctatggatatgatgaaagctcaagagtacatgcgtactcagatggatgccatcaaagaaaaagcaactgcagaaaagtatgctgacaacaaagctgccggtgaaaagttcctggctgagaacaaggctaaagaaggtgtagtaactaccccgagcggtctgcaatacaaaatcatcaccaagggtaacggtgccgttcctgccgacagcagcaaggtgaaagtaaactacaaaggtacgctgattgacggaacagaattcgatagctcttacaagcgcaacgaacctgctactttccgtgccaaccaggtaatcaaaggctggacagaggccctcaccatgatgcccgtcggctctaagtgggaactctatatcccctacgacctggcatacggttcaagagaaaccggtagccaaatcaagccgttctctactttgatattcgaagtggaactgctgggtatcgagaagtaatgtaacaatccgaagggaggggcaaaaccctcttgatacttcttttaggcgcggattacgcggaatacgcggatttggtaaactaaatccgtgaaatccgcgtaatccgcgccttatcgttacccctcacttttattcatttttccgtccttttttataaataaattaaaataaagtcctatatttgcttactatttgataacaacaagaactttacttatttactattatggaaaaaatagacaatcttgaccggcagattctggaaatcatttcccaaaatgcccgtatccctttcaaggacgtagctgctgaatgtggcgtgtcacgtgctgccatccatcaacgtgtacagcgcctgattgaccttggcgttattgttggctcaggctatcatgtaaatcccaagtcccttggatacagaacctgcacttacgtaggaatcaagctggaaaagggctccatgtataagacggtagttgctgagctgggcaagattcccgaaattgtagaatgccacttcaccactggtccgtacaccatgctgactaaggtatatgcccgcgacaacgagcatctgatggatttgctgaacaacaagatgcaggagattcctggcgtaaccgctaccgagaccttgatttccctggaacagagcatcaagaaggagattcctatttgccccgagaaataacgaacaacaatggatttcttgaacgaatatcatctgtcgggccttgtcataggtatctgcacattcctcatcatcggcttgtttcaccccatagttgtgaaagccgaatattattggggcaccaagtgctggtggattttccttttactcggcatcggcggcatcattgcctccctttatacggagaacatcatgatagcctcccttttgggcgtctttgcattttcctcgttctggaccatcaaggagatattcgagcaggaagaacgagtgaaaaaaggctggtttcccaagaatccaaaacgaacttataagttctaaggacaaaggttataaggaattttatccaaaagtcttgcatatttcaatagaaaatgctacttttgtccccgctatccaagcaaggatgcatcggacttgtagctcagttggttagagcaacagactcataatctggaggtccctggttcaagcccaggctggtccacaaactaaaaggctgattcctaacggaatacagcttttttttgtttgcagaccctccagatataaatctgttgctcttggttgatttactcctattttaagcagatgttgactaattgttgactaattaaaatagagctaatatgctgactattaaagctgagattaaaaggagtgaactaaaagttgacggaacttataacgtcaagattagattcacattagaccgcaaggtaaaacgcttatccaccaatctgtttgtaactcaacaagacctaactaaatccctcaaattcaaagaggacacttccattaagagagagatagataggcttgttctctattatagggaacagtgtctaaaactgcaattagaccaaaatcattattcattggatgagataattgagttcctaaacggagagcaagagaagcaacaaaccattgactttataaagttcagtcgtgagtggatagcttctactaccataaaaggagcacccaattatacaactgccatcaatgctttggtacggtttgttggtaaagaggaattggatataaatcttatcaccttagacttcttggaacagttcaaagcatttttaattggagaacgtgatgcacgtaccaagaaactgatgcagcaaggtaaacgtgtgacctctaaccgcactctttccctctacttggtaagcatcaagaagctgttcaatgaagccaaacgtaagttcaataagaaggacaagaaccttattcttattcctaactcaccctttgaagacttcaagatacctaaacaggaagctacacgtaagagagccattccagcagacatcattaaaaaggtgtggaagctgccttataaagacatgaagaaaggatataagtccacttgccgttataatttggctaaggattgtttcattctctcattctgtcttatgggaatcaactcagcagacctttacaatgctactgaaatgagagggaacactattatctataacagaaccaagaccaaggctcgtagattggatggtgcaaagatgatggtagatattcctaagatagtacaacctcttattgagaagtacaaggatagcacaggaaaacgtctgtttaacttccatcaattctatggggatgaaaagacttttaacaaggctatcaattctggattgaaagagattggttcaatattagaagtagatgatttggagtactatgcagcaaggcatagttgggctactatcgctctcaacaaagtaggcatagacaaatatacagtccatgcagccctcaaccatattgatgactctatgaaggtgacagacatttatattgaacgcgacttcgtaaatgaaaacaaggctaataccaaggttgtgaaatacgtgtttggtaagtaagctaataattcctcacttgtagcaatgcaggtgaggattattttttttaactttgccttaaactaataatcatggagaagttaaaagaagattgcattgatacagacgaacgtttggagtacatgaaagctatcgcagaaatatatgtgccaaatctggatgtagctaacacttgaaaagggacccggaacaacatttaaaaagtgccccacccatgggtatgtttaaccgaacaaaattggtatattcataaaaaccaatggcgttcataatatgtaccacatggaagaaagagattccataattctcgcctataggcgtgacggattgagcatccgtgagatcgcccgtcgtaacggcatgagccgcaagactgtacgcaagtatctccgggctttcgaacaagcggtcggtgacaaccccgatgcggaagcaatggacacgtacctgcagcagccggtgcgctatgacagcagcaaacgtgtccgcagagtgatgaaccagcaggtgatggaggcgatagacggcttcatggcccgcaaccggtctaatgccgcggccggattgcgcaagcagcagatgcgcaagattgacatgtggcgccggttgcgcgatcaaggcatagagattgcctattcgacggtatgccagtatgtccgtgcattggaagtggcggtgtccgctccagccaagtccccggcggcgttcatccgccaggagtatgaaccggggttccggtgcgagtttgactggggcgtgctgacactttggattgccggtgtcaagacgaagctgcacatggccgtgttcacgatgaaccatagcaacctgcggcgggcatacctgttctcccgcgaggacacgttggccctgatggaagcacaccgcaactgcttccgtgctttggggggcacgccgcaagtaatggcctacgataacatgcgggtggccgtcaagaagttccttggacaggagcgcgaacataccgatgccctgcgccgcatggaactccactattgtttcacccctcatttctgtaatccgcgttcgggatgggagaaaggtaaggtggagcgttcggtggaacatatccgccggcgggctttcgcctatgatgtccgtttcggttcgctggagcaggcgcagtgtcatcttgacaaggtctgtgacaggctcaacggggaggcttccaacatgtctgcgcaagagaagaaggagcgcgtacaggccgatattgcggctttgcggccgcttgaccacggtgacatgggctgctttgagcagcggcatgcccgtgtcgggaagtattccaccattaccgtcgatggtgtgcattactctgtgcctgaccggcttgtcggtcgggaggtacccataaagatgtattccgagcgtattgtcgtgcttgacggtcgcgacaaggtagccacgcatgtacgctcccggcgtctcggtgactggtgtatcgacctgatgcactatctgggcacgttccttcgcaagcctgcggcgttgggacgatccacggccatgcgacaggtacacccggacgtggcggcactgtttcgcaaacattttacggattctcccagatcgtttgtcgaactgctcgtgtttacccgtgacaaccagcgcacttatgccgacatactggctgcggcagaccgtctgtcctcccggggactcaaacgcctgtcttccgaacaattgagcgccgagatgctggccagtgacggcaatggaaccgcaaacgtccgtcaagacgcagccaccctgaccccgtccgatccacaacagaccgccattgaagaatcggcctcacagacattggacacactttcggcgatgatcggatgtggcgccacacaacaacctgtaaacaaagttaccgtctaacaacataaaaattgcatagcaatggaacaaaacgaaaatcaagactccatacgcgaacggatacgtgcgtatgccttcgacctcaaactccctctggtacgacgcgacatcgacctgcttatacagcaaggacttgatgaacgatggaacctgtggatgttcacggccgaactcctgcgtcaggaaaaagaaaaccgctcggagaaccagcgtcggcatcgcatcaaaaatgccgcgttcccacagttgcgatacctcaacgaaatagacacggacgcgcttccgccagaagcgcggaaggccttgccaaaccttgagacacttgatttcatcaaggaagggcgcaaccttatactatacgggaatcccggtaccggaaagacccatctggctacagccttggggattgcggcctgtaacgcgggatactccgtactgttcacttccgtgcccagactgcttacgcagataagggaatgccggaacgcaatgacactaagggcactcgagaacaagttcgaacgatacgacatggtcatctgcgacgagttcggatacgtttcttgtgacaaggcgggagcggagatgttgttcaaccatctgtcactcagaactgacaagaaaacaaccgtcattacaacaaatctcgcattcaacagatgggacgagattattgcagacaaagtactagttacagcaatggtagacaggctaacgcacaaggcgattctactgaacatgacgggaaaatcgtacagaatgaaagaaacacaagatatgataaataaacaaatttaattaactttgcaaaacctatcgggtggtacacgtttcaaatgctacccgggtcccttttcaagtgttagctacaaccgactgctggaccaacgaagcgttgtgtccgaacagcctatacacacataaccacgcctctccgaaattcctgaagatgagaattctgaaaccagccgggcaactggagcatctgctttccagccatctgtctgccggagagagcgccaacctttcattcaatcccaatgctctccgctattcctgcggatactatatctatgcactgctgcatatcctgatttagactttatcggacttattgcaaaccattaccggaggtgtactgcatgtacatctttcgcttttttattatccatttcatcacattaatatcataactatgtccgatttattcctccccacccttgagatgatggggctcacttttgcaatcggtttctttgtggcattcatcatcaaactgatagccagcgcagccgattcactcgatttctacagttcccaccagcaggagttactccgcctgcaccgcataaagaagttccgccagaagatggaactgatgctacacaccccctccatgcacggaaacatcttcggcaacgacacgcgcgaagactacagccggggtgtggaccgtgaaaacgaaaagcctcgaggctattaccacggagtaagccacggtgtctccaaaagaaacctggtagactacttctacccagaagatacccttatgatgtatctggaagatgccatcagccaccgtgacaacaagaacaagactaaaaagaacaacgacaccaaaaacaaagactaattatggagaatatagattttgcaaccttgttccaaggattcggaacaatgatggaaagcggctggctactctcctctgcccgtgtatttctaatagccctgggcctgctgctcatatacctgggatggaaaggcgtactggagccgatggtcatgattcccatgggactgggtatggtcgccatcaattgcggcacccttttcatgcccgacggcacattggggaatctctttctggacccgatgctttcggatacggacgacttgatgaacaccatgcagatagacttcctgcaaccggtctacaccctgaccttcagcaacggattgattgcatgcttcgtatttatgggtatcggtaccctgctcgacgtgggcttcctgctacagaaaccgtttgccagcatattccttgccctatgtgccgaattgggaactttcctgactgtacccatcgcatctgcattgggactgtccttgaaagaaagcgcttccgtagccatggtaggaggtgcggacgggccgatggtgcttttcacttccttggccctggccaaacatctgtttgtacccatcacggtagtggcctatctctatctgggactgacatatggcggttacccctatctggtgaagctgctggtaccgaaacgcctgcgcgccatcaagatgacgagcaagaagccgcccaaaaactatgatgccaaagtaaaactggctttctcggctatattgtgtgctgtactgtgttttctgttcccggttgcctcaccgctgttcttctccttgttcctcggagtggcagtacgcgagtcggggatgaagcatatctacgattttgtaagcggtccgctgttgtatggttctactttcatgctcggcctgttgttgggcgtactttgcgacgcacatctgctgctcgaccctaaaattcttaaattgttggtattgggcatgggcgcactgttgctctccggtatcggcggaatcattggagggtacatcatgtacttcatcaagcggggcaattacaatccggtcatcggaattgcagccgtgagctgcgtgcctactacggcgaaggttgcccagaagatagtaagcaaggacaaccccaattccttcatcttgggagatgccttgggggctaatatttcaggagtaatcacttcagccatcattacgggtatctatattactataattccctatctgtagcctgcgtagtgggtttaggtgacggaaagaggttgtggcaatcacaatctctttctttttatgatacatggggcaagctgttgcatttcagataaaatcctttacctttgccggcaaacacatttatcaagatatcaggatgaagaaagtatttaaattggccggaggattcatggtcggggcatgcatcggctttgtaggaataataggtgtaagagtcctggttttaggagactcgttcgacggtttacacagcaagtttgccgaaaccggcatgctggagacagtaggagtttccttgttagccatactgattctgctgttctccatcttcctgcaagtgcttctgcacgaaggcgggcatcttgtctgcggactggcaaccggctaccgcttcgtctccttccgcatcttcaaccttaccttcatacggaaagacgggaaattatgcatcaagcgtttcagccttgccggaacgggaggccaatgcctgcttaccccacccgaaaggcctcttgaagatatcccaaccaccttgtacaacctgggtggagtgcttgccaacctgctgaccgccatccttgccttcctccccctgctgaccgtagacgggctgccttacctgctgaaattcttccttctgatgctctctttgattggcattctccttgcagggatgaacggcatccccatgaagatgggcggcatcggcaatgatgccgacaacatgtgcctgcttctcaaggacagcaagagcaagcaggcactggtcacccagctgcgcatcaacgcattggtgcaagagggcatgcgtcctaaggacatgcctgccgaatggttcagccaaacggaagacatcaactacaaagatgccctgcaggtcaccatagccttgatgagcgcctcgcgcctgctcgactgcgaagaatgggaagccgcctacaatgcatttgagaaaataatgagccaccggcacgaagtcatcgggcttttgataaaggaaaccgcttgcgagctgctcttcaccgcattggtgacaaagaggaccgcacgggcagaagaattatataccgatgagctggatacctacatccggcaatataaggatgtgacgtcttccaaacagcggctgctctgcgccctggcactctaccgggacaaggacacagcaaaagcaaaggagatttacgaagccacctgccaacggaaaaacaaatacttgatgcagggagaagtcagttcggacatagccttgatgaaatcaatccttaccgccaagaatgccttgtaagatggaacgatatttcttttacttgttatatctgctgcttggctgctcactatgcggttgtagcagaaaacaagcgccaaagcagacacaagacccagatacggagaccaccatcccgtacgccgacaccatagcggcacccgtccctccggctccagccaaaagccgaacagcccgctacctggactccctcggtttcgtcagcatcgccgaagcggacagcagcatcgccatcgacttgatgtacacccgtgccgacaatttcaccggaaccctattgtacgaagacctgaaagaagcctacctgcaccccgatgccatgaaaagcctgaagcgggcacaacgcctgctgaaagaacagtaccccggctacagccttatcgtctacgacgcagcgcgccccttgtccgtacagcagaagatgtggaacgtagtgaaaggaacctccaaatacatctatgtctccaacccctcacgcggcggcggcctgcacaactacgggttggcagtggacatcagcatactcgacgataaaggaacccctctgcccatgggcaccccggtagaccatctgggcagggaagcccacatcacagaagaagccgtgctcgtggcacaaggcaagctgacggaacaagaacgtgaaaaccggctgctgctccggcaggtaatgaaagaagccggattccacccgctacccagcgaatggtggcacttcaaccgcgtcagcaggcagacggcaaaggagcgataccgggtcatcccttaactctcacccccagcttgtccggaaacttaaatttgctatcgctttgacgcggatgacgcagatgacgcggatttttaatattcttaatctgtattatcagcgtcatctgtgtctgaaaaataatcagacagaaagctgcgaatttatgccccactttgtcctttttgagataactttgcatcagaataaataagccaagccatgcctttatcccaagacaccctccgcttcatccgcgagcatcgccgcgacgacgtgcgcagccttgccttgcaggcacgccgctacccttcggtagacatgcccgccgccatcacacagatttccggctggcagattgccaaagagaagatacccgcatgggccgagaacgagcatatactctaccccgcccacctttctctggaacaatgctcctcccaagcaacggcacagtataaagcggagattataactaacctgctacatacagaacaagaacatcccgcgcagaacagtacccccgcatcagccggcacctttaccgacctcaccggaggtttcggcatcgactgcgcctatctctcctcccgcttcgggcatgccacttacgtcgagcgccaggaaaccctctgccagatagccgcacacaacttccctgtcctcggcctgaaccacatctccgtctgccacgcagacagcgtctgccatctgcaagagatggagcccgtggactgtatattcatagaccctgcccgccgcgacggacacggtggaaagaccgtagccatcggcgactgcgaacccgatatagccgccctcgaagaactgctgctgcgcaaggcaagacacgtactggtaaaactctcccccatgctcgacctcaccctcgccctgaacgatttgaagcatgtccgccaggcacacatcgtctccgtgggcaacgaatgcaaggaactgctgctcttgctgggacaaggcgaaggagtgccggcagacgacatccccatccattgcgtcaacttcaccggtgtaccggctccccaagccctcgtcttcacccgccggcaggagaaggagcgtgcatgcccctacacccctcaactgaaatcatacctctacgaaccgaatgcctccgtgctgaaagccggtgcattccgcagcctctcctcattgtataaggtggaaaaactgcatcccaacagccacctctacacctcggaccacttcctgccggacttccccggccgcaagttccggattacctcctcctgcggcttcggcaagaaagaagtgaaagagatgctggctgccgagaaaaaggcgaacctcaccgtgcgcaacttccccgccaccgtggccgaactgcgcaaacgactgaaattggccgaagggggaggcacttatctctttgccactattctggcagacgagaagaaggtacttatccgctgccaggctacgggataagacaccaacccctataccttcccctgcacgagatgtacatctcatgttgctcgagatgtacatctcatacagtccgagatgcacatctcgtgcatctttagcatcagtctgccagatgacggcaaagggagataccgccgaaaaggtactacctccaagaatttatgtaacctcattgtaactgaatcgttatctgttcttcaacgctccgcaacctccacgtaacggcaaccctctacttttgcggcagattattaacagataataacaagtatgaaacagattttgagagcattcttattcttactcctattcaccgccaccgtcaatacggccattgccgacgaaaaagcaaatgtcacgaaacaaggaactgtacgtggacgcatcatcgacgccactaaacaaactctcccgggcgcatccatctacatcgagaaactacacactggcgtgacgagcgacgtcaacggcttctacactttctctaaccttgacccgggaacctatacagtaaaggtgagctacgtgggctactctcccgtagaactgaaaatcaccatccccgcaggccgtacactggaaaaagacgtcgtactgaacgaaggcgtggagttgcaggaagtggtggtaggcggcgccttccagggacagcgccgtgccatcaactcacagaaaaacaacatggggattacgaatgtagtctctgccgaccaggtaggcaagttccccgactccaacatcggtgacgcccttaaacgcatctccggcatcaacgtgcagtacgaccaaggcgaggcacgcttcgggcaagtgcggggcacgagtgccgacctcagctccgtcaccatcaacggcaaccgcgttccctctgccgaaggcgatacgcgcaacgtacagctcgacctcattccggcagacatgattcagaccatcgaagtgaacaaggtagtaaccgccgatatggacggcgacgccatcggcggcagcatcaacctcgtcaccaagaactccccctacaagcgtaccattgccgccaccgccggaaccggctacaactgggtgagcgaaaaggcgcaactgaaccttggcttcacctacggcgaccgcttcttcaacgacaaactcggcttgattgtatcggcctcctatcagaactcaccttccggttcctacgacaccgaattcgtgtgggagcaggacgatgacggcaagacgtacgtcaacgactaccaaatccgccaatactacgtcacccgcgaacgccaaagctactctgccgcactggactgggacatcaatgccaaccacaaactgaccttcaaaggcatcttcaacaaccgcaacgactgggagaaccgctaccgtaccacgctgaaagaccttgaccccgacggcaacgccactgtacgcatacagaccaaagccggtacgccggacaaccgtaacgcccgcctggaacgccagcgcaccatggactttgccctcggcggcgaacacctcttcggcgccctctccatggactggcacgccagctatgccaaagccagcgaagaacgtcccaacgaacgctacatcgacttccaactgaagaaacagaagttcgacatggacctgagcgacgaacgccaaccctttgccagccccaaaacaggctctaccatgacattgaacgatgaattcagcctgaaagagctgacggaacagcaggaagacatcaaggagcaggacctgaagttctccgccaacttcaaacttcccttcaagaacggcaacaagctgaagttcggcgcaaaggtagtgcgcaagaccaaggataaagaagtggacttctacgaatactctcctctggacgaggatgccttcatgacgaacagcctggcaaatacagtggaccagaccaacaagaacttcatgcccaacaacaaataccaggcaggcatctacgccagcaaggaatacaccggctctttagacttgaacaacgcttccctctttgagaaagagcaggtgcaggaagaacttgccggaaacttcaacgcccgcgaaaccgtgacttccggctacctccgcttcgaccaaaaactgacaaaagacgtggaactgatgaccggacttcgcatagagaacaccaaccttgcctatacgggacgcacctacgatgccgacgaagacctcaccagcaagaccgaccgtcagcgcaacagctacatcaacttcctgccgtcgctgctcgtaaagtggaatgtaaacgatgacttcaaagtgcgcggttcgtttacccaaaccttgtcacgccccaaatactcggccctcgtgcccagtgtgaacatcaaacgttccgacaacgaaatcaccatcggaaacccggagctgaaacctaccgtctcctacaacttcgacttgagtgccgactactacttccgcagcatcggtctgataagcgccggcatcttctacaagaagatagacgacttcatcgtagaccaggtgagcaccaactacgaataccagggtaacacctacacccgcttcacccaacccaagaatgcgggcaacgccaacctggtaggggtagagttatcctaccagcgcgacttcagcttcattgctcccgctctgaaatgtgtaggtttctacggaacgtacacctacacccactcccgtgtggaagacttcaacttcgaaggccgcgagaatgagaaagacttgagcatgccaggctctccggagcataccgcaaatgcttccctatactttgagaaaggcggtctgaatctgcgcctgagctataacttcgcttccgatttcatcgacgaaatgggagaaagcaccttctacgaccgctactacgacaaggtgaactatatggacgtaaacgccagctataccttcggaaagaagttcaagactaccttctacgccgaagccaacaacctgctgaaccagccgctacgctactaccagggcacaaaagaccgtaccatgcaggcagaatactacggcgtgaaagtgaatgcgggagtgaagattaatttttaaacagcgaattctatctcaacaagttatcaacattaactactcaacaatttaataatgacaatgaagaaaatattccttttactgtttattgccctactcggcaacgcagccattgcccaaatcaccgattactccatcttcgacaagaagttcaacttctacgtagccaacgacctcggccgtaacggctactacgaccaaaagcccatcgccgaactgatgggacaaatggcagaagaagtaggccccgaattcgttcttgccaccggcgatgtacaccactttgaaggcgtacgtagcgtgaacgacccgctttggatgaccaactacgaacttatttacagccacccggagctgatgatagactggttccccctgctgggcaaccacgaataccgcggcaatacgcaggctgtgctcgactacagtaatatcagccgccgctggaccatgcccgcccgttattataccaagacgttcgaggacaacggcgctaccatccgcatcctttgggtagacaccgccccgatgattgacaaataccgcaacgaaagcgagacctatcccgatgcctgcaagcaggattaccagcaacaactttcctggatagattccgtactgactaccgccaaagaggactgggttatcgttgccggacaccatcccatctatgccgaaaccccgaaggacgagagcgaacgtgcggatatgcaggcacgtctcgatcccatcctgcgcaagcacaaggtggatatgtacatctgcgggcacatccacaacttccagcacgtacgcgtggcaggcagcgacatcgactatatcaccaattctgccggttcgctcgcccgcaaggtgaagcccatcgaagggaccgtattctgcagtcccgaaccgggtttctccattgtatcggccagcaaaaagacactggaactgcgcatgattgacaagaaagggaatgtattgcacacggtgacgcgcagcaaataatccaagccggcacgcaagcaggcgcattcccccgaagccctgccgaacaaccactttcctcccacgaagcaaaagaccatgtttcgtaggaggatttttccatctcatacgacaaaaacaaagcctatccgcaggaatacaagaaaaagccctatatttgcatttgtcaatacataactatgatgaagaagatacacttcctgctactaatcagcctgctacttgccgcttgcagtgatgacgacaaagagaaacaatccgcttttgtgaccaatatcaccatatccgatgccggaaagaccttcaatcccggtgatgccgtgaccgtcaaagccgacggcttgcagagcggcgaccaaatcatattggacatctactggccgatagccgacaatcctctctttcccgaagggtattcacgctacacacgcgccgttaccacggagcaaaccaccaacagcattactttccttgcccccggacactggcccgcctcacgggtagaaatgttcctggaacgggcaggacagcttcagcctctcggccagatttcggtagccgacggacaatcccccgaagaaccatatctctacggtatcaccaactcccacgccatttacacaccgaccgttccccgcggcatcacccgtatcgacctggtaacacaagaaatatcggaagtaatccagttccatgacgacgaagatttccaccttgccgccaacatccccggcaccaacatcctctgcgggatacgggagaaagacggcagtagtttcatcgacggatacgacctctgcatgcactattggtgtaacccggtagaacgtaacgcaattaccatctgctcggacttcaacaacactgtttccctggaaatggccggagataagctcctcacctactgtagcatctcttatccggtatatacccggttgaatatgccaccgatacatactcccgaaataccattaccggatggactgaagcccgaatccctctcacgctatccgggcgtgatagccgacgtccacatgctgctctcggccaacaacggcgacggcaccttctcgcccgtcgtgatagacatcgccaaagaaaagatgcactgctacgaccccatcaaagccgaagccttgatacctttccggattatggaaccatcccccgaaaacccaaacagcctgcaatgcaaaggaggctatatcgtttcccgtgccaatggtggagatacgcaattctgcttatgggatactactgccggaaacttgaaagagcctttcgccacctaccccaacgccgtacgctccgctgccatgtactactccaaggacgggcagacaaggaaactctacgtgcagtttgcaggctatcgtgaaggcgacttcatcgaaacttatgatttccagacaaaggaatggaggatgtttatgttctacgtaccgtttgcagagattttactggcacgataaccggctcccttactgctttttctcccgcaagtcatccttgggtatggtcgtctcactgccgtcacgcgtagctatatagtgaggagacatgatttcgatgcctgcctcgttaaagacatcctggatattctgatgcaaatcagaataaatctggctaaggctgttggcatccctgatataggcattcacttgataaaccggataataatcctgaagggaagtctccaatacaaacggacggggatcatctatcactccaggagtattcaatgcagcctctatcaacagctgatgtgtcttccgccacggaacatcgtagccaatactgacctccgaatggataatcaatccatactcacgggcagattggctgtaattgaccgtatgggaagacatgatgaaagagttcggaatggtcaccacctcattcttcggagtacggatgcgggtgacgagcggtgttttctcaatgatgttgcccgtagtatcgttcagcttgatgcggtcacccagcttgaaaggccgcatgtaggttatgaccagtcctgcaatgatattgccgataaccgtactggaaccgagcgaaacaatcaagccgacaaacacggagattccctggaagactcccgacttggaacccggcagataagggtaaatcatggcaatcataaacgcataaagcaagaagcgcacaatgtgataggtaggaatggcccaatccggatagaagccgtttatcttcagccgttcagcctgcacctcattggcaagataacgcaccagtctgaccagatacttcaccgcatagcatatcacaaagatagtgaacagattgggtatatagtcggctattccattcaagatgacctttataggattccagatgtaggagaataatgtataagccaagctcttggtctgagggaaaatggagaataataacggaaccgtcagcagcaactgcaacagcatgactacataacgcaccaggttggcaacaaacaccagcaggttgacctgcttctgcgtgtccaacaattcataatcctgaatggaaatcggtttcagcttggtatccttcagcttctgaatgcgtagtttgaattttctgaacagccagttggtaaacttgaacaagaagaactgtcccacaagcaccaggataaagtacaagatacgcttacccaactgccacaagctatgctccttctgcatggctttcagtttgtccaccacgacatgcctcttgctggcggccagctggtcgcgggtacagttttcccacaaagcatcctgatcggtaaaggaaatgatgaccttttcgccatacatcaagtctgtaacaatatccgtactctctaaataaacagagtccggacgcagattgaaacgcgtgcccaatgcttcgatgacgttgcttacatctttggctcgctgttggggcgtatgccctccacgcttggcatacagatagaacaaagtgtccttctccaccaccaccggaatacccggtgtcaccgtccgcaacgaatcaatgcgttgtttctgcaatgccagcttcaccgaatcggccgcatagcccgccaacttcatctgctccatttccatccgcaggttcgcctcattcagccgggctgtttccaactcctgccggacaagcgacaactgaatcgaatcggagtcagtccttgccactgtgacactccccacactatcctcacctaaaacactgagcactttatctaccaactgagctgacactccgtccgccagcatcaacagccaacaaagacagaaagcacggataaccttcatatataaacttcttgatttgattctttaattatgcaaatatacccaataaatgcttcaaacatacggaatgtttttaacttcctaccctaatcgatataactttttcatgcaaacatgaaagttctgtatccggtttgcactatctttgtactcaaaattgacatacctatggatatattgtttcttgtcggaggactgctcctcattcttctgggtgccaatggcttgacagacggtgccgcatccgttgccaaacgtttccgtataccgtccatcgtcatcgggcttaccattgtcgccttcggtacttccgcaccggaactcaccgtcagcatatcctctgccctaaaaggcagtgcagacattgccatcggcaatgtggtgggaagcaatacgttcaataccctgatgattgtgggttgtacggccctttttgccccgatagccattacccgtaacacactgaaacgcgaaatacccctttgcatcctttcatccttcgccctgctgatttgtgccaacgacgtcttactggacagcagtggggagaacatactcagcatcaccgacggcctattgctgctatgcttctttaccattttcctgagttatacttttgccattgcaaaaagggatggaagtatgaaggaaccggaaaaggagcacttacaggaagaagacgaaatcaggctgttacccgcgggaagtccgccctatacattatcggtggacttgccggcctcatcatcggaggtaatttctttgtagacggtgccagcggcatagcccgcggattgggtgtcagcgaatccatcatcggtctcacgctcgtagcaggcggcacttcattacccgaactcgccacctccatcgtagccgccttgaagaaaaaccccgaaatagccatcggaaacgtcatcggaagtaatctcttcaatatattcttcgtactgggttgttcggcctccatcactccactgcgtctgacgggcatcaccaatttcgatttgtgggtactcgtagggtccagcatcctgctttggctgttcggtatctttttcgggaaacgcatcatcacccgggtggaaggaagcattctgattctctgctacattgcctacacagcggtactgatatacaacctctaacagcaaatttacagacaccctacgcggtattttaaagattatcacgtatttttaaataaggcaagctgtacctcggcataaaaaataagcaagcttattttgttctgctctcagtttgcattacctttgtggtctcaatattgaacaactatggcaattacaatcaagaaagtaaccacaagacgggaactggagcgctttatccgtttcaactacctgctatacaaaaacaacccttattccgtccccgaccttttcgatgacatgctcaacaccttcaacaagaagaaaaacgctgcattcgaattttgtgaagccgactatttcctggcttatcgggaaggtaaaatcgtaggacgtgtagctgccatcatcaaccacaaggcaaaccaaacctggaacaaaaaggaagtccgcttcggctggatagacttcatcgatgatgcggaagtctccgatgccctgattcgcaccgtggaagaatggggaaaagaacggggaatgacacatatacaaggcccgctgggattcacagatttcgatgccgaaggtatgctcatcgaaggattcgaccagctcagcaccatggccaccatttataactatccctactatccgcaacatctggaacgcatgggctttgagaaggatgccgattgggtggagtacaaaatctacattcccgacgccatacccgacaagcacaagcgcatctccgacctcatccagcgcaagtataacctcaaggtaaagaaatacacatctgccaagaagattgcccaagactacggtcaggccatcttcgaactgatgaacgaagcctatcagccactctatggctattctgcactgagccaacggcagattgaccaatacgtcaagatgtacctgcccatcctcgacctacgcatggtgacattgattaccgatgccgatgaccagctgcttgccgtaggcatttccatgccgtcactcgccgaagcgttgcaaaaagcccacgggcgcctgcttcctatgggttggtatcacctggccaagaccatcttcttgaagaaatatcccaagatgctcgatttgctgctggttgccgtgaaaccggagtatcagaacaagggggtaaatgcattgttgttctccgaccttatccccgtctatcagcaacttggtttcgagtatgccgagagtaatccggagctggagctgaacggcaaggtgcaagcgcaatgggagtacttcaagacggaacagcataaacggagaagatgctttgtgaaaggaataaaataagttctaaatccagaatataagcttgtcagaagtccataaaagacattatttttttgcgaacccccgaatttctcattacctttgtcgcaatgcgcaatatgaaggaataacgtacttatggaagataacaacaatatgaccctgccgctggaagaagcagacaacaatatcacagagagccccgtttccagcgtggaatataccgacgacaacatccgccacctggacgacatggagcatatccgtgtccgttccggtatgtacataggccgtctgggcgacggctcacagaacgatgacggcatctatgtgttgctgaaagaagtgatggacaacagcatcgacgagttcaagatgggtgccggaaagcgtatagaagtgactatagaagacagtctgcgtgtcagcgtacgcgactatggacgaggcattccgcaaggcaaactggtagaggcggtcagcaaactgaataccgggggtaaatatgattcgaaggctttcaagaaaagtgtcggactgaacggcgtgggcatcaaggcggtcaatgcgctgagtagccgtttcgaggtacgcagttaccgcgacggcaaagtacgtaccgccatcttcgagaaaggaacgctgttgagtgatgtgaccgaagactcgacagaagaaagcggaacctatatcttcttcgaaccggacgccacactcttcctgaactattccttccagaaccagttcgtagaaaccctgctgcgcaactacacctacctgaatacgggcctcaccttcatttacaacggccagcgcatcgtttcccgccacgggctggaggacttgctgaaagacaacatgaccagcgaaggcctttacgacatcatccacctgaaaggagaggacatcgagattgccttcacacacaccaaccaatacggcgaagagtactactcctttgtcaacgggcaacacaccacccaaggcggcacacaccagactgccttgaaggaacacattgcccgtaccatcaaggagttctacaacaagaaccaggaatatgccgacatccgcaacggactggtagccgccattgccatcgacgtggaggaacccatgttcgagagccagaccaaaacgaaactgggcagcaacaacatgtggcctgccgcgccgcaggaacacaagcccgccggccccacggtgaacaaatacgtaggagacttcatcaagacggaagtggacaactacctccacaagaacccgcttgtggccgaagtgatgctgcaaaagatacaagactccgagaaagagcgcaaagccattgccggcgtcaccaagctggcacgcgaacgcgccaagaaagccaacctgcacaaccgcaagctgcgcgactgccgctaccacttgagtgacggtaaaggcaaagaccaggaaaccgaatcctgcatcttcattaccgagggagactccgccagcggttccatcaccaagagccgcgacgtgaatacccaagcagtattcagcctgcgtggtaaaccgctaaattcctacggactcaccaagaaagttgtttatgaaaacgaagaattcaacttgcttcaagcagccttgaatatagaagacggcatagagacactgcgctacaacaaagtcatcgtagctaccgatgccgatgtggacggcatgcacatccgcctgctcatcatcaccttcttcctgcagttcttccccgacctgataaagaaagggcatgtatatatcctgcaaacccctctcttccgcgtgcgcaacaaaaagaagacaagttattgctatacagaggaggaacgtgtgaaagccattgaagaactgggtcccaaccccgaaatcacccgattcaaaggtctgggagaaatctcgcccgacgagttcaagcattttatcggcaaggatatgcgtctggaacaagtgtccctgcgcaagacagacctcgtaaaagagctgctggaattctacatgggtaagaataccatggaacgacaaaactttattatcaacaacttggttatagaagaagatttggcatcatgagaagagctatctttccgggaacattcgacccgtttactatcggacactcttcggtagtgagccgtgcactgacttttatagacgaaatcgtcataggcatcggcatcaatgaaaataagaatacgtatttccccttggaaaagcgcgaacaaatgatacgagactactaccggaacgagccgcgcatcattgtgcagtcctatgactgcctgactatcgactttgcccggcaggtagatgccagtctgataatacgcggcatacgcaccgtgaaggatttcgaatacgaggaaaccattgccgacatcaaccgcaaactgaccggcatagaaaccatcctgctcttcaccgagccagaacttacctgcgtcagttccaccaccgtgcgcgaactgctgcaatacggcaaggacataagcatgttcataccggagggaatggagattagggattaaggataaaggattagggattaaaatggaaatgatgaaaaaactatttactattataatatgtatatgcgcggtgacggcacaagcgcaaaagccgaacaatgaagccctgcgcaaactgcaaatggcagagtttgccatcaccaacctttatgtggacaaggtggatgaagacaagctggtggaagaagccatcatcaagatgctggcacaactcgacccgcactccacctacaacaacgccgaagaagtgaagaagatgaacgagccgttgcaaggcaatttcgagggcatcggcgtacagtttcagatgatagaagataccctgcttgtgatacaacccgtgagcaacggaccttccgagaaggtgggcatccttgccggcgaccgtatcgtagccgtcaatgacagcgccattgccggagtaaaaatgagcacggaagatattatgagccgcctgcgcggaccgaaagactcggaagtgaaactcaccatcgtgcgccgtggcgtggacgaccagctgtacttcaccgtgaagcgtgacaaaattcccatcctcagcctggacgcatcttacatgatacaacccaaaaccggctatatccgtatcaaccgcttcggggcaaccaccgccgaagagtttgcagaagccctgaaaagcctgcaaaagaaaggaatgaaagacctcatcctcgacctgcaaggaaatggaggagggtatctgaatgccgccatcgaccttgccaacgaatttctgaagcaaaaagaactcatcgtctacaccgaaggaagggccgcacgccgcagtgatttctttgccaaaggtacgggcaacttcaagaacggccgtctcatcatattggtggacgagtactccgcttctgccagtgaaatcgtgaccggagccatccaggactgggacagaggcgtggtagtaggacgccgcaccttcggcaagggattagtacagcgtcctatcgacctgccggacggttccatgattcgcctcactatcgcccgctactatactccttcgggccgttgtatccagaagccttacgacagcaccgccaacctcgacggccgcctaaccggcgagaacagtcaggataagtataaccaggaactgatagaccgcttcaatcatggagaaatgattcatgcggacagtatccattttgccgactccctgaaagcacagaccaagcgtatgggacgtaccgtttacggaggtggaggtatcatgcccgacttcttcgtccccatcgacactacccagtacacagactatcaccgcaacctcgtagccaaaggcgtggttatcaaagccactaccggctacatcgagaagcaccggaaggagttgcagaacaaatacaagaaattcgaagccttcaacgagaagttcgaaatagacgataacttccttgccgaaatacgtacgcttgccgacaaagagaaaatcaagtttgacgagaaacagtacaaccaatccctaccgctcatcaagacacaacttaaagccttgatagcccgtgacctatgggacatgaacgaatacttccaggtgatgaacagcacgaaccagagcgtgcagcaagctctaaaagtgttgaacgaaggcatctacagcactattatccaatagccgacttgaaacaaacttaggcgcggattatgcggatttagtttatctaactccgcataatccgcgcctaaaatcattctccgaacagccacttattcagccacttgttgacgtagatgttgaccacagcacatccagcaccgattgcagcccccgccaacacatccgacggataatgcactccctcgttcatacgggaaactcccacggaacaagcccacagggcagacggagctatcacataccatttaggatactttacactgagcgaggtggcaagggcaaaagccgtcgccgtatgtccggaaggaaaagacgggctgccttcatggctatatgcatgcactctgtcgggatatttatcataaggacgctcacggtccaccagatatttcattccataagtcacaacaaaagcccccgctacacttgtacctacgtagaccgcatctttcagcaaactaaatccggaaaaaccagacgtgccgcttaacaaaaacgatgcgtttcaaaaagtacaaaaacgacgcgtacaagaaaaaaggtgagcgcggtcctattcagcatgatcaaagcccaccgtttttctttcacttgaaccctctttaaatggctttaaaatatcatttaaaagccattgcagattcaaaataattccctatctttatgcaatgttaggctgctatacctgacacttcatccggcttcgtgtacagcatcatgtctgtatatttagcttgatagtttacgcttgcactaaactccgctttcctgcattccttgaatgggctgccgacaaatgggtttcggtccatccagtcgcacagttctaaaatggaggacttgttcgaagtgaagtacacaaacgaatgccctttcagaacggtcagcacgtccaggtagtcagccagacgccaggacatctcgtaagtacccacctcggtggaaaggtacggcggatcaaccaggaacaccacacccggaacatccttgtaacgtttgaatacttccttgtagtcttcgctggttatagtcagtccttccagataatcctttgcttcgggataatctgtttgccgaatcctattgtagatggcttctttcttcattccttccaaactggtcacatatttcatggcgaacaacaaggatgcggaaaccgtgatataatccacgtagccgtgctctttttcttccctctcaatacgggcaaacattttatcgcgaacctccccggttatacgtttatttctgggttccccttcagctatccggcgcaaatcggataacagcacattggtggctgggatattcgcaagcctccggcggtagttgtcgaagtcgttatacacaacggcggcatcaagcctgacacatttggtaatatgtgacagcaggcccgagccgccaaataggtccacaaacacggtgctgcccgggaactgtcccagcaccctgataaaatccttcgcaaacatgcgtttctgccccacgaaaggaagcggggcggacaaatacatctttttcatttcattctgctttaaaacggccgcaaaggtccccagaataaacgaaaaacagcgggaaacatgaacggttcccgctgcaagacatatacagcaaactacacgttcagcccgaagcggaccgcctcgtcaccggcaagcagtgcgcgggttccctggatattgttctcgtagatatgcacatttcccaagtagagggtgatcgacttcaagggaagttctatctgccgcgccatcaggtacaagtggtaaatatcggaaggtagcccgaggttcgcgtcactgctacgctggtaggcggatagaaccagttcaccgccatctaactggaactgtaccagactcaaacagggtgcctggttgctctcggcaccggtttcgcccaggaaaagcacgtagttcttgctgttgcgcctctcccggttgattttcgctatcaacggaggcagcttctcgaaataggtcgggtaactgttcaccaggatggagccgcaatagtcccaccagttgatgccggcctcccggtacttctccacgttgcgctcaccctgcataaataactgcaactcgctgcggagcttcttgcgggcgatatgatgcccttcgaatatatcgagcaggtctgccggtgtcagcgagagctgctcgttcagaaggtactgtatgtttcccttcttgttggtctgtgtctttcccgtggcaaggatcttgtccaggatgcggtaatacttattcatagccatttcctccttctaaatttgaaactccctaaagataaggggaaacggcactccttgtggcataagactgcctgttcacactgcaagcgtcttgcagtcgctctggaaccgtttcaccagcgcgtacaccttgcgctcgctcaccgaatacttttcggacaatacggccacgacatacgaaactttctcaccctgatccagtaggcgggtatagtctgaatacaaatcaatataccgggcatcctccagacggattccggatgcttgaagccttttcaacagttcccggttaaagtttaatatctcaatcactttcatacaacaaaaaaattatatctttgcatcgccaatcattttttaaacacataaaaagagagaactcgtgacagagggtatttgcccccggtcgcgcgagttctctcgtcgtgtgttaaaaaagtgattggcgttactatttaacaggccgggggcttttttcttccctcccccgaagggttcattccacccggtaatcttccggatcaaaagcgtctttctttctccagccgtcagccagtgtatcctggatgtgcttcatggccttcgtgtagaagtccgtcagttcctccagattctcaaacgtccggtactggggctcctcatccgtcccgaacttgaacgtcaccgggagcatagcgccgccggtctgtacggccaaatcatacgctgccttataattgaactggttctcacttgacagccataccggcatgtcctcatagacaaacccggaaagtatctcccggtcggtctggtcgttgtaccagcccgtgatgacggactttatagtgtccggaccgggtttcccgatgaaaccctcctccatgtaggaggcggagccgtcctccctttcctgcacatcccagcggatgcgccatctgttacgtgccgggctcacgcactcgatcagtcttatcccggatgttccttctacccgtttcatgtaaatatgtatttagttcgacccttgccgaaagtttccgtcttgatggtggtctcgaacggaaagccgtcgggcatatccttcacttgcaagaggatgttcttcatctcctcgctgttggtgaagaactttttcggttcgccgttcatctcaatagccacgatacagcggtcctcgccctgttcggtcttgatgcccgtctcaaagtccttcaccacaatcggtaagtttaccagctcccggatgcttaccaccaccccgggaaaacgtttcttgccgtcctccggcttgtaggaaacgttcaagtctttaaatgatctcatgtctttgcctgttaattttttaaacaacgtatgacagtcggcgtgtttggccattccatagaatgacgctaccagttcacgccttcttcttctcgattttacctcgtgcatttttcgggcgaatttctgcttgatgcgtttacggatacggacatgctccggaccataaatcacataaccgagaaaatcgatgccctcttccaccgggaacacgcgctcgtcagattttatctgaagccctatccgttccatttgtgagtggacagcatcacgaatcatccacagttccgctttcgttttaccaagtacaagaccgtcatcacaataacgatagaaatgacggacactgtacttatccttcaaataatggtctaaaaaaatagacaggagtaaattaccggtagcctgcgagcttctaagcccgaaactgataccgctgtcaagcatcattataaaggaattgagaattccaagcagtttcttgtccttgaaaacacgggcaaagcaccacatagcaaaatcctgacgtacattgtcataaaaatggtgaatgtcaaacttataaccataccctgtcccttccggatccgtttccatgtcacgacagatgaacttcatcaggtcatgggtgccgcgtccctggatagatgccgacgttgtacgtataaagcgcctgcgcaggtgtttgtccactacggtcatgatggcatgtactccgatacggtcatacatcgtaagaatctgcaaattccttgcctttccatattcccagatagtccgttcacgataaccgctgacacggaaagagccgtctgatatacgttctgcaagttcctttataacttcctccctatgcgcaagcaggtagcgtccctggcggcttcgtttacgtgacgttccgcgaaggacctgattgaacgactccgacatgttggagtaatccgctatctcctcgataatataaccttctctgcgcataactgtttttcttggggccttcaatcccccgggcccggcttcttcgaaccgtttccggcctaccaaaccctacccgacactctgtttttcagttttccggcccttacggaccgctgttactgcggcttgcccccctcggcaccacggtggggacaagtccccggtgttgtacgccgattaaaatttcctttcgattgttgttcagacgagaaccgatgttcgtgttcgtattcgaggaatcgttgttcgcattcgacatcgaaacaccgccattcgggttcgcgttgttgttgccacgatagaccacacggcctatggggaggcgccacctttcaaatgcaaaagtactattttcaaattattatttaacaaacagatacaaaacctgacgtcaaaaaaatatttttcgacgggctgacgcccgtaatgaacggcgttcccctgctcggggaacaccggatgttttgtcgcttcgctcccgctttgacgctttacgcggccgatcatgcaacctcgcttatcgctttaaacgccacggcgctcgacgccttaacgagccggccgcggaaggccagacgagaaccgatgtacgtgaacgtatacgagtaatcgttgttcgcatgcgacatcgaaacaccgccattcgggctcgcgctgctgtagccacgatagaccacacggctggaggcagtggatatgtagtagatgtcgcagtaatttgtcgaggaggaacccgaaacggaacccaccggaatcacgtccatatatttgccatgcgccacggcggtaatccagataccggagctcacggaacccttaaccaggcgggtactgccgtcaggcatccagatgcgccacttcccggaattgcccgtgtcattaggaagatccacgccgtccatcatgtcatatttatgaccatagatgtcctcgtagccaaggcagcaaatattattcacctgcgtaaccgtggccccgccgtagtcatccttctcacggtaccacgcatactggtggacggagttttctatcaggctgttcgtcacattagggttgattgaggaggcttcctcgtagccgatcgtgtccgtcataccgcggctggcagtaccacccgtagtacggttgttcgtgtgagagcccgcgccgcattgttcctggctgtcacgacgaccgtacttcgcgtagaaaagattcgcgatgcgcgagtgcataagggcatcaatctgctgcataccgcgctggacactgtaatagtggaaatcagcccaggtcatgctcgccgtagtgctcccgccggtaatgcaggcgcgaagtttggaaccgacaacactgctgcccacaacggcacacaagtgctcgtcattaggcacccattcgggttccatatcctcgatcctgtcactgttagaaaggacaaccttatcgaactctgccgtgttcagaatggagaagtgaagagctgtagcacgttccggaacgtctgctatcagatacatgccggcttcaaatttcaagccgatggtcggcaccacaatactcttcaggatgtttccctccgcatcagcaaacacactgccgataagccctgttcctggaacgctcgggaagcggacacgtctgtaacccgacacgtccactttgcacacggaataagccttgtccgtcgtataggattccatcagcgtgggcttgccgctcatgatcttgcgttcacccagccagccgccctgtgtctccttgatggcatccagtgtcagtaccgtcgcctcaggcaccgggggcatttcgtcctccggataactgctgtagcaggcgtacttcttgttgttcaaataatcgttgatgcctttgctccagtaaaacggctcatacatcatccagtctccctcgctgccgtccagcttcgccaccgtacagtcgttcatatcctccgcatcggcatagaagttcgagctttcgtcatgcagggggaaataggtcatctccccgtccgggttgttcacttccacctgctgcccggctatctccaccttccggctcgtgggcatcttcgtcaccttggccaatacgcggtggcgcttggacaggatggcattcacatgcccgctcattttgtacgtattgccgaatttgtaccccgtcttgttgtccaggttcgaaacattggcatcgtcggccacgctgtcgtcaaactcgatcatcgtatagggcggctgcttgatggtcagttccggataacgggcggcatacttctccagttcctcatcggccagatacttcgtcagggtcagcttgcccctcagtcccgaatgccggtcatccacggcacccgtctgtgtatacgttccgtagtcgtaatacttcttcagcagggttccgtcgtcttcccggtctatctccagcacgaagcgctccagcttgccgctgccgttcagtctggcctggtgcaggcgttccagcatagcgaacccgtcgatgccggggcagttggtgtagcggtagccccgcacattattgatcccttccagtatcaggccactatcggacagcttggtcagatattccaggaacagttcctcaatcgtgtccggcaggcataactgcacaacgggcgcaccggtggccagtttcacacgggtcagccccgtacccctcacgtccagtttcttcaggcggccctgccagctcaagtccaaagtggccacattcccgttgtccccgttccgggccagccggttgttccgcatgttcacttcttccagaagcagcataccattggtcgaagccatgaacgagccgttccggtaaccgctggctttctccacgctcatgtcgagttttaccagtgaggtcagcagaccgaagttgaagccgattgcgaacgcatcctcgtgccataccagctccttgattttggctgcaccgataatcttcagcgggtcgttctcaccgaaggcacgggtcagctgcagggaatggagcacgtccgcatccaccacgccgctgtcggcctgcacgccgttgctggtggagagctgcacacggtacgggatggtcagccggtactgcatcggtttcagtttataagccttgtccagcgatgccgtactctggtagaactgggcacccagcgtggatacatagccgtactccacctgcttcaggtcataccggcgttggatgaagtagttccggtgtgctttcaacgaacccttcagaccgtagatttgcggataggtctgtttggcaccgtcagcacccaccggcatttcgttcaggaacgggtagatgtatttgaagatgccggacttgttatagaggcgtgagcaccacttcttcatctgttcggtatcgaaatggtcaatggctttctggatactgaaggcactcatgaagcttgcgcccccgttccatccgctcaccataatctccacaatcatgtcccagcaattggccacgatgaggttccacagccacgagttatgaccctgcatcacataagccccgtcgcgcttcgtctggcggttgtcgtcatacttcccggtcaggaacgacttgttgtcagaaccgagctggcagtcgccgtcataatagtcaatcgaccatttcacaccgtcccatgtgcggataagcatgttcttcgcaagctggtccacgccgaggttgaactgcacgtacagatagtaggcaatcaggtggggaaggtcgaaatacttcccggcctctttcctgaacgtatcgctctgccacttggcggtagggaacttgtcgccgtcgtcctcatagtccaccccctcgaacgaatgggattccgtgctgtaaaccatgttcctgcccgcaggcgtttcctttacgcaccggtagacgaaactcatcatgcggtcggtggccttgtacatcttgtcgtacttgtcaccggtaccgaggtggtctttcaggttcggttcttcctccgcgtcaccgcctccgtccgaccagaaggtatctttcggatgattaaattccagtcctccgtcaaagttgtagtccatgaaatccttatgctccggttcggtactcggcaaccagtggaacaggcacagcggattggagttgttcagcgtctcgaagcagacgggcaggtactgcttgtgtccttcctcgtcggcttccaggtagttcagcgtgtcgccctcgccccatttctcgccgccgatggtctcatcctgcccgaagatggggtagctgtcgctcttctcgttgttcatgttgtactggccgtaataggtcaggtcttcgtcggcactcttcgctacgaacaggtcgcacggcaggccgtcgatggccgaacggtaatcatcctccagcccatggtctttggcgtaacgctgggcaggcgtaagcagccccatctctttcagtccgtcattgataagcttcgcacctccggtattggtggtcatggacgagtccgagaagtcgcatttggaacatgccagcttcgcgcctaccgagttcctgcgtaacttgaagagattttttttgccggtagttaccaccggattcttctgcctgccgtttccgtcaatctccccgtagctcaatgtaaccgtccagccgcttgccgtcttctggaagtagaaacggaagttctttctggcatagttcacggaagaagtaccctgaatacggacatatacgttggtaaggataaagtcaagcgtcctgtcctctccgttatagaaacggacctcccttaccagtttattggccttcttgtcgttcagctgggccagtgcatccaccacgttcagcgtgtcgctctcgctcggaacctcactgcccacgctgcccgtgcctatcagtaccaggatcgagttccggcgcttcttcatcagccccatcagcttctccatgctcaccgtatctccttcattcagcacgcggttgtcctcatccagtgagcgcacgcccggttccccgtcggcatcctccaggtggttgcggtccacgatgtagttgttcagcacctcgtccgaggtcagcgccttgttatagatacgcacgctcttcacgttcaagtcggcacctgccgacttaaattccaactggctctgaatgtcaaaattcaccttgtcgagccacttggaagcagccgactcttcaccgttcacatagaaaccgatcagcgtgcgctgttcgttggtctgcacgttcggatagaacacgtaggtaatgcggatattcgtacccggctggaacttggtacccaccgagtcttcatagcgcagcacctgtccggcatccatcgcctcggtcaccacaccggtcaggaacttggcctcttccggagtcacaatcagcccgtaccggttgccgttgtccagctgccccaggcaggtgatcagctcggcatccgtatccgtcacgttggccgtgctgtattctatctccagcgtcatgcccacgtcacggatggcaaatccctcgggcttgtccgcctcgttgaaggggcggtaaccgccgtcagcggtcagggtcatacctgcaccaccggccagcagcaggcggtccttgtgccagccgctaccggcaccatattcgttcacgctccacagcacgtcccggaactccatacgcttgtcaccgctcacccagcttgccgggttgttttccgtgttgcttcgcccgaaggcgtcaaacgtacacacggcatccggtgccagcgtggcttcaatgtccgggtgcgatgtggtgttcacctgcacctcaagcacggcatcgccgcatgacacacggtagtccaacggttccacgttcacgttcgtccgtccgtagctgccggtctcaccgcgttgcagcaggtcttccttcaccacgctgccccggtcggtcactttcacacgggccgtatacgcatcgcggtcatagccggcatacgtgaagttccatgccgtgaactgctctgcctccagcaccgggtgtttccagtcacgctggaaccccgctgcccggtggctgaacatcaggccggcatacgctgtcacacctccgcctgccttcagcagcgtaatgtaatgcacccggctcaccacaccggagttctcatgctgcgcgtaggcttccaccacgttcgtaccctcctgcatctgtgtcagggggatggtcacgttcttctgctgcacaccgctgccggccgaaagaccgagggtaaaggcctgtccgccgttcacgcggtagtagatgttcttctcaccgctcgtgcccttggcagtaaaggggatgttcacgtcatttttatatcccccgtcggccagcccgttgcccgccgagtaggtggtctccagctccatggccaccatggtcaccttggccgtggccgtcttcatcagcgtgccgtcctggtaagttgcctgcgcttccacctgtacggtataggcagtggcatccttcaggtagggcgaagcgtcaaaggtatagctctgtccggctgtaacgcccacaaactccgcatcccggaactcactgatgacggtcgaaccgcgtttcacgatcacgcgggctttcaggtcgctgtagccgtccaccgtaccgccaccggcagtgcccacacctacggagtatttcaccacaaagccgctgcccagtgccagatactgcgaggcgggaagtcccgcaccgccgctgtccgtcaggtcgatgttcaccaccaccttgtcatcgtccgtgtacttggaaaagcgcacttccttcgagctctcgccgccctggttgtccttctgcttgacggtcatcacgtactgggtgccgtcctcgctgtcctgcacatccacgtccgtcaccgtacccaccatcgcatcgaacaccgttccggatgtaggaggtttcgtctcgccgctcaccagttcctcggtaggggtacggtttgacagttccttcttcaggaacgcttcgatgtcatcgcctgcataggcatgataggtgccgtccggctgtttctgattccatggtgtttcaagattcatcggatgttcagtcgcgttgatgattccgcttattttcctttttgccataatactgtccttttataataatcattcatttatcagttttactgctaccgttccatgcgtccgatccgttccacggctcgtcgcctttccagtatccaagtccgaaacagctgcttatcgcagaccacaccagtcttgccccggcatagactgccgacagggcacgtttccccacatacgcagccgttatttccttaccgcctatggttatcatcgtcaatcctcctcataaatcagatacagcgtattcgcatccttgtcctgcagcgcctcgtaagcttccccgctcatcacctcatgccggtaggccagcagtctcaggctgccgcctgttccggtatatacggcatcacccagcaggtagagcttgtccggcaggatggctgtccggtccgcattcatgaatatgccggcaggaggcacacccgccacatcccagtccccgtacagggtggagtccatgtggtaggcgaacttcccggcatccgctacatacactacgctgccgcccggtttggtactcttgtcaggtaaaacgttgcctgtttccatccatgaggaaaagcgtgcggtagccccgccgatggctgctgccgtagtctgttccaccttggcagcggcgttttctgccttggctgccgcttcgttggccttggtggccgcttccgtggcggcctgggtcttttcctccagtccggctacggctccttccgctttcttggcggcagcctcggcacgggcggcggcatcgctcgcaggcttccctatcagttccagggggacgttcaccatcttgccgtccttctccccgggcagtgatttcacaccgctcagcgaggtgacggtctccaagtcctccacgccggtagaactctggagtacacggtccagcacttcctgaaccagttcttcttgtgtcatttctgccatactcattcgtttttatcggtttctgacccgcccaggatttcgttcagggcatctatcacattgggaagacaatagcgttccaccgccatgtgtatcatcccggtttcctcatcgctgaactcggtctcgccggtactctcgaaaatcttgaacgcaagccgatgggccttgatgccactgacacgcgtatacagcaaatcggctatctgctcacgtgcatcgaaaacctccctcgtctgacgggttattccggtgggaacgctgaaattcctgaaatctaactttttcatatatatctgttttttaggatgaatgattcaatatctggtaacggaatccgtccgcttttgtaataagtaccgttacggagtccccggatgccatctcgtagttttgcaaatcttcattgtggttatagataccttttagtatgatattctttgaaccgggtctgaccctgaacgtgacaatggctgcaaaatcggtaggcaagtaactcatgccgaacttgtatgccacagaactttccgacggcagcgtaacctctaccttactgtagttgggttcattgtaatacatcaaaatgatattgtgttgtgagaaatccaccgtgtagtttccacttccgaaggtaagcagcttggctttcgtattgataaacgccggggcaagtaatgccgcattgctgctgataccgtagttcttcgtaccgccggtaacatctataaacaatccatagttcgcttggtcgaagccgtaattcccgtatatattgggggctgagttcacgatacgaccgacagcggtaaaagctcctcctgcagaagacggtatcacatcatcaccgaacatcacatatcctttgctgccgccgacacggaaaaaatcatcataaatggcaagaccgccaccgctcccgtgagagtcggccacagaaccgatacggccgttccctatctcaaagccgccgattttccctttgctgctgtctatctctccggtaaacttaccgttggtcgtttcaatgctgccgtcttccagtatcttaaagttgccgttggccgttaccagtccctccagctgtatatggtcggctgtcagcttgattttgctcacggtatttccgtactcgtcctcttcctccacgctcaccccgataagggcaatctttcctgtattgtcctgcgcatacagaccggaaccttcaggctttatgacaagcccggtctctttcagcgcattaccgtccttgtcgaagaccgccgctgaaatctttaccagccggtcgctctgttcgaacagtgtacggtacttataggccagtgcgtccgccttgttggtgctgaacaccagcagcgaaatgtaaatcacgcccgtaaacgacagcttgaagtcgccagtgccgttccaaagtccgtccaacgtgaacatcttctcaccgccaacgggcaggtcctcttcatggccgaacatgttgaagttctcaaacccggtcttatcagcgttcacaaattctattttcaaccttccggccttgataacccggtagctgaacgacagatacaccacgccgggcacccgttcgccctggctgttcgtctgccggtactccggtaccagccggaagtcctccagtttctgcatgatatagctgttccggatataggcataaggcaccttgccgtcggtccgtatctcggcatggccgtccggcttcgtaccgtaaggaccgccgttcgcccagatccagcgtccgcccagggtgaacagcgtagccttgctgcccgtcttccatttgtccatgccgtcggcaaaactgctgttgtccagataactctgttcttcgcgtatttccttgcgcaagctttccacggctgaatggattttcccctcggttatctcaaaccgcgtcaggatgtcctcgcccgtcatcaacacgaacgtacccttcagccacacgttgtcggcatacaggccgtttcctttcggctgtttgtctgccgggaaagcgctgctcctgatgccgtccagcttacccagccggcaacgaaggcagccgttgaagttcttggccttcacaccgtccagaatgtcgatacggggctgtccgtcctccgtggccgcaatggatataaggttctgccggagcggggtttcggtgttgcccatcagcacgcactcatcgcctgcctccggcttcaccccgccaaactcgcttaccgggaccagtacaccgccggctatcaccgaagccacctccacccagtatgcttttagtttcttaccacccgtaaccgcacagcgcatcaggtcatgggccacaaagcccgattcctgctcaaacacgatgcggtagttgtcgccctgcttcaccacgtccttgatcttgccgttggcagcggacaccaccagctggccgcacacgctgcgcaccttctcgatcagcagttccagcgccaccaggctttgccgggcagtcactttgtccaccgtcaggtttgtcagtccggtcagctggtcaatccacagctgccagccctcaccggtcagcccgtccacaaactccgtgctgcgcagcagttcgcggatcacggcagtcaagtattcggcattgccctcaccatccacgatgccgcagggcttgccgccagcagcctcgccaaagctcacacccttcaggaagcggatggactctttggctgtgtccggctggttcttgctcaggaactctttctggctgcgccgggcggaaaacaggttgttgtccgtgggcagcgtcttgtcccagcttcgtatgatgtccggaagggcagcgccttccgtctttgatttcgtatagcttttcagcgcaccgatgctgtccgtcaccttgtcgaacttgcccacctgcagcgcatcgcttatctcgatgtccatctgcccgggttcgttcaccttgcggctgatcttggtgatacggctctgacggtagcctttttccgggaaatacttccggctctccagcttcacccgtctgcccacaaacaggtctatgccgtgctcctcgatgtataccgggtctgtcggggctttgtaggcggcaatgtccagccagtggtcccggttgtactcgtccaccgcaaccgcaaactcctcttcggccagccggtaatactcatccggcatccggatattccacaggatataggtgtcgcctgctcggggcaccagcttgccgcccggcagctgggtgtcgtcatcgtagggccagatggtgatcagttcgaattcacgtgccgcgctgtcgtagttcacctcaaagtagtggtcatcgctttctcccagtccggcaaggtcgcccgtctggaacgacacacgtttggtttctccggccagctcgtacaggttagggtcaaagtccagttccccgtcccggaaataatagacggtgaatttgtttccttcatcgtctgccacctcctcgctgcgaaccgagctcaccgtaccgacccgacgggggaagatgccgctgaaagcatcctgctcgtaatggtcatagatgccatattcctccacgccctgctcgatgtacttcctgccgccgggaagcatcagacgcgggctgccgtatttctccgcatcgatgttgcgggtcgagcctaccgggaacaggcgcgtatagaatttggccgtgttgctcgtatctctttccagggaggtcagccccttgccatagccaagggtgatttcttccccgtgttcgcagcggcacacgttcacagtctgcccctcaacccaccattccaccttgccgcctgccttttccgcgatggctttcagcgcttcgtcgcagtacatcccctcgtagtctatcgtgatcagctccgtaccttccaccgtacccgtcttccagtcagtaatgtggcccatgccgttattgatagccttcaccaccatcgccacatgctcgcggggcgtggccgtcagggtaaacagggggttggtgtccccgtccgtcgtctccagcaccaggaaccgcttgattaggctctcgataccgtacagcttcaggttatactcccattcaccatcgctcacctgcttcggcgtgtagcgttctgtcagccagtaccgttcgcccagatagtccgtgtagtcgttcacgtccaggggcaggaaggcataatagctgaacgacagggaaagcacattgtctccctgcacttccttgctttgcgtcgagctgtcgttcacggccacatccgcacgcttggttccggctttatcatatatcgttagaagcatattctaatagcgtttgaatggttatataatcggtttcggttcccggaactttacccggaactttccggcatgcacaccttccgtccacagataggtcagcggggtgaacttcgtacagtcggcatacttcacccgcagctgcagatccagctgggggaaacggatctccagccagccgtccttcccttgcttcaggaaattcacaaaggcaaagtactgcttcatccagcctgcctgggtcttgttgtaaagcgcaaaatgcagcgtcacgtcacgcgcttcattccgtggggtcagcacggggctgtatttttccccgtgctcttcccgtatgtccacagccgtatccttcttggccttgctcggggtcaggatggccgtcaggttctccatgcccccgcgccggtcttccaccaggaacacgccgtattccgtccagatgtccgtgccgttcaccagcaccagtccgctcagtatattgcccatatcacttcacttttagtccgtcacgtatcattttctttatcacttccttcagttcgcccaggtgtccggcgctcacaccggtgttctcggctatccgggccagatgcccttcagccgtgtccatcttctccaccacgctttccagccggtcgtccatgctgctccagtgctgcagcccgccggtgaacatgccctccagtttcgtgccctggtcctgcgtcatggccgtaaagccgcccgctttcgcactttggctcgtaccgccctgctgcgtcttgtcataaccggtggctgccgccaggttgtcacgcagggcaagggcttcatccatatactgcatgtactcttccatcagcgcgttccgttccgcctcggtcagttcgttgtcctccatggccttgccaaacttctcccaccagcctttcagtttgtcgctgtacatctcaccgatcttgttgctcagcatcgcccgcatgaagtactcggatatatcctccgccgcatccttggcaccgtacttcatgttcatcaggttgtcgatgaagctgctgtacataccgtcgaacgaaatgcccgtcagcccttcatacagctggtcggtcagttcctccagcttgccggcctggtctatgtagtcatccagtttctcggtcagtcgcccgccatagcctcccttaccggtattctggatttgcgtccacatatccacgttgctgcgcagtgccttcatttcctccgggctcaggctccacaggttcccgtcccactggcggccgatctgtccgctcagtttgtctatctgtgcctggttgaaaccgccccagtagtagttccagctgtggtgacttccgtggtagccggcttgcgccatagccatctgcaggtagttcgaattcgtttcctgctgcatcttgtacgcgtcgcggtaagccgccacactcttcgtcccctggctctgcttgatggtgtcggtcagatcctctatcgaggtctgcagcagctcgttccggtctgtaagacggtctatagccgcctgcacttccttggcgttcccgccgatgccgaacagtttgttgaaacctccgaaagacaccgtgttcagcaatcccccgatacctttcacaagggaaccgcctatctgtttgaacaggtctccgctgaggatattgtcgagtattccggttatcgcattgaaaatggtgtctatcaatgatgagataatcgggccaataccgtctttcagcaaatccagtatggagagaatggccgatatgatctgcccgatgactccggcacttgacagggtttcggacatccggctgatggcatcgccgaccttgcctccgatattcagttttgaaagaccggtaagcatgttctggattccttcaaatgatccctgcaaggttccgctcgcaaagccgtgcaacccgttggataccatgttcaatccgtcaaccgtgtcccgggaggcacttttcacctccccggcaagcgccttcatttcagaggtggcgttcaggtattcttcgtcagctgaaacgctggacgattgagccgtttgaagagcaatttgggtacgttctatttctgcctggttaccgctttcaagagccttgttgtaatcggcctgcgccgctttcaaccggatgaatgccgcttcctgctgcagttctgcattttgcacacgtgttacggcatcccccaaagcgtgcatctgcgtttgcagccgggcaaaatccaatgtgccgttgccaccggggagcatgctttgaatacgttcaatggcatcgtaaacgacctgctgatccgctgctcctgattttttgaactcatccgtcttgacatactgcttaagttcgccaagcagattcttcatctggtctgcaagcaagccggttaaatccccgaacgctgctccccagtctatcttctgggtaagggattccatgtccactttgtgcacagccgcatcacgctgcttttccaaagtcagtctttcgccctgggactgtgccttgcggattttctcggcatattcttcagcgatggccagtttctgctgctggaaggtcccgtattccttcagatagtcacgcatggcttccgcctcttccctgtacacgtccgcctccgcttttttccttgactcggtgtttgaggcacgggctttttcaagttcatcctgttgctcccgggtaagtccgttatctccggtagaaagaccggcttccttgttctcacgcttccagtcggcttcctgccggtttatctcttctttccgggcgttatagtcatattcgatttgtgccagtttcttctcggtaccggcttgcatgcggtctatctcttccttccggttttcagcctgcagggcggcaagatcctgcgccagcctacgctctgtggcaagccgttgcttggcttccgcttccggattcttcccggactgcttggggtcgatatgcccaccgatatttccttttttggctgcttctgcggctttctttacctcttcctccgcttttttcagataaccgtcacgtttgttttcggcatttttcaacagtacgtcataagcttcctgatcatgtttcttgatggcagcctgtgcgtcatagaactgcccggattctgccatgcttgactgcatgatatattgtccccatttcccgaaaaaacccatggcgctttccgcctcttccggtttctgcgccttgattttattcacctcttcatcggcttctgcagctttttttacaaggttctggacattggtctggtgcagcagaacctgtacatagtcctcgctcttttggataagggtatcataccattcggaaagtgttttataatacccgaaagattccccgtacttgcggttcagttcctccaccttcgccttttcctgttccttgctgccggtgaagttctttatttcatcgatgaccgatttcagttcgaagcgggtacgcaccatctgggcacggccgtccttctctatctcggtcatttccttgagtgatatgttgaattcatccacgccttttttggcactgaacaggtttttcgtccaatcccagatttcatcaccgtacattaccagcagcatgatgccggtggtcatggccgtctgccaggaaaaaagtgaggacaggacctgcttccataccggtgtgcccttcttgccggacttctgcagctcatcgtattccttgcgggcacgggccagttcgtccgtaaaaatcggcaggttgttgctgattgccaggaagaacatctgcggtcccatggccaaagaaggcatttcacgggcgatctgctggatactgttgtgaagcccgcccaactggcgctgcgcgttgggtacatctgcaggggtgacctgcacggattccgattcctcctgcagcagtttcagtttgccgcgcaattcctcaagctgcttctccagtgcatggatctgcgcgatattggcactctggtccagattgggggcagccgtctccccggcaaggcgcagcctttccagttcagcctccagcagcctgacggtattacgcagttccagcgcctcacgctcggccttgttcatgccgggcgtgagtttgtccttcatcaaaaattcaacttctacaggtttgctcattccagtttgctttgaaaaaatcctactatatcgttcgcttcatcctcggcgctgtgttccggtctgggagcaccatttccgccgccttgctttttccgcacataccgcggcgcgtcactaagcatcatgatcagggtctggtaattcaccttgttcagtatatagtccacgctccagccggtggcactggcaatctgccacacaaaaccgaaagggctatgggagccttcataacggctctttaactccccttctttctttggctcagtctcaagctcatcggattcgtccgctcggctgatctgataataggtataaaagggtcggtacccatcaggctgacaaaacgcttgatcgcacccaccagataacgctgttccatgaagttccttatgagccatgccaccgggcgcaaaagcacgcggcggctgaaagggccacgacaaagggtataggccaccatacggctcaccgccttgccgtgagaggccagaaactgcatttcctcctccttgctgaacccccacatctcctcactggtgatccccatcgacaaatatgtccgggcaaaaagaatctgaccggacatataaggccgcctcatggtcacgcgcagctccagcggggatttcctgaaagggatatgaaacgctttcagcgggacgctcacaccgatatccagcagcgcgtccgcaccctcacgctggatctgcttgatgacagcttcgtccatacgctactcctcggccaggttagtggaagcagcggcggcagattcagcaggaggcagtttatactgtttccactcttccgggatagaatccgtattgaatacgccatggggctgggagccgtcttccggcatggccacttccagcgtgcattcgattttcgccgtttctgtcagggtcagcttgccgccgagattggaaagtagcgtgccattgggaatcaggatgctctgccccgaaacaagggctatttcccacggaccggtcagcaacacggctgccgtcggggccgtccaaccaatcggggttttcttttccgagtcctcttccttgtagtgcatggtaccacccagcaagctatgcaggttttcgtagttcagctggataacgttgaacgtgggggcgatgctgccattcgactggggaatgataagcaccggggttcccggcacctgctccgcctcgattttggcggattcgggtttctgcccgcccatgtcaaacgaattcttctctatgtaacccaccacaaagtccttgtatttcacggcaccgacgccgtacatgaaattcttattcattgtttcttgattttgaaagttaatactatgccggcaacacatccggttataaaagcggccagcgctattttaacgggactaaagcgacgttcaaattccgtttcaactgtgaatgagtcctcatgtgtctcattacggatacgggtcagttcctcctcataacacagtaccagccgctggaggctgtcgcaggatgcctccgctatgatattgccggccgcatcgctcttcaccgtcaggcccgcctgcccgttcctggaatggtaggacgaaccggagggaagtttacggaggctgtccggagggatcgtcaggctcaccgccgatttcggaatccccgccatcaacaacccccgcctcacgtttgacacgttgtcggcgcttgacgacaggctgctgttccggttcacctccgtcctgctctttcgagtactcgcgcatcccgtaaagaacaggacaatcatcatgatgcctgcaactgttggcagtatcaatggctttccggaggcgtgccatttcacgccgggtcgcctgcaaagctttcctgttttcattcagttcctcttttaagggttctacaatattctcgatcaggatacgggtggcatgttcggtattgtcaatccgtaccgtctcggcttcggcggtagccttctccgctttcgccctcgcttccctgaccgttgatttcagggtgatgatggctattatcgtggctaccagaccaccgcccagcaccagattcatgacagcactgaagtccatacgcacactggtctttcaggtcaaagcctatttaccggcatccttacccgcaaacagtccgatgagccactggacaaatcccgtatcggcaacaccattggacacaagggacgcaccgaacccgtaacacaacgcgatataccacgtggcatcagcgacaaagcccgcatccagccaccataaaagcatggcggccacaatgcccacacaccagctgacaatctgtgtcgccaagccctgcatttttggaaacagagccttgatcccttccgtgagcaacaccacgccaccgacaaaaccggcaaaggtggtgatcatcgcgctataatcgacttccggtactgtaccggtctgggcaaaagttgctgacacgaatccgagtatcagcacaaagaataaaagaaatcttttcatgttgttgttgatttattgagttatacctatttgtttaagccatctctgtacatcaaaactggggcaggctttggccgccagttcattgtgaccgacgattctcacatcgggaaaacgacgatggaaatccttcacgtacttctcaagcgcctttttctgccaggaggtacgggtgtccgcaggcgttttaccatcctttgcacacccgccggcatagacgatatggcggctcacggaattgtaaccggccacgccgttggtcacttcccacgggtccacattcgcgtcctcgttattgttcaccaggcgttccactccgccgttcagatggaacaggtcggtatatccgacctgcttccagccgcggccgccctttgagacggggttcgtatgccaggcgcgaatctccgcaccgcttacctcacgcccttcaggagtggccgtgcaatggatgacaagatacttcagctttcccatcactcaccgccttcctcttcatcaacggccgcctgggacagtgctatctccaccttcttctccggatcggcgtccaggcccagtacaagtgtgccggataccgccttgccgctactgttcacaccggcggtgaccgtcagagagccatcggtaccgactgccgtgaaaccggcaggaatggaaaccacgctgtaatcaccggaggcagtgaccttcacctccttgctctcaccggcggccttgaaagaaagagcgtccggatcggcagaaatgctgcgttccaccgccttgaacaccggagtctcacgggtgtcaagcaccacgaactcctcgccgaaggcgatttccgtgtcggccttcataagcagcttgaagaagtacagctcgctggagttcatccacttgtcaatctggatcacctcctcatcgtcctggaggttcacaccggcaaaaaggttgccgtcagcgctcatcgagcagagcgtggctacgataaggccatcaggccaggaattcagcgtctcgatggtgatacccttgtaacgcttcttgttgatgtccgtctcgctcgtgttcttgtactcgcgttcggtcagctcgtcatcgtacttgtcgaagtcgtcaatactcatcaggatacgcaggttcggattctcacgcagggcttttggaatagccttgcggacagccttcaacttgccgatcatggaagtatcggaaggagccggaaccacgatcacatccggatctttagccgcctgggtcaggataccgttgaaaaggtggtcgtcgtccgaaccgaactcgccgttcaggtaatgccagcccagctcgaacttcacactcttgctaagttcatccagaagcgtgttctgcgcttcggggggaagttcggcaaacacgaggttgcccttcggctgccacttgcgccaaacatgctcgaaggcacggggattgaaagtcgtgaacgccatgaagtcctccggatccagtgatttctccgagtaattgaaattgcctttcgagtcttccaaagtcgggttctccttacgcttctggagcatcttgccggtcttgatacgcggcaggctgatttttttctccacaccggggatcaccatgatcagacctttttctacaaggtcattcccggtggtggccaggaccagtattttctccagtacctcgccgttgtaattcgtgtttcttactactattgccatggcaaatgtttttatttatggttcaacttgtccttaatctcgctcatgcgcttgttccaggggctttcacccgtcggattcacacgaaggtcggtcatgacactacgtttgggggaaagcttctccaatgccttttccccgttctcccggtcttttgccagaaggttctcatagatggggcgggtggcggcatcgatacggccgtcctgttccgcatcatcaagcagtttcttacgcgcggcagcgtcatccgcatccgccttgtcctggaacaccttcagttcgcccttcaggcgggtgacctcggcatcaagggccgggactttgccagcctccgtttccagcagtccgatttcacgcaggaaatcgtcatccgtcgcacagttcttgaaccgcggacgtctcttgagttcgtctaaattcatgctattctcgttttgtggcttgtgcagccggttattgaatatttgaaatacttgttcgggggtactgtcctccggtaccgggtcagcgtcataaataccgtcgataagccccagcgccagcgcctcgtcggcacgcagccagtgatccttgccgtcaaaatacatcgcgcggatttcctccttgtccttgcccatacgggtggcatacatctcgcaaagggtatcctcaagcgcctcgatctcacggatgcagtccttcatctcatccttgttgccgtaacagccgccctggacactgtgaagcatcagacgggcataacggctcatctgcacgggcttgccgcaaagggcgatgacggaggccatgctggcggcgatgccgtccacgtagatggtaatgtcggccttgctgttcttcaaggcattgaaaatggcgatgcccgaataaacctcgccgccgttgctgttgatacgcacgtccaccttcccggtcagggcttccgcttccagaagttcacgggcaatatcaccgctgcgcacgttatcatcgtactcaccgatgtcaccgtaaagaaggatgcaacaggcatcggttccgggtatcatattgaaaaatctactcatgtcactatcgttttggcaggtccttccctgcaaagtttacggtgcgaaattagggggattaaaagcctttttcaaaccgcgttttcatcatggagactttaaaggattgccatgacgctttaaaatgtcatcatgcggagcgcgttttttttcgctccttttccttatcaattttgcacgtaaaaaaggaggtaatatggccgaacttacaaacgagcagaaaaaggcatgggcgaaaacgctctacacccgcgaaacgctcacgcaggcggaaatagccgagcgtgtgggggtttcacgggtgactgtgaacaactggataggcaaaggaaactgggagcagctgaaggcttccataaccatcacacgggaggagcagctgaagaacctgtaccggcagctggcggaactcaacaacgccatcatgggaaagccggaaggggaacggttcccgaacgccgcggaagcggacaccatttccaaactgtcgaacgccatcaagaaactggaaacagaagtggggctggcggacatcatctccgtgttctccgacctgctcaaatgggtgcggacctacgattccacgcaggcgaaggagatcaccccgcttctggacgcgtttgtcaaatcaaaattatcctgacatggcaaagaaaagactcacaccccaggacaggatcgcactggacaactggaacgagctggtggcatccgtgcgcgaacattcggacatcaaccccacggacacggaaacggaaatcaggcagaggcgggaaagactggagaagaacgacgaggagtggttcaaatactacttcgccatgtattgcacctgcgagtccgccgccttccacaaaaaagccaccgggcggctgatgaggaacaaccgctggtacgaggtaagggcctggtcacgcgagctggcgaaatccgcacgctccatgatggagatatccaaactggcactgacaaaaaagatacgcaacgtgctgctgatctccaactcggcagacaatgcggaaaggctactgctgccgttcatggcgaacttcgaggagaaccagcggatcatacaggactacggacagcagaaaaaaccgggagcgtgggaaaccggggagttcacctgcatgtccggatgctccttccgcgccatcggagccgggcagtcaccgcgcggtacgcgtaacaagaacttccggccggacttcattctggtggacgatatagacaccgacgaggagtgccggaatccggaacggatcaaaaccaaatggaaatggctggaggaggcgctgataccgaccatgtccgtatcgggaaactaccgcatcctgttcaacgggaacatcatcgcgccggactgctgcatcaaaagggccatcgaaaaggcaaccgaactgaaggcgaaaggaatcgggcacgtggatatcatcaacatccggggaaaggacgggctgtccgtatggcccgaaaagaactccgaggaggatatagacctcttcctctcactggtcagcgcggcggcggcacagaaagagttcttcaacaacccggtggtggacggcggcgtgttcgcggaaatcacctacgggaaagtgccggcactttccaagttcaagttcctggtgatatacggggaccccgcaccgggagagaacaagacgaaaaaaagttccaccaaaacggtgtgcctgctcgggaaactcgcgggaaggctttatctgataaaaacgttcctggacagggggctgaacgcggaatttgtagagtggtacatcaagctgctggagttcgtgggcgggaaaaccaccgtatactgttacatggagaacaacaaattacaggatccttttttccagcaggtattccagcccatcgtgcggcggatacgcagggaaaggaaaatatcactgtacatcgccggggacgaggagaagaagaccgacaaggccacacgtatcgaggcgaacctggaaccgctcaaccgggaggggaacctggtactcaacgaggccgaaaaggacaacccgcacatgaaacggatggcggaacagttcaagctgttcaacctgcaactgacctatccggcagacggacccgactgcgtggaggggggaaacagaattatagaccgcaaggccagacagtcggaaaagcccgtcattgtcacaaggaaaagcacgcggtcacaaaacaagtacagagtgtaaacttcaatacctatcattatgagcaaatttatcgaactttcagactacgacgcgagcatacaccgcgagattctggacgcactgacaagggaggacgacgccgtcgtggagatatgcgaggaccgcgccgtcgccgagatgcgctgctacctttccagacgttacgactgtgacaaaatattcacggcaaccggtgacaaacgcaaccagcttgtcctgatgatggccatcgacatagccgtgtaccacatcttctgcatacataacccgaggaacctgtcaccgctgcggaaggaacgccacgaaagggcggtcgaatggctgaaagccgtggcggccgaggagatatcggtggacggcctgcccctgctgtccgaagagacgagggcggcaaaatcaaatttccttatcaaaagcaaccgtaaacgtgtaaaccattggtaatatgaacaaaagaaagaaaggggccggaaagataacccaaagcgggaacctgccgaggcccgggcagaaaggacccgcaaccatcatactgacacagcccagaaggttcggtatagacatagcggactacatgctcgcggtaagggctttcgagaatgtggactactccagacgcttcaggctgtacgacctgttcagcgacatactcatggacacgcacctgacaagtgtcatagagaaacggaagaatgccgcactggcatcttccatagaattccgcaggaacgggaagccggacgagaaggtgaacaagcagatcaggtccccatggttccggaagttcataggggacatcctggacgccaaattctgggggttctcactcgtgcagttctaccgcaagggggaatgggtgaactacgacctgataccgcgcaaacacgtcgatcccgtgcgcaggctcatactgcggcaccagacggacaccaccgggacgtcctgggacgagtaccccgacctgttgttcatcggttcacccgacgatcccggactgctggtgaaagcagccatctgggtgatatacaaacgtaacgacgtggcggactgggcacagttcgcggaagtgttcggagcgcccatcagggagtacacgtatcccacggatgacgacgaggcacggcagagggcgctggacgacgcggacagcaccggaagcctgtcggttttcgtgcacgcggaggatacggtgctcaagctcgtggaagccgcgaacaagacagggagcgcggacctctacgacaagctctgcgagcgctgcaacaacgaaatctcaaagctgttcctcggaaacacgctcaccaccgaagcctccgacaagggcacacaggcactgggaaccgtacacaaggacgtggaggagaaagtgacgctctccgacaggcaggacatcctcgacgtgctcaactatgacatggccgacatattcgcaatgctcggaatagacaccacaggcggggagttctgctatccggaaaagaagcttatcgaaccggagaaaaagatgtccatcctcacacagctgcgtacgaacttcaacctgccggtaggtgacgactacctctacgaggaattcgggatcgagaaaccggcaaactatgacgagctgaagaaacgccaggaggagaaagcggcggaaatcgaggcggcgaaggcccgagagaccgaaaaggcggaagaggatgaaccggatccggaagaagaaccggaactggaaaagcacggtaaaggaacacccaaagaaaagaaaaatgcccttaaaaacgcatacaactggctgaaacgttttttcgggaaagccccggggagagacggggcagctttagaatggtgataaacgacctctacagaatggaggacaaacaggtggaaactttattctcgttcgatgaagaggtactgaagaaagccctgaagaacatatacagcaaagatttccatcccatgaccgacatcgaggagaacctgttcgaggccacgtggaaaacgatgaacaaagccaccgacaaggggtttgggacacggaaaaccgatgatccggattatgacttctaccgtgaaatccgaatgaacaacgccgtgttcgcagctttcaaggtacacagggcacagaacgacatggcagcgctgctgctggacaaaaacggaagtttaaagccgtttgaacagtgggtgaaggaagccatgcccatagccgaccaccagatgatccattggctgcgtacagaatacgacacggccgtcatacgggcacaccaggccgcggactggagacagttcgaaagggaaaaggacgtattgccgaatctcaaatggatgccgtccacatccatacatccgggagccgaccacaggattttctgggggaccatacgtccgatagatgatccgttctggaacgagcacaagcccggggacagatggaactgcaagtgcacgctctcatcaacggatgaagcgccgacagcggtaccggacgaaaacgggcagaacaaggcacatgacggtctggaaaacaatccgggaaaagacggcaaactgttttcagacaaacacccctacgttactgaagcgcatccgggagcaaaaaaagccgtggacgcactgaccaggcgcatcaacgaaatgatagccgaaatgccggacaacctgacgctggaggaaaaaaccgacatcgcccgcaacaatctcaagatagaaaaggcactcggcgttaccaaaggcaagccgatgacatacgaacaggcgaacaagggaaaggagaacccgaaattcggaaaagaggaaggataccgcgtgaattgccagacctgcaccgtgacacacatgctcagaaggttggggtttgacatcgaggcaaaacccaacatcagacaaagcgcatacaatgaaatggcaaaacaaggtatcacatgggaagaacgtttcctgaaccgggacggaacaaagccggattatgactatacctataaatggcaggtcagaaagggatatcaagtaatgaatgcaaaccggctgaaggaatacttcagggaaaaattcagagaggatggaatatacgagatatattgtgcctggaaaggcggctccgcacacgtgttctgcgcagaggtgactgaaggaaagacaaggttcttcgacccgcaaaccggaaaggatgatgcaagcaattacatacagagcatgaaagcgggccgtgtgggagtgataagaatagacaacaaactggtaaatcccaaaatcatgggactattcatcaccaaataaacgggaagaaagtgccagcccctcctcaccgtccaccagacggcaggactggccgtcgaacagaataaaggcgggaagaccgacaggcaactcaaaaccatccccgtcaacacagcccacggaatagatgcttccttcaggggaactggctgataagacaacggagttgtaaccgctactgtttgctaattccgacacttgtttaggtatttccataacgcaaaaaggcacataaaaaacgccttgctgcaaaagtataaaattattttttaattcagtcattcatggacataaaagaatattcaaaactgataaaagccaaacggaaagaactggatgggctaatgaaacggaaaatgccggttatcgccggacgaatggcaaaagaccatttccaggacaacttccgccgggaaggtttcgtaaacggaggattacacccgtggccgaaagcgaaaaggctgtcctcgggacggaccgatgcggcagggagctacgggacgctgctctccggaaggaaccatctcttcagctccgtcaaatacatgccgggagaataccgagtgagggtggcaaacgaactcgtctatgcgccggtcaataactggggaggagaagttcatccgactgttacgccccaaatgcggcgttttgcatgggcgaagtattaccaggcttcaggcaaggctaaaaaagccgccacgggcaaaagaaaaggcaaaaagaagggttctgccgcaaacaatgaaccgcaggaaaatcaggaagcgctgaaatggaaaaggctggcgctgaccaaaaagaaaaagctccggataaaaataccgcaacgccagtttatcggggaaagccgggaactgtccgaaaagatagaccgtaaaatggagaatgaaatcagaaatattttaaacttataacaacatggaagaaatttttatcgcgatcatggaacgcatcgccgaaaagatgcctgaactgtcatacattgacgaggactacggacagcttgaagccggggcggaggaggaccactatccggtaaccttcccctgcgtgcttgtcgggaacgccgaatcggactggaatgacctcggttacggggtacagaaaagcgagtcactcatcaccatacgactggccattgactgctacgatgacacccactacacctccggaacctatgacaaggtaagggaacggcagctgaaggccaaagagctgtacaaagccttgcaggagttccagtgcacggaagagaccagcccgctggtcagggtaaagagccgggactattcgctgccgggaaacatcaaggtgtacgagacggtttattccttcacgctgcatgacgagtcggccatgcagtaaggggaaggttcattcccccgtgaacagggaaagctggatggctgtcaggcggggtttcttaacctttgggacgggcttcacctccaagtccttcagttcccgacacttgcgccggataatggacatgatccgctcctcggaaatgaaaaactcctgccgggacaacactttcagggcatcatcaaaacgcaggcgctgcacctccgtccagtaatagtaacggcggcacaaggcttcatcacggagttctatcaggtttttatctcgtcctttggccataagttcaggtatatgctgcaaaattaggcatttaaccggggatgttaataaaaaaacgccgcatcgtgtatgaatgcggcgtttttctgtttagagtgtgaacaaaatcacatggtcatcagttcggtgtcatcctcacccgggacaaacggctcgatgcgggtgatcaccttgctctgtaccttcacccgtccgctgccattacagaccggacattttgcggataaaggagctcctccctggtccaggtaaaagatacgtcccttgccttcacaacgcttgcaggccatgacgtgcggcgcgatgttcttcgtcttttccataactacaatcggcagaatgaaggctcgatacggcgccagacaccgttctcgtcacgtttatgaaaatagtagttcaccgcggtcttgtacaccacgttgctctcacggaagaggtccatgatctccgtgtattcgctgtcgaaacggtcctccagctcatacagcttgctcaccgacttgtagtccagatcaccctggcggttacgctcgatcatagtcataccgagctggtacatcggatcatcggtaccgagttcccggctcatggcgtaacgcttcaggtaatccaccagacgctcggcggcgaggttggcacgctcgtcgaagctcttcaccttgttactcctcacttccagcttcatgtcaccgtccacgatggtgaaactcgcctggtcatccttgcgaagttgcccatagtcacgcatcaggtcacggaaagaggcggcttccttctctacccagtcacggaaggccttcacgtcatccacaactggaaacagcctgttcttcacttcaagcatgaactgcgcacgaagcccttcgtaggcatcgcgacgattgcgcttgttttccttctcttcctgctggagctgtttcaaaagctccctcctgtcctgggcggacaggctttttaattgttctttcaagtccataactgaaaaattaaatggttgctattgttgtttattctcacgtttacggcggatggcacgcagcttcacctgcaacgtgtccagtgcctcacagtcaagttcacggaactccttgccggcgatacggctgtcccggcagaaggcgttcacccggtcccagtcggccgtatcgatgcccagcaactgcatctggtgaagcaccgaggaacgcttctggcggagaatcttccggagctgttcctggtaagtgggcggtaccagcttctgcatggcggccacggcggcgctgtattccttcagcgtcatctcgcgcaggctcgtggtgcggccgtccgtgtactgggaaacgatgctttccttcagtgcctcacgatccgatgtcggaaggcggttcaaaaggctgtaaaacgccgcataattctcgggtttatttaactgcttgcggctgttgatgtctatctgcatggctatactgtttttttgtttattttaaggtcattgatttccttaatcactctctttactctgatagtacacaaataatcaagaagatgctctttttcatttttttgtacacttatactggtcgaaaaattcaagtatgcccattctattcagattttcattaactcaaactattcataccacatcagcacaactctatgatttcacccacggcagagcgtagaagagtacgcaaaaccgaagggtttccgctatcatagatgacttccacacaacactcatggcgtgcgttacgtgacacaaccagctcgcaagtcatattctcacagagccatttttccactactttacggacaccaactgcggtgaccacaattaccatttttttactcataatattgaccgtgctgtatgttattcaactcttatcctcccggtgtactggtttccccgaaacttcatccccttggtgaagccgcccggatatcccagttccttgcttctcgcgtttgccagcaacaaatgttcccggctaagggaggctacaaaacttttgtccttttccagtcccatctctcgggccttccgggtgacgctgcgttcggaaacaccgagcatttcagccagctcccggttgagggtattgtgatagtggcgccgcatgatggaaagcatattaccgttccaaaagatacgggtggaatatcccttatgctcgacgagccgtcccagtgtccggtgcatgaaagtaccgtcagcaaccttccggtgcttgcggtactgttcacgcttgtacgccagcacacattcatgacaccaggaactccgtcccccattcttcaacggatagaactcacgcatccacaactttcggccgcaatgcggacagacacgtttacgtttctgcttgttgttattttcactcatagctgtttatgctacattcatcagttcatattcaaattttcaccgaacggaatagtattaatgtcagtctttctcgtgtaggcctgcatgagtgccatggaaagcagcatataaacacggctgtcggccttgacagtccccgaaatggcgccgacaacatactcacccttgccggtgatgatcgagccggctatctgctcaagcccgtccggatggtcctcactggccgcaacgctcataaaggcactaagattattttccttacaaaagttatccacgtattggcagagttcctttactgcctctttctgtttttctgtaatcatttcagttaaattttaatggttaataattatatgttgaaatagcgaaatctctttttgagcactgctcgaacatcgtctcctcccagtccggctcgttctcctccggcaggtcgttctccccgagttctatttcttttcggtaaatgaggtaccgtgcctccagaaagaagaggaccacgcggcgcaggaactcacgggcggaggagatgccatgcctctccatgaaggcggcgatacgctccgggccgatggtgttcgtgcggatactcaccagacactgccggcggaagtccttcagcgtgctgccctttatcccgagcacgctgtcagcgatacgaccgaggttctccgggatatggtaaccggaaccgtcatcatccgtccccaccagcagttcggcggcggccgtcagcataccctccacgctcatgcgctgggcggcggccgtcttcttcaggaacacgtactggtagttgctcacgtaggtatgtatgaggtagccttccgggcggcggaacacctcttcggaggcaagctccatcgaaaggttgttcaacgtcacaccggcaccgcaacagaaggcgcacaccaggcggacggcaagacgctggcggttgccccaaccgccggcgatgatggcacgctgcaggctgccggcaacggccggatccatctcgaagaacagcaccgacttctcctgacggcggaagaagaacgacatgtccggaatacggtccatgcagaggaggatgcgccgggtggccgtggagaccctgccaccatccgtcatgcggatgtaggacttcaccaggtggttcatcactaccgtcatgtcggaaaaatgatagtcggcaaccttcccgcggaacagttcatgaagcagaacgggcagcttcacaacgtagttgtaatactcctttctcatggctcacttgcttgaaggtttccagtccactgttataatcgcatccagctcaccgctgccgccacacaccgggcaggacacatgcacgtcctcgcggctgccctcttccgttccccagaaccagccgttgcccttgcagtaaccacacttgtggccggtactgacgaagttctcacggttaggccccttacacatataggcgggaggacaaatctccagctgtttctttatcccgctcatgcctggcctcctttctgtttcggtcccgccacattccaatagtcataggcgcccttctcccagattgtgtattcaccagtggccccctgataacgtcccttactgaaggcgacgtagccctctacccatatcttcaggtcggcatcatacatcacgctcgtggccgcatcacctttaggattcttgccgcgggcatggctgatgaaaacaaacagcttgtccggaaactcctccttcagctggatatagtcacgatacgtcatctgtgtgtattggaagctgtcaatgatcacgatgttgaaactcttatgacgccggagcctgatcttcaaggtggggatgtcctccttgatgaacgccaaatggcggcttacctcggccataccaaagcgccgcaggttattttggactgtcagagaagttccttcctccagggagttgaacgccacacggtcatacttgcaaagttccttgcagagctgcatcacgaaagaggtcttgccgttaccactgttgccccacacgaaccagcagccccggacttccggagtgtcgaaggcatccttccatttcccctcaaaagggaatacgtcatacttcttgttcagaatgtccctgacattcaaggcacgtctcatgcccgcttttttattatcctttttctcttcttccatggtcagaacagttttagttgtcggatattgtctatttgatcaagcacggcctgccgtgcggcaccccgcagtttctcgtggcagagcatcctgccgagtgcccacagaagggcattctcacgggtggagaactgtccccatttacgtcccgggttgaaaccgccaccggaaccgcccacctccatgtgaacgccggcaacccaccagccgtcctgctgtcccacaagggcgtccaggtagtcgcgaccattccggtaaacggtcaccgtctcgtattccctcaagactgggtaatcgctccagggagcgggaagctgctcgcgaccgtcgatctttaagtattcaaatttgttttccatatccttaaaattacgtttgaacggtatttgaacgggagtcattcccccgtcatgcgtttcaccttgtgaatggacttcctcacacgccgcaaatcaaagtcacatgtcgaagcctcctttatcaccttatcgatgtctttcttgtcagtcacaccgttggcggaacagatcgcgaacacgtcgttcacgtctgtaggctccagctcataaaatttccgtccgatacggctgtagaactccttgtagccgggcttctggtatcgcagaccattgctgatgcgtttggcaatataatcggtactcaaaaacacgacgccgcatttctcctccagcttgttgtacaggctgatgaagtagtggaacaccggttcggtcagcttgtccgcctcgtcgaacaccagcaggggcgcgtccatctggataatgtcatccaatataagcccccacacctcacggatattatacccttcggtccggattccgaccgtacgggcgatctcgcggacaaagtcacctttcttcatgtcctcagagcagaggatatagaaaacctccttatgctcctggaggtaaacacgggcggtggtactcttgccacaaccggcctcgccggtcacccaggtaacattgcgccagcgttgcgcgtcagagagtacagccgtgatctcctggtaagcacccgtctccacgatctgccagccggtagcgcttacaccaccgacctgcgaggcgacattacggaacatctcgtcgctgatattctcataacggccgttcaggatattgctcacagtacccacactgactcccttcagactacccgcggccttcgtctggctcggatacttcgccacgtaagcccggaggctctcactgatggcgttcttctctttcattgtaatttccataatcaatattttttatcttgttataaatctgttccttataatttcccgaccaccttgcggatgctcacttccttcttctcaaagctgtcccatgtcacgttgctgatgactttcatgtcacggcctatggaaggacggggcggctggctgtattttctcgtgcggcggtcaatctggcgttgcgcctcctttccgagacctttcaggtcaggagtacgcaaaccgttctgttccggtgcgacaccatgctcatactcgatatctttggcgacgacctgacggtttatacgctcattgacgacggcctcctgctgggtgcggatgaaacgtttttcggcttccgtctgctcctgctgggcacggtggatcatcagcgggaacgaggccacacactcgaaacgcatcgcaccgcccttgtccttgtaaagcaaccgtacgctgctcatgtcatagggatcgtactggacatagaacttcttgtaggtattacgccggcgccattccaggtcaggctcaccgggagcggagaaaacctcgtaagggtatttctttccctgtaccgtgatctcgataccgctggcggtgaacagcgacggtttatcggttgtgtaccagaacatctccaccatatcaggaacgctgaccggatcggtgccctcgttcacgctggtattgtacatctcaatacgggggatgccagtggccgggtgcttcattgagttccactgctcacgggcggcggcatactgttccttcagttcctccaatgtgggaagggagtcgatgttcgcgttgatgaattccagattcggacggcttgtttctctctttgccgtaatattctgcccggtgaaaccgaaacgtttcttcaatacctggctctggaagcggtagaaaatgttctcaatcgtcttagattcgccattatacggagctgtcgggcggtggatacggctgatcttcgagaaaagacccagcgccgcgttcttcttatgaccgccctggttgtcgcacacgatctcgtagggtttgtgccggctcgtttggatagccatgcggaaagcatggtactgggcgatatagtcctcattatcgctgatgtaatagccaagaagcacttcgctgtaagcgtccaccacctcgtacacgcttgtagtgcacttgttcccgttctcatcacgatagtagaggttcagcttcgtgccgtcgccataccagaggctgtcacggcggcccggaaggatggtgcggtgtttgcggtcataacgctggtgcgccttcatttccccataaacggcatcgtaccacagaggttcgacacgcgggctgctgaaccattcgcggaggctgcggggactcttcaggggcttccagccacgttccggagcgacacggttgtactcctcgaagatctccatatcagtataaaccggaacacggctgcgtttcaatgcaacaaggtaacgcccgccgtcctcctcgatcttcagcgtgttgctgttgccgtacttgccgctcacaagcacaccgtagttgtcgggacggaacttgcttatcagggctttcaaccggcccacactgcccgggaggctgtgcccgtacaccggacgccactcctcactcgtgacaagcagaagctcccaaaggttacggcggaaaccggtcagcttgttattggatgaactcaagcgtttgaactcttccatcagcgcgttcagcaccgaagcgttccaggtgtattccttcttcacatcctcgggaagggcgaccagctcaccgttcttgtcgtaacggtactcctcaaaaaagcgctcggccttctcgtctttcttcactatgttacggatcatttcttctcgcatctgtttctcgggctcgccatggcgctcaacccaacgtttcttgtatttctcgggaagggaagaataggaatacagggctacattgccctcgccaccgccacggttgatactttcgatgttaccgcgacggacattttggtataaagttatatacttcatcaccggattatctcctgaagtaagctcttcacaggttacacacagtatattattatagtattccattttccgttctgttatcagtcctccaaatcattcaaagggacatgcctcttcaacagccgtactgaagccccaaagttcagtacaacaaaaagcgcccaaagcaaattgtcttcactcacagaaaatatcagacagaaattcagacagaagtaaagtacacaaaggcgctgcttccagttcaagtgtataaaccagcgcagctggtcaccgaacaatgccatcaactcacttttcatcgctttccttcttttcagggttaccacctaccttggttccaccgcgctcgatggcgagcttgcggatggaacgggccaacttgctgttcttgcggaatgcaagggagtgggagaccatttcccgggaacaacccagcaaaccggctattttacccacctcactgtattctaccactattcgttctttcataattcgctgataagttaaattattgtagcgggcagtcgcggactcgaaccacggaccatggcctctcccttgcgggagtttggcgtgttctaccaactgaactaactgccccggaaatctatcggagttcttgtatggcatcctccggaacacatatcacagtccaaacctggccatctttcatataatcgacattatattcacgaccgaaagtacaaatgttatagtcccagtcgcggattacaccatcaatgacttcaccgttcctcttggtgattctcacactttgtccctttttaaattttgcttccattatatcttcgttttaagtatatcaatatcaattacatccaacacgttagatgttcttaggctattcacgataagggtggctaatactatactgttttctgccatccacctctttgcttgcctgacagccacttccttgctgtacccatccggaataaaagcccccaggtcattataactccgatctgtcaattcaaaataataccgtttcataaccttctatttttcttctttttatatttctcattgtcacctcaagccttttttgtagctttggggcggtgttcacactttgaacacgtggcaaatataaatcatctttcgcaaattgcaaaacaatctgcgaaataatttcgcaaaatataaaacaatgaataaaaaagaaagattagaggctattataaagcattacagtgacggaaagccttctgtttttgcaaagttaataggggttgctccctcaactataagctcgtggctgtcgcgagacacacttgactacgatcttctttttgcaaaatgcgaaaatctgtcctcagaatggcttttgactggtaggggagagatgattaacatacaaactgccacttttaataatacaactaccctgccacaaaaagaaagtacgggaatagaagacaaattactagcaattatagcagataaagatgccactatccgagagatggcagaggaaataggtgcacttaagcaaacaatcgtgcaacttaaacaggacaatttggggcgtgtttcaggtgcggagagttcaacacttgcaggcgccgggtaaaatgcgttatatggggtgaaaggggtaaaaagcaacaaaacactgatttttagagatatgaattaaaatataggggagtaaataaatattatcaatgtattatttaccccctcaaatagtttaaaaacaagcaaaaacaagtcctatctatattatatagatagacaaatcgctaaaaaataatccgaaaatgtaaacccaagtgtaaaccctattaaaacgtttcgtttttgtaatggagaaaatgtaaacccaagttgtaaacccaagtgtaaaccctttcaatttttccgactgttcaaaccgttcaaagtaagtagcagcctcccattgatgtactattaccgacacgaatacaaaaaaagccgcaaaaagcggctttatagacgttctaaggctgtttcagccctttctggtgcatgttatcaagcgagactgaataatcattgcacgtttcgtgtatttggcaatgtcatcaaccagtccagcatgtaaaagactattcttggtgatcccgacctgttgctccgttagagtttcaaaaatggccgatatactaccaaaatagatgttctttttctcaaaaatcaaatgtacatggataactttactcataatatacggtatttatttcattgcaaatataccaaatatcatctatatggaataatttagataaaataaaaaagggaagtgcgtcaggcactcccccactccacttgcataaaccgatccgtttgactatctttgtatatgagagcgatctggaaaggttcatggagaataaccgatgaacaaacccgaaatctcccctatcccaccttcaatgtaaagcatttcatttgaacggcgttcaaacgaggctaaaatgtaagcccaatgtaaagcgatgtaaacgtttcgtttttccaagtcactctcccctacttcatcataacgctttgacagccaaagcaatcagtcattttcaggccgaccacatattgacacgtttcgtttttccccccttaaaacccttatcatgttttatccaagcggcaaccgccatcgccaccggaacaccgacagcaacatagggctccgaacgtgaaattatcttattatagttacggacaaacttgccatcccaactgttaacccggtgcaaagtgttaatatcccaattctgtgccgaaagaccggatacaacaaggcagataaaatatacaaaaaaaatagcctttttcataagtcctttatattagtttgacgcaaagataggacaaatagatagagttttcacaaaaaaattctatctttgttgccacatttataataattcgctaatcatttcatgagactggaaacttgctgcaaccgacagattgattgtatggtatgtccccaaaaatcagaaggagtattggtttaccgccactaccccaagggacaacatttctctgctgaaaagtgcacacagaactgcatgatatttatgctgaaaggtgaattacttgtaaacagtgacgaatatccgggcaccactctccaaagccgccagctcatcttgcaagccatcggctccaaagtagaactcctggctttgaccgaagtggaatatattgtgtattggttcaccgagcttcctctgatttgcgaagagcgctacaaggagatactgaaacgctcggaagcccccttgacttataccccgcttaccgcgatttccatgctcgaagggctcctgaaaagccttgcctgctacctcaacgagcaaccctatgcgtgcagcaaatacattgaaatgaaatgccaggaattggtatacatattgacatgctactatccgctacaccaaatcagtacattcttctaccccatcagcacttatacggaaagcttccaatatttcgtcatgcagaactacgacaaggtgaagaatgtggaagagtttgcccacctcggtggatataccaccaccacattccgccgtctgtttaaaaatatgtatggggtcccggtctatgaatggattctggacaagaaacgtgaaggaattctgaacgacctgcaatacaccaaacaacgcatttcagtcatcagcgcccgctatggctttgattccctatcccactttgcccacttctgcaaagactctttcggagacacgccccgcgccctgagaaaacgttcagcaaacggagaaaagatttccattatctgcaaagagcaaggcaaagaccaggaggacgagtaaaccttttacttgtccgtaaacttcgcattctgccggattacggaattatttctttaatcgcttgctttatcgctggatttctcctatttttgcgaaacatttacagaagtatcctgatagaacaaattttcaaactattaaataacttaaattcaatcatttatgtggttaagtaattcatctgtaggaaggaaagtggtgatgagcgttaccggtatcgcccttgtcctgtttctgacatttcacatggcgatgaacctggttgcattagtctcggctaatggctacaacatggtttgtgagttcctgggagcaaactggtacgcattggtggctacggtaggtctggctgccttattcatcatccacatcatctacgctttctggctgactatgcagaaccgtaaggcacgtggtagcgaacgctatgccgttacggaaaagcccaagactgtggaatgggcttctcaaaacatgctcgtactgggtatcatcgtaatcgtgggtttgggcctgcacctggtaaacttctgggctaaaatgcagcttcccgagttgatgcacaacatgggcatgcatgctgacaccctcacgctggcatatgcagccaacggtgtctatcacattcagaacaccttcagcaatccggtattcgtagtgctttaccttgtttggctgggcgcattgtggttccacctcactcacggtttctggagctccatgcagtctttgggctggaacaacaaagtatggattaaccgttggaaatgtatctccaacatctattctactatcgttgtcctctgcttcgctctggtagttgtcgtattctttgcaaaatcattgtgcggcgcttgctaaattcaaattgtaaatgactaaattgtaaattgcattatgactaagatagattctaaaataccggaaggaccggtggctgagaaatggaccaattataaggctcaccaaaaattagtaaaccctgccaacaaacgtcgtctggacatcatcgtagtaggaaccggacttgccggtgccagtgctgccgcctctctgggcgaaatgggtttcagagtattcaacttctgcatccaggactctccgcgccgtgcacactccatcgctgcacaaggtggtatcaatgctgctaagaattaccaaaacgacggtgactctgtataccgtctgttctacgatacagtaaagggtggcgactaccgtgcccgcgaagctaacgtttaccgtctggctgaagtatccaacaatattatcgaccaatgcgttgcacaaggtgttcctttcgcccgcgaatacggcggtacactggacaaccgttctttcggtggtgctcaggtatcccgtactttctatgccaagggtcagaccggacaacagctgttgctgggtgcatactctgcattgagccgccaggtgaacgtaggcactgtgaaactgtatacccgctacgaaatggaagacgttgtcctcattgacggacgtgcccgcggtatcattgcaaagaacctcgttaccggtaaattggaacgttttgccgcccacgctgtggtaatcgctaccggtggttacggcaatgcctacttcctttctaccaatgcaatggcatgtaactgctctgcagcaatggcttgctaccgtaaaggtgcctggtttgccaaccctgcttacgtacagattcaccccacttgtatcccggttcacggtgacaagcagtctaagctgactttgatgtccgaatctctgcgtaacgatggtcgtatctgggttccgaagaagctggaagatgccaagaaactgcaggaaggtacactgcaaggaaaagatattcccgaggaagaccgcgactactacctggaacgccgttatccggcattcggtaacctcgttccgcgtgacgttgccagccgcgctgccaaagaacgctgcgacaagggcttcggcgtgaacaacaccggtcttgccgtattccttgacttctccgaagctatcaaccgtctgggtaaagatgtcgttgcacaacgttacggcaacctcttcgatatgtatgaagaaatcactgatgtcagcccatacgaaaacccgatgatgatttatccggctatccactataccatgggtggtatctgggttgactacgaactgatgacctccatcaagggactgttcgccatcggtgaatgtaacttctccgaccacggtgcaaaccgcctcggtgcttccgccctgatgcaaggtctggccgatggttacttcgtattgccttacactatccagaactatctggccgaccagattacagttccccgtttctctaccgacctgcccgaatttgcagctgcagaaaaggccgttcaggagaagattgactggatgatgaacatcaagggtaagaagtctgtagactctatccacaaggaactgggccacattatgtgggaatatgtaggtatgggacgtacggccgaaggcttgaaggaaggtctgaagaagctgaaagaagtccgcaaggagttcgagaaagaactgttcatcccgggcgacaaggaaggtatgaatgtagaactcgacaaggctatccgtctgtacgacttcatcactatgggcgagctggttgcttacgatgcactgaaccgtaacgaaagctgcggcggtcacttccgtgaagaatatcagactgaagaaggcgaagccaagcgtgacgatgaaaactacttctacgtggcttgctgggaatatcagggttctgacgaaaaggaaccggtattgctgaaagagccgctggtttacgaagcaatcaaggtacagactcgtaactacaagagctaatcgggaagttgaacatttaaagaattaaagaaaatggataaaaatatatcatttacgctcaaggtatggcgccagaagggtccgaaagcaaaaggcgcttttgaaacataccaaatgaaagatatcccgggcgatacttcattcctcgaaatgctggatatcttgaacgaacagctgatttctgaaggtaaagaaccggttgtattcgaccacgactgccgcgaaggtatctgcggtatgtgttcgctctacatcaacggacatccccacggtcctgcaaccggcgctacgacttgccagatttatatgcgtcgtttcaacgacggcgataccatcactgttgaaccgtggcgctctgccggtttcccggttatcaaggacttgatggtcgaccgtacggcctacgacaagattatgcaggcaggcggctacgtcagcgtacgtaccggtgctccccaggatgccaacgctatcctgattccgaagcccatcgctgacgaggctatggatgctgccagctgtatcggttgtggtgcttgtgtggctgcttgtaagaacggttctgctatgctgttcgtttctgccaaggtgagccagctgaacctgttgccccaaggcaaaccggaagcattgcgccgtgccaaggctatgttgagcaagatggacgaactcggtttcggtaactgtacaaacactcgtgcgtgcgaagctgaatgcccgaagaatgtttccatcagcaacattgctcgcctgaaccgcgactttatcattgcgaaactgaaagactaatccggtctttctgcaaataatataggatgcgcttcggataaaccttttgagcaagctcagatttatcactcagctttcactatatttgattaatatcacaagagactcctctgtcgggaaaccgccggaggagtttttttatgacatgccgtttacttcagataaattgccggcacgcaagctacggggagaagccccgaaattctttttgcagaaattggaaaaatgaggcagcgattcaaagccatatttatagcaaatctctgatatagaagcatccgtataacgaagttcataaaccacgctttccttcctccgttccatcatccactcgtacaccggttgatgaaaaacagaattgaatatacgccggaaagtagctactgtatatcctcccaactgggcaagttcctctaccgtcttgactttggcatgattctgcaagacaaagtagtggaaggaattagtatactgggcaagagaatgtatcagcatggaaagctcatagtcggagtagtaatttccaagaatgaaagcaagttctttccgtttgaaacaaagcatttcccggcaaatcttctcctcggacaaataggccttggaactttccagaaagagctgcaactcgggagtaatggtcaaaggatagaatatcaatggaggggtaacctctttcataatatggttataccggtcctcacagaagaattcaggcttactgaaccggtaacaaacgcattccacatccgtcatggcaagtatttcgtacttggaaccaatagcttgaaggatgaactcacctgcatgcaacacagttcccgcatactccttactgttgacaagcacttctcctttcagcaggaaaattataatattttcctcacactttcgcgccggcagatggaatcctctgaggtgggaagcatatattattgcattgtccacagccttgggacattgagcgcattgttttttacctctgcaagcagaagagttgggcatcggcaagtagatttgtttgttgcagtgacaaaaatagataaataatactcataaaagaaacattccccgaaaactttcataaagaagtttcggggaatgaataaaatagaagtaattcagttttttattgcggacagtgccgttttatttttccacgttcgtatcatcagccgtactccatggaccaacttcaggtacaaaggttacttttgccgccttattggccagcgtcagcgtataacgtatctttttgccttcaccccaggcttgtgtatcattcaagtcaatggcggaagttacagtatcaagaagaacgtctttctcatagatgtcatagacaacattgattttggcattcgtatccaacgtctggggcatcaacatccaggctgtattcacttccacacccgttgtattcacttccaatgcaccatcgtcaatcgtatgtgcataagtggctgttccttcctgtgacttccatattgaatcatcaaaaccataagttcctttattgtgcacaccggatattgtaagtgttttcagtttataagtcaaagcgtcggctgccttgacagtgaaatttatttgggtcagtatatggccgaatttcaaagataccccactggcatttgatgccttggttgcatccgtcgctttcgcggctaccaagtccgtttgggcagctacatccgctaccgtataagtaatggaaggatatatagcaccagcagccggttgattgtacgtcaaggccccggtacccggattcccgtaagcaaagaactgcaagttatccgtcattggccaataatatgttcccccagtcaaactccagtcgggagcactataagttaccttaacagctgccatgaattccttcatcgcatcaaaagtcgcaacggaggccattgttgttgctcccgtattataagcatacacagtgaaccctaccttctgcaattccggcaaatcagtcactgtggctctcgtagtgttacccactactgttcccaatttaatctccgccttttgtccggcattctctatctcctcactttccgagcaactcattactgctgctgcagccaaagccaaaaataaaaccttcttcataattgtctgttattaaagttaatatatatctttggaagaatcgcataacccattaaaaataaaaagtttatgcgatatgtttgagaacgaggtaatgagttggcaacagttctgatttctacatacttacaacatttgcattgaagtacaactcatcgtattgcaaaggtataacttttttatgaatgggcaaaaaggtgatgaagatttcattgtataggtgtgattatttgaatttggtctatcatcaatctgtgatattatgagtttctcgattccgccattcacccatttccgttgctcgtctgcaaaggaagtacagacttcattgaaagttgaaaggtcgggcggcaagccgtttcgggctgaatcttcctccgccagagagtattcaccccgaaaacctttcccctttcaagcctgtacttaaaaccgcagacggcaacggaaatgagcgactgacgaaaatgtagataaacaaacagacagcatacaaaagggttcttacattgataacccatttgtatgctgttcttgtatctatccgtaggggcactattattttgcatcagatgaatatatgggcaagcggtaaatttcgctccctccaaaaatataggagaggtttatccgctgttattcatcaggtgcgttccgttgtactcccgtttcaaggcttgctcaatttcactacgcttatacagaactttgccaccaagcacatagtacggtaatgttccgttactacgatactcgctcaatgttcttcggctgactttaagcatatatgccacctccttgtcgcacatatattcatcgtcattagagagcgttgccccatcttttggaatgctgtcaatgatttccgacagttggtcgatactctcgtgaatggactgcatccacgcatcgtctttggttctcatctcttggtacatagtttttggggtttaatgttatactttggttaaatctctctgcctcgccatttggcttctttgcgtctgtcctccacctttgttacgatgctatccacatcttcgggcagatagtaggtgcggttgccgattttggtgtaggcaagagttccgttatctcgcaaggtctgtaatgtacgcttgctgattttcaacttctgacaaacatcctgatggtcgagccaattgtttgtctttttcttaccacccttgacaacgggtgagtttgatactcgcagaatgaactgctcaatcttcgtggcaaactcctcgaatgccttacgctcaaaaatgattaaatccatacgctttcgttttatttgtttttaatattctcaaccttttgttccgctaagatatagtcgccataagcacctacccaagcgttttgaagatgtggcagtatgtggcgttcatttggcactctctggcgtcattctccactccgcccacatcggtaatttgtgccattcccattagccgttgccatatcttcactgcaaataaaagcagtaaaaagcatactgcaatgggggtgtctatacgtgtcataggctgacatatcattgcatatttggtgttatatgtagcaccactaaatcctattatatccttcatcattgttgtttctcttttcatcgtcatttcgttttcttggtgcaaagtaatagatatgtaatcacacctcaatcatcttgtgagcctgttgcagtatatggcacaggtcgtggcacttttagctgtatatgatgatacctttctaagcacacatcacattgtaatccatattatataggaatatacaaagcgaccgcccgtttcggatcttgtccgtagcattgccgtttgtcagaccgatgcttatccgtctgccaaacttttgcacgaacagccgacacaggcggtcgtttatctatgaaagcagaatggcagatagaccgaccgccgatgcttcggaagcccgtctatctaccattgaatttaagggtttaattcctccatttaaggttttcgctattactcgctcattatcgttcaacttgggaagaatcgtgaagtcggaacgcatctccaatcagcctgaaaagcaatacaattcataattgcctacatagacctaattagttgtgatagaatagtatgcatattttctttgcagcagataatcggtcaagattgtgcacaaagaccatatgtttaactttcaaaaatttcacaacgatggagaaaaaacaatttgagttgacgcaagagcaacatcaggaaatcattgaaaaaaatgactacaaggtcattttatggtggtgatgcagacaagcatcaaaaagaagtagaatcagacgctatggcatccgatgggttattcaccaatgagattatgcccgagcctattccgcagatggcggaacaagtccaaacggacgcagaaacttccgttgcagaggaacagccaccagcccctaccattcaacgaagagtgagcagcaagcaacgcaaactctcattagaggagtaccgcaacacttttatgcgaccttacaggattgaagaccgtaagcccgtattcattagcggcaaattacgcaagatgctcgataagttcgcttgcaaaatcggtgaggatagaatgagtatgtcgggattgttggagaatatcgttcgccaccacatagagctatatgccgatgacttcgagcattggaaagggatgtaatgccgtaatgccaccccactgcacagcggcagtttggactgccaaatgactatgaacactatcgaaaaccgtcaatgacggtggaagcaacaagacctcggtcttggggtgtagcgaggttatctttcgggatgccgaaaaatgtcggacgagccgccatcgcacccgaaaaacctcgctccacctccaaagtggaggcaatccgctcccgatggtcgcagattgtgaaaagccgaattgaaaaatcaataatcaagtaaaatatatgacgatgaataataaaaagataaagaaacccaagcccagaggcagaccacaggtaagcaccttgaaacgccttacaaaatcggtaacggtgaagttctcaaagcccgactatgagaaactacgccatcgaagcaagaatgccaatcgtacacttgccgagtacattcgatatgcagcctttgatgcccgaatcgtagccaaacattccactgaggatgcagccataatccgaaaccttacgggtatggcaaacaatctcaatcagctaacaaagctgtcgcatcagactggattctatcgaacaaagaacgtagtgatggaactgcttgccaagttgaaggaggtattaagcgattacaaaaccgaagaaaggaggtacagatgatagggaaaatcaagaagggaaaatcatttggcggatgcatacgctatgtgatgggtaaagacaatgccgaaatcatcgcatcggacggtgtactgctcggaagcaacagagaaatgattgatagttttaactgtcagtgtctcttaaatccgaaaattaagcaaccgttaggacacattgcactcagctttaagcctgaagatgcaccacgattaagcgatgagtttatggctaaaattgctctagaatacatggacttgatgggcattaagaacactcaattcatcttggtaaggcatcataacaccgacaatccgcattgtcatttggtatataatcgtatcaactacgatggcaaagtaatctcctcgcagaacgattttaagcgtaatgagattgctacgaagaggctgaaagataaatacggattgacctacgcagaggataagagcaagaccaatgtgaagaaactccacgaaccagagcgagtgaagtatgagattcataatgctgttaaggctgcattgaaacggagtcggacttggtgggacttaggtagccaactgcaaaagcaaggcataggtatgaccttcaagattaaccgcagaacgggtaaaaatgagggattgagtttcaccaaagatgactacactttcaaggcttccgatgtgagcagaaagttcagctattcaaaacttaataaacaattaagttgggatatgccgaaaatgcagaccgagattgagcctaaacagcaaccaataaggcaagaagtaggacataattacagtgttacggataaccttattgagagcaacggattgggcttattcagtccatcggatgcaccaccagaggatgagcaaccaccttcttggcagaaacaaaagaagaaggagcgaaaaaagaatcgaggaataagattctaagcaaacaaatttttcacacttaaaacaaattgatatgagtaataaaaactttaaccacaacgaccacgagtcgtttatggaaggcatctacggatgcttggagagaatcgaaataggtataatcgaattgcagaaggctaaaacaagtgctgctaatcccattgttcgcaatgaggataacactgcattagtacaggaaattaagactgccgttgatagttgtaacaaagaacgtcttgaagaaacgaatgcaaaattgacaaagttcatcaaagcaatattcaacgattatgcgagaatcttcaatcaaatggatgttctgattaaaaaagaacatcccgactttgagggcgtaaaacaacaacttgcagaggctatcgacaagatggatgagataaaggtaaagcacaacattgacgagaaacgacactcgtttgccctttatacaaaagagtcttggattcttctgtctatgattattatccttatggcagctggagcatcggcaatataccatttgtcaagaccgaatgttcagagggatgatgattctctcaaataccgctacatcaagatgaaaggagatgcttcggctgaacagatagccacattggaggacatttttgaactcaaccgagacaaccaaaagattgagcagatacgtgaagatgtggaaacctacgaagaggctgttcgcaaacaagccgccctcaccgagcaagcacgacttaaagagcaggctgctaaggagcaagaatccaaagccaagtctatcaagaacaagcaggacgatagtaaggttaatctgaataacaaatcaaaacactgattgtgatatggcaacagtaaagattaagttccgaccatcaacggttgatggcggacaaggtacaattttctatcaagtaatccataatcgtgtagcccgtcagcaaaagacgggctaccgtctctacggctatgagtggaacagccacttgtcggaggtggtattaccacgattcaacgatgataggaagcgttatctgtcggaaataagcgataaaatccgaatggatgtaaaggctcttcaaaagattatttcaggatttgagcatagcggatgtgactataccgctgatgatataatagccgagtttatagcggacaatcctgagaattatctcttctcattcatggagggtgtaatcgccaatctgaaaacattgggtaagatacgtacatcggaaacatatgctgctacgctcagcagtttcagacgctttcgggaggataaggatttggcattggacgatatggattccgatatgatgatggcatacgaagcctacttgaagcgtagcggagtaagccccaacagttcatcattctatatgcgtaatcttcgggctgtatataatcgggctgttgaaaaggaattgactacccagcgatacccgttcaagcacgtctatacaggtgtggataaaaccgtaaagcgagccgttccactcaaagcagtcaagcgtattaaggaattggacttgtcgatgaatcccactcttgattttgccagagatatgtttatgttgagtttttacactcgtggtatgtcattcgtagatatggcttacctacgaaaaaaggatttgaacggcaatattctatcgtaccgcagacgcaagacagggcaacagctattcatcaaatgggagaagtgtatgcaggagattgtggagaagtatgataatccgctgtcgcaatatctattacccatcatcaagccgttcagtgaaatagatgaacgcaagcaatacatctatacggcacacaatatcaaccgcagcctgaaagtcatcggtaaccagttgggattgtccgttccgcttacgatgtatgtgagccgtcacgcttgggcaagcattgccaaaagcaagaatgttcctatttcagttatcagcgagggaatggggcacgattcagaagcgacaacacgcatctatcttgcatcattggacacaatggcaattgacaaggcgaacagtatgattctgaaatctctgtaagtgaaggattgttgagcgaattgtaaagtctctttggaagagaagttattaccgttgcaaaattacacatttttcggcaaatggcaccaatttacactaaaaaatgttacgcaaaattctgattttgttcgggcaaaaagcggattgttgagcgaataagttatccccattctgctaaacagctaattttcaacagatatatgctgcataaatcactcttccaaagagaagtgacctataattttgatttatgtgcattaagaaatattgtataacactgattctcttgctgtttggtgtgggtattgcgcattcgcaagagagccgcacggaaatatgtgtcgatttccgtgtgaacagtactgtcatagattctgcatactcggacaatgccgcccgtatgcaggaaatcatcgagttcctacggaatatccatcaggacagtacaatcaacatcgtggaaatatccttctgtggagcggcatcacccgaaggcagtgaccaactcaaccgcaagctggcacgaggtcgactctcggcacttgaaaagttcatccgcagtgaggtggatattcccgacagcctcataactcgtaatgacagctacattccgtgggattatctgaaatcacagatcgaggattcaggattgatacacaaggatgaagtaatcgccatcttggaggaggaatccctgttggtggattatcatcatccggatacccatattgacaaccgtatcgtaaaactgaagcggttggataacggcaaggtatggcaacagatgaacaagctcttcttcgagcgtatgcgaaatgccagtgccatattcgtaacatacaagcaggaacttccacccgttcaggagcctgtgattgtacccgataccattaagtttgaaccaattgttgaagtcgtggaaatcgtgcccgacactactgcaattgtagcccccgtagttcccgagatggaggaatgggcacgcaaactgcacgtcaagaccaatgccatcggcttgggaatgggcattgccaatgttgcagcagaaatagatttggcaaagcactggtcgttcacattgcccgtttattattcggcttgggactatttcaagaccaccataaagttcagaacatttagtgtgcaacccgaatttcgttattggctgtcggaaaacaacgatggcttctttgcaggagcacatttcgggctggcttattacaacttcgcctttgacggtgattaccgctatcaagaccacaaccgtgaaacaccgtccatcggtggtggtgtgagtgtcggttatcgcctgcctatcagcaggaacaaccgttggtgggtggagttttcactcggtgcgggtgtctattcccgtcattatgacaagttccacaacacaccgaatacaaaggacggtttgatgattgagagcatcaagaagacctattggggtatagaccaagcagcggtatcattctcatattcgtttgacttgaagaagaaaggaggcaagcgatgagaaagattctgtaccttattatatgtatgcctctgttgctgttctcagcctgtgatgttcacgaatggcctgaaacacctgagtttgtaaaaatgcatctttgcctcaattatgaaacggatatgaccaagtgggaacatctttacgatggaacatcggtcattgagcaaggcttgggtgatacatacgacaaccatcaggattacggtaagatacgctacatcgtccgcacctatcccgtatcggagaaacaacgcacgatgcaggactatgtacaggagttcgtattcacaaaggacattgccgaaggttacgaccacgaagtgacgcttgatgtactgccgggcaactacaatgtaatggtgtggtctgatttggtgaagacaagcggtgatacccatttccacaatgccgacaacttcgcagagattatgttgcagggcgaccacaagggaaataccaaccatcgtgacgctttcagaggtacgaacaatatttcactcgtagcagatattatggagcgtctgcctgatacgcttaatgtggcgatgcaacgacctcttgccaagttcgagttcgtgacgaatgatgttgaagagttcatcgacaaggaatcagtccgtgtcgcctccaaagccaacggcaacaagtcggcatcggcagatgacaccccgacaagagccgtaaatatagaggattacaaggtagtattctactatgtgggatttatgccacacgcatacagcatgtacaccgacaagcccgtggattcatctacgggagtgatgttcgagtcaaccttgaagaagctttccgactcggaagcctcaatgggttttgactatgtgtttgtgaacggtaagaaatcggcagtgacggtgcagataggcatttacgacaatgagggtacacaactctccttgaccgagccgatagaagtaccgttgaagcgaagccaccataccataatgacgggtatgttcctgatgtcggaagcatcgggaggtgtaaccatcaatcccgactttgacggagaccataacctgatttttccctaacagctaagaacaatgaagaatttactgcataacatacagatattgatgatgcttgccattatggtggttggcatacagtcctgttccgatgacttacatgatgtgggcgatgtggaagtaaactttaccgcaatgctaccgaccgacacccgtacacgctctttcggcaaagctgaacaggtgaatacccttgtggtgggtattttcaaaaagggtttttccgatgaacataccaacagcggaggaagttggagttattatgaaatagaccgcaagttttttcctataagtggtacttcaatagatgtaagcctctcattggctcagaatcagacatacagctttgtcttttgggcgtatgacagcagtcagaacatctacgacatagatgatctgaccgctatcaagatgaacactctgccaaatccgataacattctccgaggcagaagcatcggatgcattctttgcgaccgaagaagatattaccataacgggtagcaacagttaccccattgaacttgtccgcccgttggctcaaatcaatgtgggaactacgggaacaccgatgcaggcatcatttacagcaaagtcagctcctgacaccttccacccatttaccaatactgtaagcggaacagttgatttcacttggaatttcagcgacaccaccaccgaaacattctcggctgatggcacagcatataactacctcgctatgggctatctgtttgctccgacaacagcgatgcagattgcagcggaattgacattgaccgatggagaaaagagcaagacggtggagttcccaaaggttgagattgaggctaaccaacgaagcaacatagcaggaggatttacagcagaataagagaatttcaaaatatgtataaccctaataacgagttaaaaagccgaacaagagacagaaaaccaactaacagccacaaaaggtaaggagcagttccaagacctttcatcctgcaactcgcaggatacgacagattgatgataaatccccgttctgcataagtggaacagccctcgacaatggtttcggcaatccgagtgaatgcggaaaacattaaaaacaagaaattaaagtaaaactattttgtataacaattaaaattttcagaaatgaacaagaaattattcttaggtatgttcgcagcagccggtatgctgttcgcaacatcgtgttcaaatgacgaactggatgtagttcagtcaggaaatgaggctcaggtgacgttctcgcttgcagccgaaggtggtatcgctacccgtgccatcagtgacggtacaggtgcaaagaagttggtatatgcagtttataatgccagtggtgaactcattgaaacaattgcaaatacagatgtaaatggacagattgttgataatagtgcttttgacaatggtcttactgaaaatgtaaccattaccttagctaaaggtcagcaatatacagtagcattttgggctcagaatccaaactgtacagcttacacaacaacagacttgaaaaatgtaactattgattatgccggccttaataacgatgaaactcgtgatgcattcttcaaagccgaaacatttactgttacaggtaatactgaaattgatgttgtattgaaacgtccttttgctcagattaacgtaggtgtttaccagacagattgggatgcagctaaggcttcaggaattgagatagaaaaatcaaaggtaactattgaaaatgctgcaacatctatcaatttgcttacaggtgaagttggaggagaacaaactgtcgagtatggttttgatattattcctgcacagttcgcaactcctgaaacattggatgttgatttagataaggacggcacaaaggagaattatgtttacctctcaatgagttacatactggccaatgatgagactacaggttacgcaaagactgcgttggaagatttggatttcacttttgctcctataagtggtaataatatcaactttagcgaaggtcttaacgctgttcccgttcagcgtaactggcgtactaacattattggtaagattttgacaggtgatgttacattcaatatcacaatcgacccgatttatgatggtgaatacaataatggtgaagctcagcctgtaaatatcaatggcgtatattatgcaaccatccaagatgctgtcaataatgttaaagatggtgatgtaatcaaggtggcaaccggcaaatacaccgaagttgttaaagttgcgagtggcaaaaactttacccttgaagcagcaggtcctaatgttgttatcgctgctcttgatcaccaatcaaacggtactccttcaacagttaaggtgaaaggtattacttttgacaattcaatcactcttgcaggttggttcacaggaacagcaccaaatattgcaccttgtgttggtgcttggggcggtaatcttacattcgaagattgtacatttattgttgcaggaacttcaggtagggaaacaggtgtgatgacttggtggacaactaaaaataatgttatgtccctgtcgttcaataattgtacttttgaaggacagaatgaccacgcaaatgctcgtgctatgcaaatttatggttatgttgatatggaagttagcaattgcactttcaataccaataaagattatactttgaagtatgttgctaatgaaggaaatatagccacattctcaaataatattgtgaacaattctgagaactttgttgagttgggttcaagtgcttatcctggtagcaactatactgcaaacattatcaacaatactctcggaaacggtgtaaatactcatattattgctaacaacgagaatcaaaacgtaaatttaaacggtaatgtttcagtaatagcagagggagttgtcaaagatgccaatggcaattatattgcttcaagcaacgaaggtattacaaatgcaatttctgatggagctactacaataaatttgatacaaggtaactatgtaataccatcatcagcacaaggaaagactctgacaattataggtactggtactcctgaagatgtaaaagtcgctgtaactaaagttggttctggtggtgaaaattgtgactacggcttggatggttctacagtcactttcgaaagcattactataacaacaaacagctcaacttatattggctatgctcgttgcaacggtacttacaagaattgtgtaatcaatggtacatacacactttatggtgacagcaagtttgagagatgtacttttaatgtgtctggcgatgtttacaatatttggacttggggagcaaaaaatatggaatttgacagatgtacatttaactcagatggtaaagcactccttctttaccaagaaggaactaacactgtcaatttgactgtgaaaagttgcattttcaacgataatggaggtttgacaagcaagaaagccgctattgaaataggtgatgctccatatggcgcgacttcaacatacaatgtaacagtctctggaacaactgttaatggttatgagattaataacgagggtttcaatacaggaactactctttggggaaataaaaactcaatgccagcagaaagattgaatgtaacaattgatggtgtaaatgtttattaaagcaattattatgttctacaccctttattcggttgtagaactataatgaaactctatcatccctttgatagatatatatacataaaacattagctaagaagccttgccgttcgtgagaatagcaaggcttcgcctttgtagctgtaattcaacaactcattttgggagagatttgctgtcccataccttgcaatgatataagcagactaatcccattctcttttcgctggcataaacacttcaacactgtttgcctaaccttacttgcttcgtatgtattcagcctaaatgcaagtgcaacgaccacttcaagattataaaatgtagcccaacttgcaggagtggctaaatcgcatcgctgggtagttgcagggttaaatgttccactcttgtatatcgctctgatagcggctcgtagtgtcggggctatcaccccgaacaaatccaccaattccatttctgacatccatacattaccgcttgggatatttacgtttccgcttttgttgattgttatagttgacctttccatagttacattgctattgagatttcactaaacgattgattaagtctgttgccgaacattgtcaaatccttgtcgattttctcggtggtaatcttcgcatatcgctgtgtcgtggtaatgttcgtatgccccaatactcggcttacactctcaatgggaacgcccttactcagagccagcgtagcgaacccatggcgagtgcaatggaaggaaatatccttcgtaataccgcactcttttatcatctttttcagtggtttacagatgttccaatagttgagattgggaaatacaagtttgtcctcttggaatctctcatatcgcctgattatctgcaatggaatatccaacaacttcacttggaaattgacctttgttttgtgtcgcttcgataatatccatttctcaccatttacctctacaatatcatcagtggtcagttccttaatatccacaaatgataaggcggtaaaacttgcgaacacgaagaggtctcggatataagccaacctcttatccgcaaactcgtgtgtcatcacagccttgatttcatcttcggtaaggtattgcctctccttgatgttctgattaacccgatactgagcaaatggatttctcggtgtcagtccgttatagtgagcctttgatacgattgtcttcaaccacatacaatgcgaccacacactgccattgtgcagccctgcatcggtagagagatagatttcgtactccttgataaagtcgggagtaagttcaagcatagcaatatcactacgcttgtagcacttcttgatgaacgctgccaaatggtttcttgaccttacacgcaccttgtaagaactcgctacacggtctatgcctatacgttttttgaagctctcgttgtctttatcaaatgctccgagcaatgtttcatactccgttcctatgccttgataggcattgcgtaccatttcggctgttacaaatgcctctctgtccgacaagcgttgatagtgcttgatgatttgagccttgatgttatccaaagccaaattgatgtcccgagcctctttgcttttgccctttgcccgattacctttggcatcccacatcgtttttgagatgctctgcttgcaactaaactgagccactgagccattgattgtcactcgtcccataatgggtacaataccgtttttctccttactgccattcacgtagaacagcaccttaaatgtacttcgcataatccaatcttttttggttacaaaattagttatcagcgagttgtacattgttatgcagaatgtggaagagagtagaaataaactccaacgacctataaacttacttcgttatcgggtaatgatttgaaaaccgtttgccctcattacctttcatttccttgcacttttgcatcggcgaggctttcatcataagtcctcataagtcattgaacaccagtgccgccatcattattttccctcattcgttcgatttttccagagataatatctttatttgtctgtttgctatcaattcaccggtagctccacatccgtctcatcatcccaatcgtccacatcgccaccaatccctccatctccttcatcggttctcggttccaaatcatccaccacaaccttgtcctccggtacgggaacctcgatatggatttccgacccaggaacgcccacatcaggttcttcttcgcctcctcccgagggaggagctgtttcaatcacttccgtgatatccaccttcacctcttgaaccgttttatctcgtttcacaatcttcagtgtcagcaacataggactatccgcacgggtcttggtatctttcagtaatacaaaactggagaaatgcccccataaaagcccgttttcacgctttgtatccacacatataggtacctcgctcaaatggcaagcacggttgcctataaagtaacttccgttcaagccgtccacatggcagatgatgctcgatattctatcccatccttccacctttatatcaaaggaataatggtccactaccgcttccggcttccagtccaacggaagcgccacatcactctgccttatttccacctcgtccaaagccaccacatacaaagggtcgggcgaccaaaccatatcttcgtgtacatccagccccgtacagtgtcccgtaaaagcctcaatcgtctcataactctcgtcgccccgtatctgtatactctccgtattgaagttataggccaccaccgcatacttccccggcggtaccttcacctcaccccctccggcaggcagataactttcaacctttctcccttgagtatctttcggatagaagataatccgcatggtctgcggcagcttatccgtcacccctttccaatccagtttaatctgtactccgctaacgggataatcatccagcatatcgcggaagtcacagcttcccagcattggcaacagcccgaagaacagccagagaatcatatgccgtgcatctttcataccactcatctccccgacgttagaagccacaccaaagaaatttttgcttttgtcggcccgataaagtgatactttccactgctgacccaaaccaagtcatttccataagaagtatatttcctgtactccgtatccaagtatccaatgcccacactgaattcaatcgccagatgccgagccagtggacgcacgtatccataagttattcctgcagctgcgtaatacttcccccggtatcccttctcctttttcaactgaaaatcataggtacctccttcggcatatgctcccaggaagtgtccggacaatcttccgcgcgtatggcggtttcccaaccagtaacgcgcctctgtccctcccgaaaggagctgatagcagaaattacatccgctgtcagaccaccaagggcatttgtactcaacattcaaagaccacctctttcccaatggcagctccacttctatgttcggagccaaggccaggtcgtaaagcaaattattttttaacgccagcaccgttttacaagtatggctatgggattctaccgacttattctgccctattacctgccccgacatcatgcaaaaaaggagtagccaaaagacatatataaaaatgcgttttcccataatttcgcgttgtatacaaacaaaagtagaagataattaccgaataaaaatcactttccatcactcttttcaaaggctgaaaggttctgtgaaacgattgaaacagatttgcaacttctgccttatccgggacgctgtgaatagattcttctctctcaaaaagtcaatccgtgtgcgaaaacagtaaaattcagtgaaagaaatacaaaagaagtagcaggaacattctgaaatttggaagataacaacgggaaccttacatttgtaatgtgatttttttcatagtattagatttaaggttaacaaaggttggagtacagcggtactcctttttttatgcccatacgtttctccgaatgacaaaaaatagctatcttcgatggcttttataactgttaaagaagaaaacatcactacttgagcccattatgaaaaaaccggtactcacattgctttccataatcctacttaccgcaggatgttcccaacggcctgccaccaccaagatacccctaaccagcgcacaccgtggtgcggccaccatcgctcccgaaaacacaatggcatccgtagattcgtgcatcaaatacggtgtaggcaatatagaatgcgatgtctgcatcagtaaggacagtgtcttctacgtactgcacgattccaccctcgaccgtaccaccaacggtaccggcgccatctcccaatggctgtccaccgacatcgacacactggatgccggctcttggtttgcgccccgatttgccggacaacgggtactacgccttaccgacctgctacgcaaggccaaagagcacggtttaagaatcaccatcgactaccgcaacggcggtctgcaccaattactgaacttgataaaggacgaaggcatgctggaaaactgcaacttcaccttcagcaaggagtatcatgccaaatgcttcagaaagatggcacccgaggtaagaaccctgcaagcctacatcaaaagtgaaaaggacatagagcatgtcgtaaaggaactgcatcccgacatcgctgtcgtctggattgactcccttaccccgcaattcgtaaagaaatgccgtgagcacaacctgcaggtactggcacttgtcctggggctggacgacaagacggaagagaaccagaaggcagtcgacctgggggtagacatcatagcgacagaccacccggaaaagttcatcatgaaatacgggaaaccgtccatataaggcaagagacctgccgcgctcaagtcagcaagtgatagacaccacccaccattgccttgaccactcccttcatctccaattcaaaaagcaaggcactcatccggttgacgggtatgtccgcttccaccaccatcgcattgatatggaggtctccctgccgcataagaatacgcacaacgagctcctcctcttccgtcagttccgggaagagattacgctggataccttctgtccgggcaggctgctccgctacggcccagcccataatctgcacaaactcttccgcactctggataagggcggccttgttgtcgcgtatcaaccggttgcaaccgatggaagattcgtccgtaacacgtcccggaacggcaaaacagtcacgatggtatccctccgccaactctgcagtgataagggaacctccctttgcggcagactccaccacaatggtagcatcactcatacccgccacaatacggttgcggctgacgaaattatgcttgtccggattcgtcccggtaaggaattcggtcagcagtccgccttgtgccagcatgtcgatggctgttttccggtggacatacggatagatgcggtccagtccgtgagcaaggacagcaacggtagggagatgatttgccaaagcggcccgatgggcatggatatctatcccgtaagccagtccgcttactaccagcacatcgggacaaagaacggccaaatcgcgcaggaagtcggcacagaattgcttgccgtaatcggtggcacggcgtgtacctaccatatcgatgacatgcaggcggttgaaatcggtgtttcctttaaagaaaagtacaatcggcgcatcctcacattcgcgcaagcgggaagggtaagcctcatccttcaacgtcaggcaggaaagacgattcttctctacaaactccatctcctgctcggcacgcagaaaggcagcgggacaatcaagagccgtcactacccccggattcacaccgggcatgatttcggggagctccttccgccgactgaatacttcggcagcactgcccataccctctattaaacgctttgccccgatatgtcctataccggggcaaagtgtgagagctatgctgcaaatccgttcgtcactgttcattccaccacagattacacagattcacacggattgagataaggggcaaagagacggtcgaacagttcgctatcgcttaaccgcccgttcaccacacatacggtttcaactatgcctttgagacagactttgccgtcggaagcacggaagatatcttggtaaaagacgtacttgataccctccttcttcatgtagagtttggagacaaactcgtcaccactcctcaggggagtcttgaaagccatattgatacgtgccactaccgggtctaccccctgctcgtgcagtccggcaaagctgacgccggcactcaacagaaactcatggcgcgtatgctccagataatgctgataattggcattattgacgatgccttgcaggtcgcattcatagtcgcgcaccttcatgggaagttcatagatataattcatatttactattggactatttactatttgatacttagccacgttgtttctccacatccaagcctttgaacttcttcagttcctctacgctgaccagcttgtagagtttgtcactgggacgtattttcaccgatttcatcgagaaatgctggcctttctttacagtctgcacgggtttcaaatcgacgcgtgcctcgtccaaagtgacgaattcggcacccgttgtgggacccgtaatcagcaacttgtcgcctacgctcacttcggctgcttctaccaggaactctgccacaccgatgtttgagaagtagcggatgcccttacccacatagattttacgttccgtagcggcagagccgtagttcttggtccattcgcccaagcgttgtcccaagtagtagccgtcccagaaaccacgattgaagaccgtcttcaaacgttcgtcccaccgggcaatcttctcatcggtgaatgtatcgtccagataggaacggatggcttctttgtaacactccactaccgtgcgcacgtactcgggtccgcgggcacgtccttctattttgaaaacacgaacacctgcatccagcatcttgttcatgaagtggatagtttttaagtctttgggggacatgatgtattggttgtccacctccaattccacatccgtctccttgtcgcgcaccgtataactacggcggcatacctgcatgcaggcaccgcggttggcggagtggttcatctcatgcaatgagagataacactttccgctgactgccatgcaaagcgcaccgtggcagaacatctctatacgtatctgctctccactgggaccgcagatattctcctcacggatatgtcggtagatttctgccacctgctccaaattcagctcacgcgccagcaccaccacatcggcaaactgcgcatagaagcgcagggcttccacattgctgatgttgagctgtgtgctgaggtgtacctcctgccctatctgccgggcatagctcatcactgccacatcagcggcaatgactgccgagatgcctgccgcctttgccgcatctacaatggtacgcatcagcggaatgtcatggtcgtatataatggtattgacggtgaggtagctcttcatgccatgctcgtcgcacgtccgggctatttcccgcaaatcgtcgatagtgaaggtatttgccgaacgggcacgcatgttcaggttctcgataccgaaatagatggagtcggcacctgcttgtatggctgctgcgagagattcgcgcgagcctaccggtgccatgatttcgaagtcactgattgagtgtttcatcatttctttttgaattagagtatgcaaaggtaggcttttttctgtacttttgcggacaaatccgcttagattatgaagattaaagatatagacctgggcccacgccccgtattcctcgccccgatggaggacgtcaccgaccctgctttccgcctgatgtgcaagcacttcggagcagacatggtatataccgagttcgtttctgccgatgccttgatacgctccgtaggcaagacccagcagaaactgaacatcagcgatgaagagcggcccgtagccatacagatatacggacgggacaccgccaccatggtagaagccgcccgcattgtggagcaggcacatccggacacgctggacatcaacttcggctgccccgtgaagcgcgttgccggcaagggtgccggtgccggtatgctacagaacattccgctgatgctggaaatcactcgtgccgtggtagatgccgtgaagattcccgtcaccgtgaagacccgcctgggctgggatgccaacagtaaaatcatcgtagaccttgccgagcagttgcaggactgcggcattgccgccctcaccatccacggccgtacccgcgcccagatgtataccggcgaggcggactggacacttatcggcgaggtgaaaaagaacccacgcatgcacattcccatcatcggcaacggtgatatcaccactccccaacgggccaaagaatgcttcgacctctacggtgtggacgccatcatgataggccgtgccagcttcggccgcccgtggttctttaaggaagtgaagcattatttggagacgggcgaagaactccctccgctgagttccgaatggcggctgaacgtactccgccaggaagtggaagacagcgtcaacctgctggatgaacgacggggcatactgcacgtgcgccgccacctggcagcaagcccgctcttcaaagggattcccaatttccgcgacacccggatagccatgctgcgggcagagacgaaggaggaactgtaccgcatcttcgaagagatagaaccgttgctgccataggagaaaaccgcatacgatttttaccatcgagtccgatacttgagcaatcatcctcacgccccttcttgaatagcttctgagaggggggctattcagacgcagatgacacgctttgttgccatccgcataactcactgtctgtcagcaagaaattttgccaaccacttgccttgcccttggcaaacttttgccatgcctatggcaaagttttgccaacgcggtggcaaagccttgccaatgggaaggcaaaaccttgccaacaaggaggcaagaaaaaaaacattgtttctttggcagaaagaaacaagtccctatattcgtcttcccaagaaagaaagaatcccataaatatgtctttatgaaaaagaaaaaactgctcaaacagctcatcgtaaacttccagcattcacttccggcagaagtttatccgcgtacattggtattgcccacagacagtggaaagataatcaccgtgcccgactagcggaacatcggctgcgcaaaccatcgcttgaacatccacgtggccaggatataaatgccgaaagccgatacgaaacccacgatagagtctatcaggtaatgtgcctggatatagaccgtagccccgcacaacagcagatagaaaggaaacaagcaggcaaacagacgcttgctgccacgccatgccataatcatcagtaccgtagacattccgacgtgcgaactgggaaaagcagccgtggggcgctcacccacctgctgggaactctccaccaggttgtagaagaagccgtgctcatagcccggaccgggaagaagttcctgatggtgatggaaatagtcaccgatggacgggaagataccttgcgccacatggtcgcttccaatggcggggaagtagaactgcggcccggcaacggggacgaagatataaataaggtaatagatgaagaaagcggtgacgatgacgaacgaaaccttctcgaaaaggtcgaaacgataaaggaaataccacaccaccaccagcagaatcatcggataatagaagaagtatcccatattgaacggctcgctcacccacatctgcggaaacctttcacagaaccatacagcaggctgtccgccaaacatccactgctccaccgacgcgaacacgtggtcgagattggggaatatccggttgaactcaaaggtgtcgggataccaataggaaagcagtgacatctggatggctatgcgcacaaaggcagagaacttgcagggtgccagccggtaaagatacatcagcaggaacgtcatacccgcaatgacaacacggtctgcaagcatctgcaccggatgatccatttcctgaaaaagaaacagaatgagaatggaagtcagcaaattgtatatcagcgtaatcttctctaccgcaaaaagccccttacgggtttctacccttttaaataaatctaaagccatcccttatccttataccaggcaatggtttcctttacaccccgttccaggtcgtactcaggactgaagcccagttcctcgacggccggtgtgatgtcacactgccagttgcgttgtttcattattctatacttgtccgaattgagcgtactggtcttgttctgccgcttcgcccaaaattcagcgagcaaagatacgactttcaatacaattaacggacatctcaagcgaataacaaacggattgcccaattctttccttatcaaatcggaaaaagcacggctgctatacaccttcccgtcagccaggaaataggcgcggcgggacacctgcttctctatcccgaggaagacggcttgcacgatatcctttacatatacaaacgtcaagtcctggcggcagaagcctacagaaaagtccgtatgctgccggatggactttgccataagataataatccttctcacgcggcccgtatacacccgtcggccggtagatgacgtaggggaaacccggaatactctgcaaataaagttctgttttcagtttactgagtccgtaggcggtattgggtgaaggggggtcactctccataatcgggtcgtaggtcctctcgcgtaccgggccgaacacactcagcgtactgatgaagataaactgcttgggaatcatgttcagctccctcagcgtatcgatgaagtatttggtctgcagataattcaccaaatcgaattcgttcttgtccacacacttcgtcacaccggcacaatggacaatataatcaaatttattgtaggtccctttatgtcccgagagttgtgccctcagttcattggggtgcgcaaagtccagttcgaggaaatgtatcttgcggtcacgcagatactcgcggctgctggacgaacgtacacccgcccacacaccgaacttgcgcttcaacgcctcctccacgatgaaacttccgataaatccgcttgctcctgtaattaaaatcgattccacttcttcagttacaaattactaattacttttcatccggtccgtcaccttgacgctccttgtgttactctgtcgcctcgttactcttcttcaccggctccacatggatgctgaccagtgttcctttgccgaactgccttttcaacttgttctccaccgccgttgccgtctcgtgggcttcctccagcgagatgctgccatccatacgcacatgcacctcgatggcacaataactgccgatgcggcgcgtacgaaggtgatgcggcgagctgataccgggaaaagagagaatcgtcttcagtatctcatcctccacctcggcaggcaatgatttctccaacagttcgtccacacacggtatcaacaactgcacagccaccttcataatgaaaaagctgacaataaccgctgccaccgggtccagcacccgccaatggtcacccaaaagaatggcgccacctatacccgctgccgtgcctatggacgaaaacgcgtcactccggtgatgccaggcattggcaacaaccgcctgcgaattcaacttcctgcccttgaatacggtatattgataaagcacttccttgaaaacgatggataccaatgcagccaccagtgccagtataccgggttcctgcagagagccgccttgcaggaaacggtaaatggaggaagccccgttccagaaaatgccgaatcccacaaacaacagaaaaataccgataatggcagttgccagcgtctcgtacttgccatgaccgtaatcgtgtccttcatcttcgggctttgccgaaatgcgcacaaaaacaatgacaataatatctgtaatgaaatccgacaaagaatgtaccgcatccgccagcatggcggcactgtgacctacaatacctgcaaagaatttgaagacaagcaagagaaagtttaccacacttcccacaaccgtcacccggtaaatgtctttttcccgtgtggcatctgcttttttgttcagagtttgcatttccatctgcttttcgtctaaggtacagcctatcttcactttgtgtgcaaatatagtacataaatccattacaatctgtcgttccttcattattttcaatagaatgataatattttgaagtctgagtgaacgaaggaacatatttatttgtttactttgcaagaggtaatcaccacagattacacagattgacacagaatctctatttatacataaaatacatcataacattatggccaaaaagaaagaaaagaaagccggcaaacgcatgaagaagaaagagctcgtcaaagtactgctggaattcttccacacaaagcaagacgaagtattatccctgaaatacatctttgaacaactccacctcaccacacatccgctgaagatgctgtgcatggacatcttgtccgaactgtcgatggacgactacatcacagaagtggacaagcacaaatacaagctgaacaaccacggcgtggaaatgaccggaaccttccagcgcaagagcaacggcaagaattcctttataccggaaggtggaggcgaaccgatattcgtggccgaacgcaactcggcacacgccatgaacaatgataaagtgcgtatcgccttctatgccaagcgtcgcggacgcgaagccgaaggagaagtcatcgagatactggaacgtgccaacgacaccttcgtgggtaccctggaagttgccaagtcatacgctttccttgtaacggaaaaccgtacgcttgccaacgacattttcatccccaaagaaaagttgaaaggcggcaagacgggcgacaaagccatcgtaaaggtggtggaatggcccgacaaagctaagaaccccatcggccaggtaatcgacatcctggggcgcgcaggagacaataccaccgagatgcacgccatcctggcggaattcggcctgccctatgtctaccccgctgccgtagagaaagctgccgacaagatacccgccgaaatctccgccgaggaaatagcccgacgtgaggacttccggggtgtgaccaccttcaccatcgaccccaaggatgccaaggacttcgacgacgccctctccatccgcaaactgaaagggggactttgggaagtaggcgtacacattgccgacgtgacccactacgtgaaagagggcggcatcatagacaaggaagccgagaagcgtgccacatccgtctacctcgtagaccgcaccatcccaatgctccccgaacggttgtgtaatttcatctgttcactccgccccgacgaagagaagcttgcctactccgtcatctttgaaatgacggaaaaaggcgaagtgaagaactcacgcgtagtacataccgtcatcaagagcgaccgccgcttcacctacgaagaagcccaggagattatagaaaccggcaaaggagacttccaggaagaggtgctccaactggataagcttgccaaaatactgcgtgagaaccgctttaaggcaggagccatcaacttcgaccgctacgaagtgaagttcgaaattgacgagaagggcaaacccgtcagcgtctacttcaaggagtcgaaagatgccaacaagctgatagaggagttcatgctgcttgccaaccgcaccgtagccgaaaagataggccgcgtgcccaaaggcaagaaagccaaagtgttgccataccgtattcacgacctccccgacccggagaagctggacaacctggcacagttcatcgcccgtttcggctacaagctgcgtaccagcggtacaaagaccgacatctccaagtccatcaaccacctgctggacgacatccagggcaagaaggaggagaacttgattgaaaccgtctccatccgcgccatgcagaaggcacgctactccgtgcataacgtggggcactatggtctggctttcgattactatacccatttcacctcgcccatccgccgctatccggatatgatggtacaccgtctgctcaccaagtacttggaccagggaggccgcaccgtgtccgaacagaaatacgaagccctctgcgaacacagcagcagcatggagcagatagcctccaacgcggaacgcgcctccatcaagtacaagcaagtagaattcatgaccgaacgcctgggacagaccttcgacggcgtcatctccggcgtaacggaatggggactctacgtggagctgaatgagaacaagtgcgaaggcatgattcctatccgcgacctcgacgatgactattacgaattcgacgaaaagaactactgcctgcgcggacgccgcaaaaataaaatttatagtctgggagatgccattaccattaaggtggcacgcgctaacttggaaaagaagcagctggactttgcactggtgtaacctcacccccgacccctctccgaaagagaggggagaggagagcaatgaattgaaaacttgcgaaacttgagtgaagtgaaataaagaataaccctacaatattaaatatccccacttccccactcccctctctttcggagaggggccgggggtgaggctttgcacatgaagacaattactattacagaccctacacagattgaggaaattatccgtaaatgcccatactgcatagtgggcatcacagaccttgaaggaaacccatatacggttcccatgaactttgcctatcaagacggggtaatatacttgcattccggcccggaaggcagtaaagtggagatggtaacaaagcacccgcaagtttgcatcaccttctgcgaaggacacgagctggtttatatgcaccggcaagtggcatgcagctacagcatgaagtcgcgcagtgttatctgtcgtgggaaagtacacttcgtggaagacatggaagagaagcgacgcgtactcgacatgctgatgaagcaatatacggaaaatgaatgcaaatatgctgaacccgccgtacgcaatgtcaagatatgggaagtaaaagtagagaaaataagctgccggtcattcgggttaagaccaagcgaactataaataccatctgccggtcacctgctccacattgatggagcggataaccggcagaaatatttacttttacaacggatattcctcaaatgcatacaacagcgtcgaaagataccgttctcccgtatcgggcagcagcgctacaatcgtctttccttcattctcgggcaaccgtgccaagcgggtagctgcagcaacggcagctcccgaagagatgccgaccagcagtccctcatacttcgccagttcgcgacccgtacggatggcgtcatcattggataccagcagcacttcgtctatcacggcactgttatagttcttcggcacaaatccggcaccgataccttgtattttatggggaccgggcttcccaccggaaagtacgggagaatcttcgggctccacagccacaatccttacctttgggttattggctttcaaggctgcacccacaccactcactgtgcctcccgtacctacaccggccacgaaaatatccacccggccgtctgtatcacgccagatttcttgtccggtagtacgctcgtgcattgccggattggcagggttgtcaaattgctgtagaatcagcgagccggggttggcggctttcagttcttcggcacgggctatggcgcctttcataccgtcggcacccggagtcagtaccaattccgcaccgagggctttcaaaaggttgcggcgttccaagctcattgtgtcgggcatcgtcagtatcagcttgtaacctttggcagcggccacaaaagccagccctacgcccgtattcccactggtaggttcgatgatggtggcaccgggcttcaacagcccttttgcctcggcatcttctatcatggcaagcgccacgcggtccttcacactgccggcggggttaaaatattccaatttggcgataacacgggctttcagacgcttattcttgttataattattcaactccagcaagggagtgttgcctaccaggtcggtaaggctttctgctatcttcttcataatccaactgtttttaaattcctcattcccctaagggaaaagactaacaatccggagtggaacgaggtatgttatttcttacaagacaaaagtagcgcaaaattggttcgtagaaaataccacaaatatggtaaatacgtactataaatgagggatatgtaggatatttgacgagtatttcctatctttgttgccacttttaaacttaaggatatcataatgagtccactcaactttacccacattttgacacaagcagtcgatgagctatcggaaagcgaatcatacaaaggactgtttcaccagcatacggacggcaacccgctgccttcggcaaaagtgctgcgcgacatcatcgaactggcgcgagccatcatcttccccggatatttcggaaattctacggtcaacagccgtacggtgacttaccatatcggtgtcaatgtcgaacgcttgttcgacctgctgaccgagcaaatccttgccggcctctgctttgcaggcgacggcgaatgcaactgttgtaccgagctccaacgggaagaagccgccttattggctgccaagttcatcagcaacctgccggcaatgagacgtacactcgccacagatgtggaagccgcctacaacggtgaccccgccgcacagtcgttcggcgaagtcatcagctgctatccggccatccgcgccatcagcaactaccgcatcgcacacgagttgctcaagttgggtgttcccctcattccccgcatcatcaccgagatggcgcacagtgaaacgggaatcgatatccatccaggagcggaaataggtggttattttaccatcgaccacggtacgggtgtggtaatcggcgagacctgcatcatcggcaacaacgtgaagctgtaccagggtgtgaccctcggtgccaagagcttcccgctagacgaagacggcaagcccatcaagggtattccccgccatcccattctggaagacaatgtgatagtctattccaacgccaccatattgggacgcatcaccatcggacaaggagccaccgtaggcggcaatatctgggtgacagaagatgttcccgcaggagcaaggattgtacagacaaaggccaagaagtaagtcacaaacaaccaataaacaattaaaatcgtaaataactcaaatcagcagttcaagtagttaaatggttatcagccactaatgagagaaacgagtgacaactacccagattgccgattcacataaagtaaatgcatagatgagcgaacaatcttttgaaatgattgccaaaaccttccaaggactggaagaggtactggcacaagagctgactgcactgggcgccaacgaaatagaaataggccgccgcatggtatctttcagtggtgataaggaaatgatgtacaaggcaaacttctgcctgcgtacagccatccggatactgaaacccatcaaacacttcacagccaaggatgccgacgaggtttacgaacagattaaagccatccgatgggaagactatctggatacggacaagacctttgccgtggacgcggttgtattcagtgaagagttccgtcattccaagttcgtttcctacaaggtgaaggatgccatcgtggactatttccgcgagaagaccggcgaacgtcccggcgtgcgtgtcaacaaaccggacgtgctgctgaacatacacattgccgaaaccaaatgtacgctgtctctcgactccagcggcgaatcgctgcaccgccgcggttatcgccaggaagcagtagaggccccgctgaatgaggtgctggccgccggcatgatattgatgaccggctggcgtggcgaatgcgacctgatagacccgatgtgtggttcgggaaccattcccatcgaagcggcgctgattgcacgcaacatcgctccgggcgtattccgcaaggagttcgctttcgagaagtgggtggattttgaccaggagctgttcgacacgatatacaatgacgacagccaggaacgtgaatttacgcataagatatacggttacgacaacagcccgaaggcaaacgaaattgccacacacaatataaaggctgccggcgtaagcaaggacgtggtattgaagctgcaacctttccagcaattcgagcaacctgcggagaaatccatcatcatcaccaatcctccctacggtgagcgtatctctaccaacgacctgctgggcctttactccatgattggcgagcgtctgaaacatgcctttacgggcaacaccgcatggattctttcttaccgggaagagtgcttcgaccaaatcgggctaaaagccacctccaagatacctttattcaatggtgcgctggaatgcgaattccgccagtacgaaatcttcgatggaaagtacaaggaattccgtgccgaaggcgaggagttgagcaaggagcgcaaagaatttcgtccggcttctggggaacggaaagagttcaaacccggagaaagacgcgaattccgtccccgattcagtggagagagacgtgaattcggtagcgaaagacgcgagttcaacggcgaacgcagaccaagagaattcaaggacggcgaaaagcgcgaattccgtccgcgtgaaagaagagagttcaaggatggggaaagacgggagttcagaccgagggaaagacgtgaattcggtggagaacgcagaacaaggtcgggtgagtcttacccggaaagcaaaagaagagaggcgggaaagaaggaagaagaataacacgaacaatgacaaggagaatgaatgcaaagaaaataagtaagagcattcttgcactgctgataacagtacctgctctgcttgcaacaaacgctatggcacaagaactaaaaaagccgaccctggaagatctgattcccggaggtgagacctaccacaaaccggaaaacaaatcgtaccagtggtggggcgatgccgcttgtctggaacttggcatcgacaatatagaaggtacatgggctgtcaaaggattaggtgccaagcccggagagaaattcactgccatcacattggaagaagccaacgcgctgctggaagaaaaaggacttggaaaactgcgtcactttcatgctgcaaaggctgtcaacgtaccccgaggcgtcaatctgggtattcaagtccaaatagacccactcctgctgctgaacaccggcaagtaccgtgccctcgtcgactggaagaagaaaaaagtcatctggagccagccttgccccacccaagccgcaaatgaggattggaacgaggtaagccgccatttggcttatactatcggcaataatctctatgtgatgaccggtgacgggcaaaccctgaaagtcaccaacgaaccggaaggtatcgtctgcggacaaagtgtgcaccgcaatgaattcggcatttcaaaaggcactttctggaatcctgccggggacctgctggccttttatcgaatgaacgaaagcatggtcaccccctatccattggttgacatcacgacaagaatagcactggtggataaaatacgctaccccatggccggcatgctcagccatcaggtaaaggtaggtatctacaatccggctactcaaaagaccatctacctggacatgggcgacccaaaagaccgctacttcaccaacatcacctgggcaccggatggtaaaagcctctatctgatagagctaaaccgagaccaaaaccactccaaactgtgccggtacgatgcggaaagcggaaagctgcaacaagtgctcatcgaagagagacatcccaaatatgtggagccgcaatctcccattctattcctgccatgggacagccacaagttcatctatcaaagccagcgtgacggcttcaaccatctgtacctatacaatacggaaggggaactgctgaagcaactcacctccggcccctggcttgtacaagacatcgtaggttttaaccggaacacgaaagagctcatcatcaagagtacggaaatctctcctttgcagagtaacctttacgctgtcaacctgaagaatggcaaacgcagcttgataggagacccaaccggcatgcactcggcacaaatctccggtttcatgggaacttacctcatcgacaatgcctcttcgcccacttgcccccgtatcataaaactgatgtccaccaacccgaaaaaacaacgggaacacacactgctgacagccaagaacccctacgaaggctttgaaatgcccagcatagaagtaggcaccatcaaagccgccgacggcaagacagacttgtactaccgcctgataaagcctgccgacttcgacccggcaaagaagtatcccgccatcgtctacgtatacggcggcccgcacgcccagatgataacgaacggctggatgaacgatgcccgcggctgggacatctacatggcaaacaaaggctacatcatgttcagcctcgacaaccgtggcagcagcaaccgtggactggagtttgaaaacgccaccttccgccagctgggcatcgaagagggcaaagaccaggtgaagggcgtagaattcctgaaaagccagccttatgtggacggagagcgtatcggcgtgcacggctggagcttcggaggacacatgactacggcgctgatgctgcgctatcccgaaattttcaaggtaggcgttgccggcggaccggttatcgactggggatactacgagataatgtacggtgagcgctatatggacactccgcaagcgaacccggaaggctacaagcagacaaatctgaaaaaccttgccggtaacttgaaaggacatctgctcatcatacacgacgaccacgacgacacctgcgtgctgcagcacaccctttcattcatgaaggcgtgcgtggatgcccgtacctatcccgatttgtttatctatcccacgcacaagcacaacgtcctgggacgcgaccgtgtgcatctgcacgagaagataacaagatattttgaagaatatctttaatgtacaatgtaccatatacaatgtacaatttgctatgcagtgcgggcgtgcaaatagggagtagatggtagaagaaagaagagaataaaagagagaataaatcattaagtataacaatctgtacaacttacctgatgccccacagcacagacaaattgtacattgtaaattgtaaatgaacccatgaaagtattattattaggctccggtggccgcgaacacgctctggcatggaagattgcccaaagcccgaaagtagagaaactatatattgcgcccggcaatgcaggtacaagcgaagcaggcgagaatgtgaacctgaaggcgacagactttcccgcactcaaggcctttgcccttgagaaagaaatcgacatgattgttgtgggtcccgaagacccgttggtacaaggcatcttcgacagcttcaaggaagaccctgccacctgccatatcgacatcatcggccccaccgccaaaggtgctacactggaaggtagcaaggaatttgccaaaggcttcatgatgcgccacaacatccccactgcccgctacaagagcatcaccgccgacaacttgcaggagggactcgacttcctcgcttccctcgaagcgccttacgtactgaaggccgacggactgtgtgcaggcaagggcgtgctgattctccccacactggaagaagctcagaaagagctgaaggaaatgctggacggcatgttcggcgatgccagcgccacggtagtcattgaagagttcctcagcggcatcgaatgttccgtattcgtgatgacagacggccgccactataaggtattgcccgtagccaaagattacaagcgtatcggcgaaggcgacaaaggcctcaacaccggcggtatgggcagcgttactcccgtaccttttgccgacgaaacatttatggaaaaagtacgcacccgcatcatcgaacctaccgtaaacggtctgctggaagaagaaatcggctaccaaggcttcatcttcctgggacttatcaacgtgaagggcgaaccgatggtaattgaatacaacgtccgcatgggcgaccccgaaaccgaaagtgtgatgctacgcatcaagagcgacctggtagacctactcgaaggcgttgcccagggcgacctcgaccagcgtacactggaattcgactcacgcacagccgcttgcgtcatgctggtaagcggaggatatccggaagcctacgaaaagggcaaggtgatgaccggattcgagaaggctgccgaaacagacagcatcctcttccatgccggaacagccaccaaagacggacagaccgtaactgccggtggccgtgtcatcgccgtctgctcctatggtgaaacaaaggaagaagccttgcagaagagctaccgcgtggccgacatgataaacttcgagaagaaatatttccgtcgcgacatcggatttgacttataaatgagaacgaagagattccagaaccggataacggcagggcggttcacactacccaccgctatcctgatttcagtatcctgctggatactgatcgctgttctgttgcccgagacggagacacagcaaagcggatattccctttgggaaacattctgcgacttctgcatccccacctgggcaaaccgtctcttcagctttattctgtatgccgtcatcgggtacttcctaatacagctcaacaatacgttcgccatcatccggatgcgggcatcggtacagacttctgtctacttcctgctgatatccgtctgccccagcctgcacatgctgtatgcgggagacttggcagccgcctccttcctggtggcactgtttttcctcttcaagagctaccagcaggcacggcccacaggcagtctcttccacgcctttgtcttcatcggactgggcagcctgctttttccgcagctcatgctgtttgtccccatcttctggataggtgcctacaacttccagtctctccaacccaaaagtttcttcgcttccttggtaggatggagcgtaccctactggctgttgctgggacacgccctctactacgggcaaatggaactcttctgccagcccttccgcgagctggtgaccttcgctcccacccggttcgactatcagccgtgggaactcgccaccctcgggtatctccttgttctgttcatcgtcagcgcggcacactgtctcattgccggctatgaagacaagatacgcacccgaagctatctacacttcctcatcctgctgaatttctgcatctttgtctatatcggactgcaaccggtattgagtgtccacttgatgtccttcctgctcatcggtgtcagcatcctggcgggacacttgtttgtactgacaaatagccgcagttccaatatattcttcatttgtgcatttatcggattattcattctattaggattcaacatatggacgcttttgtagatacactcgtacagctgctgattgactggggatatgtcggtctgttcatctctgccctattggcaggaagcatcattccgttcagttccgagatagtgatggtagcactggtcaaggtcggtctgagcccggcactgtgcgtactctccgccaccttgggaaatacgctgggaggcatgacgtgctactacatgggacgtctgggacgtatagactggattgagaaatatttcaaggtaaaaagggaaaagatagaacggatgcagcatttcctccaagggaaaggggcactgatggctttcttcgcctttctgccttttgtgggagaggccatagccattgcactgggcttcatgcgcagtaatctgatgctgaccaccacgtccatgtttgcagggaaactggtgcgctacatagctatgctgtgggcactgcaaggagccatttcgatgatgaattattgacatgtagtgagtttgagcaatagatgtatagatacaacgcgttggatgtatagatgcaacgtgctggatgtatagatgcagcacgctggatatataggcgcaacaacacgctgaatcacagagaattaaactaaataaaaacattcaacaaaagcagaagtgatgcaacgaatcatagagaagacggaagacggaagtgcgacactgtttgtaccggaactgaatgaacattatcattcggtaaagggggcacgtacagagtcacagcacatcttcatcgacatgggactgaaagcatccgctactgcccgcccgcatatccttgagatcggtttcggcaccggactgaatgccctgcttacactggaaactgccgaaaaggaaaagagacctgtgcactataccggtatcgaactctatccgcttgcatggccggaggtggatgcgctaaaatatagcgacaatcctctgttcgaggaactgcatcgggctgcgtgggaagaagaagttgccataactccttatttcacactgagaaaagtgcaggcagatgtcgaaacaataagcatcgacagtttgttaatgattaataaatctccgttcgacgttgtctacttcgatgcctttgcacccgaaaagcaaccgggaatgtgggaggaaaaagtcttccggaatatccatgccgccatgagcaccgatggcgtgctgaccacctactgcgccaaaggagtagtacgccgcatgctgcaagccgtaggattcaaggtagagcgtcttccaggcccccccggagggaaacgggagatactgaggggaaggaaagaggaagtgataatggataaggaatagttgataatggatagttgatgccccctgccacagcgcagccaaattgtaaattgtaaatagtaaattgtaaatgaaaaagttttgttttttactcctcatagccaccttgctcttctcgtgcaagcaaggaggccaacagaacaagaagaatgacgataaacccgtgattaccgtcaccatcgagccgctgcggtatttcaccgaagccattgccggcgatgaattcaccgtcgtcagcatggtgcccaaaggttcaagtccggaaacctacgaccccacgccccagcagctcgtcgaccttgcccaaagcaaggcctatttccgcatcggctacatcggtttcgagcagacatggacggaaaaactgacggacaatgctccccacctgcaattcttcgatatgtccgagaatgtggaacttattctggacgatacccatgcgcatcaccataaagacgggcatgtacacgaaggccatacgcacgccggtggtgtggaaccccacatctggaattccaccatcaacgcccaaatcattgccggaaatattctgaatgcactctgcgccatagacaaagccaatgaaaacgcctacatggaacgttacaacgcactcatccggcggatagagcatacagacagcctcatctgccagatgctttccagcccgaatgccgaccgtgccttcatgatttatcatccggcactttcctactttgcccgcgactacaacctgcaccagattcctatcgaagccggtggaaaggaaccctctcccacccatctgaagaacctgataaactcctgcaagaaggagaaggtacgcgtcatctttgtacaaccggaattcgaccgccgcaatgccgaccttatcgcccagcagaccggaacccgggtggtggctatcaatcccctctcatacgactgggaggaggagatgatgaatacggccagagcgcttgtaaaagagtaaacgatgattctgtccatttaacgaagaagaagctatgcctgcatcccccattatagagataaagaacctcagcgccggatacgataaccggaccgtactgcatgatataaacctgattatctacgaacgtgattttctgggcatcatcggtcccaacggtggtggaaagactacccttatcaaatgtatactgggactgctgaaacccaccgccggggaaattctatatcactcctgccccccatccccctccgaaattgccaattgtcaatcatcaactgtcaattgtcaattatctatgggttacttgccccagtacagcagcatcgaccggaaatttcccatcaccgtagaggaggtcatcctttcaggactcagcagcaagaagccgctggcttcacgcttcaccgcccggcaccgcgagaaagcctctgccgtgatagcccgcatggggctggaaggcatggagcagcgtgccatcggcgctttgagcggcggacagttgcaacgtgccctcctgggccgtgccatcatctccgacccgcaggtggtgattctcgacgaacccagcacatacatcgacaagcgtttcgaagcccgcctctacgaactgctggcagagataaacaaggattgcgccattattctcgtcagccacgacatcggcacggtgttgcagcaagtcaagtccattgcctgcgtcaacgaaaccctggactaccatcccgataccggcgttacggaagaatggctggaacgcaacttcaactgcccgatagagttgctggggcacgggacactgccgcacaggatattgaaagaacacaagcattctcacggatgactggaagcaaaggaggccggcccattgtagaaccgacctcccgttacccttccgaataactatccgacaatcttcttacccgtcatttatattggaaagccttatacgaatggggcagtaatgacaaacggaaagagttctttggtgtcaccggacgcctgctctgtacgggttcggcaggaagggaagccagaatatccccattctccagattttccaacctcgtcacctcatcatcagtaacaatacgcacttccaccggttcatcattgaagttctccaccaccagtgttttattgtcatacacaaacaatccgactttggagggagcctccagatagatatccatatccctactcataatgcggcgaatctcattcaaggcttttgccggaaaatcatataaatttcccatatcatcgggaatggtcaatacatatagattgccggcggcatagggagctctcaacaaaataggatatcccgatactcctcccgtcaacggacggcccgcactgactacttcccaagcatcattcgtataatactgaacctgcggtatcaataaatcgcgttcggcttgtccgtatcggccaaaatcattgacaagagctttcaaatcggtacaacgcaactctactatttcggcaattttttcaggaatggctttcagcaagccgcttgtaatcaccacatcccgtccgctttgcaattgcttcctaatgtcggtcatgagctccggagcttgagccgcctgggcagtcagcagcaccacttgttggtctttcggaaaaacgggacgtatatccatcggcaaacctatcatgcccagataattctgcaagaaatcatcacccgccacatgaaaaggcttgtaggacttgatgccaatggggttacccaacttacctaccagtttatcagtctgtttcaatacaacatccgcaatgcgtgccatggtggtaggctctatggaagttccgttcttctgccggataggggcagtcatctcatcataattaaagctggtgcccatgccctgccaaggggtacggaacctgggagacaacttcacgcccagaagctggttataggcaaagagaatgatttcgggagccttggcaagcatggtcagatgcagctgctcagcatagcggtccatacccagattcagtccaccggagtccacccatcctccaccattgtagcccggacgcagattatcaaaataacggataatattatagcttagataattctgcagatgctggttgccggcagggtcccttgtttcggtacccgtccagacaccgtcaaagagttggggaccttcctccagattaaagcccaaaccttggaaatggtcgtaccagttgggatacttgatgattacctttacacgaagattcaccttcttggcaggtttcagcacaaggtcgcgcccggcttcagtcatcagcttcaaacggtattccgtccagctctgcgtacctttggcttttatctctatgtccgacttgcaactggtgaagaaaaagtcatccagaataaactcgtcaaagtgctttgccgtatgttctgcaatctttcgcaccatctcacgatgctcgggattggaatagcagaacgtctcgaaactgttcgcctcgttgatggtgtaggtaattcctccggcagtctctattccccggtcatggaaaaatttcttagcttgctccagggtggcgtcatccacaatcagtaaatcacgatgtgtttccaaataaatcttgtccacttccaactgttgtgaaatcacattccaagtcgaatccagccaatggatgtccttcatcttgtctacctcgtaggcacgtacataaaccgataccttaaaattgtcataagcttttgcctgcatggccatagtgcagaccatgcagagcagaaaagctacaattacaaacttatctacctttattttactgttcattaccattcaatattttctgagatgccaataccatatacataaaccacgtagcatgtccgcccaaacagtactcaccttcctgccataagaacgggaaatgaagtaattcgggcaagtcgggacgaatcagatttgtacccggagacactccacccggaatataagaccagtcggcacggttgacaccataggcggctttcattgtttcggcaccgactcccgttacaaacgctgcctgattacgtcccggatgcataccgagcaggtattggacagcattgaaaatatagtccggtgcaaacaagtcaggataggcagcatgcaggtaacagtaattgtagcccagatgctggggttcccatgaaccggaagaacggttacctctgtcatgcggcactccatacggagttttactgctatactcctgatacatagcctgcaactccggcagtgctttgcgaacaaccttgctgaaacgtgcatttctcacagctttgtcgaaacgtccgatgaaccaacccgtctgacggatattcttgcagatgaaatcctgctgctgcaaaacgaaatcacggtactccacttcctttgtcgccagataaagttctacggcagcatgtaccttggctgtcagcacccggttgttgtcgcagcgggtaatcctgaacaattcacgggctatctccagacaatccgctcccaatgcatcgttatgtcccttcaagacacgtgaaatacctgccagccaagcggctacctgaagttccctaccagggttgtcttccgtaaacacccagcggtcgtcggcagtcccactgacatggtctgtatgggccgacgcatcacccaagtgtgcatactggcgtacggtaggacacagaatccctctgtagagacgccccagagccttccaacccgccactatcgtcaaagcaccgttttccacctgctgcaacaagtcattctttccatccggctggtgaatctcgactatcttcttttcaaaatctatggaagtctcgtcccaataggtaccaaagttctcacaagccatggcaagtatataggcctcgcctgcctgggattccacacgcaggtcatagtcccccgcatcgtgccatccacccacattcagccctggaaccaaatcacccggctggtacttacaaagagtagaggttccctgagtatatccgtctatatggttgatatcggttttggccatacgtgcatcgtcataatgacagaagtcatgccatacacggtatttttcgttcacacgcatgtggcacatctgtaccggctctgggtacgaaaaacccctgataatcacttgattatcaggggtttttgtttttatagggcgtactaaatgtgtactgaatgacgaatacaaagaaaaggtgtacttttataatttttctccctgtatctttataatttcttaactcttatcctgtcttttcttccttattattgccgatgttttcgggaaaagtgagattcttaccttatatttgtagtaagaacgtttaaaggcacacgattatggaaaatcatatagaaaccaatttcagagaaatacagaagatattagatagttgtatagctcatgactataaaactaaagtagatgcactctttttaaaacgtgagtatttgacgcaagcccagctaaaggactatttgcgccaagaaatttttcgtgtgactgaaaatattgtagccatccaacaaaaataccgtgtcgtgcgtaacattgtattggatatggatattcccgattttttgtgggaaagcggttattttgaggacttgaattctgatgaaagaaaaaagtatatcggtttccgctgctctgattttgatatggacgcatatttgcacgaaccgtcctgctatgatgggcggcttccttatttgtccatcatcgttaaccttgtcgttctttccaagtatttgcgccatctgcaagaacaggaaagtaattactatacagatgtagttaccatccaagagcaatccttaccaaaagagaaagaggaaagtgtagttactaatccaaccaagattgtgggcaaaagcaatcctttcaagtccacgttgaaagccaatgaaatcaaacttctgactgaatgtgtgaacgaagcgaatatgtttactactaccgtcagtgccaaaatacttaccgattttttcaactgcaaactgaatggggtattgaaagttaataatacccgtctgttagcctatcttatgatgcaattgagttgctataattatattgtttatgaatggcagtctgtcatagcaaacaacaaactgatattgaagaagataaaaggagaaccgcttacacgtactgacctgtcgagtgcgacagaccaagcaaaaaatatctatccgaaaggatatgaaatcatagacaaatacatcaaacaactgaaaaaaggttgagcatagattgaacgctcaaacaaaggtcaattagacttcattttcaagctcttaactttgccctcgttaacaaaaaaacgagggtgcgcaccttcatattgtttcacctaaattcctaaacaatatggaaagagatttagagttaagagtttccgaactcgaaaagatgttgttcctttcaaagaacgtgcttagcttcgatgaagcgagcaagttcttgaacctttctaaaagttatttgtacaagttgacttcgggtaacttgataccccattacaagccgcagggcaaaatgctttattttgagaaagcggagttggaagcatggttacgtcagaatccggtcaagacgcaggcgcagatagagcaggaagcgcagaagtatatccttaaccgtcctctaaagaaataacggctatggaaaatagaaaagcgacagaagccgggcaggacatcaccatgcagaaagaggatttcgcagccctttggaaaaccattcatctaaaggtgacggacacttacgaagtgccacccgaaatactctgggtgaacggctctaccattggcacgttgggtaatttcagtgcatccacgggtaaagccaagagcaaaaagacattcaacatttccgctatcgttgcggcagcgttgaagaatgacgaggtattgaagtattcggcatacctgccaccgaacaaacggaaaatcctctatgtagataccgagcagagcaaataccattgccacaaggtcatggagcgtattttgcggcttgccggactgcctaccgacaaggacagggacgattttgttttcatcgtgctaagggagcagacacccgataagcggaaacagattatcggttatatgcttgaaaatatgcccgatgtggggttgctcatcattgacggaatccgtgacttgatgtatgacatcaacagccccagcgaatcgactgacctaatcaacctcttgatgcgctggtcaagcggatataacctgcatatccataccgtactgcatttgaacaagggggatgacaacacaagggggcatatcggtacggaactgaacaataaggctgaaaccgtcctgcaaattaccaaaagtacgcaggacggcaacataagcgaggtaaaggcgatgcacatacgtgaccgggagtttgacccgttcgcattccgtatcaacgacagcgcattgcccgaagccgtggacggttatgtattcaagcagcccagccaagacaggggctttccactggcagaactgacggagcaacagcacaggacagctttggaaaacggttttggcaaacaggtcatatatggttacgagaatgtcctaaagaccttgaaacagggttatgcaagtatcggctacaagcgtggacgcaatatccatgtggatttgaacaagttccttgtgaacaagcgcatgattgtgaaagagggcaagggctaccgctataatcccgatttccattattaaaagtcagtttggtttagtccgggtgtatatataagaggaacggacttactatttccctgtatcggaacaggcaggtttagtatggtacgggtatatatataacggactaaacaggactggcgcacttttcaactattttttaatccccaaaaaagaaaatgttatgaacatcgaagatgtgaaacaaatacccatcgtagactatctgcatagtttaggttactctcctgtcaagcagcagggtaacggcttatggtacaaatcaccgttaagggaggaacacgaaccgtctttcaaggtgaacactgaccgcaacctttggtatgactttgatgcgcccatataggctacacaataaatatctctatggcaagagattaggttagagttcaacagacctatcctcaacgacttagctggaggagaaatccaaaggtgacaaaagcatgtcggtaaagtcattagtcagctaaataccaagctgcgactgcatggcgagaggaaaagacagacacaaggatgaagcctgattggttgaacgatagttctgctgcacacgtaccagccccgacgaaaggtatttgattcacgtcgggctgaagcaccccatgtaaaccgaaattacaatggagcaggagctggcttcagagcaaccacaataagtggaataggaacgtaagtcgcatccgacagtctgccgagccaaacagttattgtgaaagcaaatggggattccctaaatcagaatgccgtaaggctatgggcataggaccctgaatatctgacatgggaacggagcttccgtagtagtccgagcaagggaaagtcttgtacatggcgaagggaagcagttagataacttaatacaaataatggaaaatgtgtgagacattatgagaagtcctgagcaagtattaaaagctttaaacaagcatggtaaagtttcggattacaagttcgaaaggctgtaccgtatcttattcaatgaggagatgtttcatgttgcttaccagcgtatttacgccaaaccaggcaatatgacacccggtacggatgggaaaaccatcaatcggatgagtcttcaaagaataaacaaagtcattgcatctttgagagatgagtcttacaagcctaatccggcaaaaaggatatacatacccaagaaaaacggtaagaaaagaccgcttggaattccttcctttgaggacaaacttgtacaggaggtggtgcgcatgattcttgaagccgtctatgaagaggtgtttgcaaacacctcacatggattcagaccaaacagaagctgccataccgcattgacccatatccaaaagacatttacaggtacaaaatggtttgtggaaggagacattaaaggattcttcgacaacatagaccacaatgtattgattgcaactttgcggaaacggattgccgatgatagatttctaaggcttatccgcaagttgttgaatgcgggatatattgaagactggaagtttcataatacaaacaagggaactccacaaggcggtaatatcagtcctatactggcaaacatttatcttgataattttgacaagtatatggaagaatacgccctacgcttcaataagggaaaagaaagacacatcaccaaagaatacaagcaacttagcgataagatgcaacgcatccttaaaagcatcaagaacatacaggatgcagatgtcagattacagcttagggatgagtatgagaaactgagacgtgaaaggcaaaagattgagagcagagacagtatggatgaaacatacagaaggcttcgatacgtaagatacgcagatgatttcctcattggtgttatcggaagcaaggcagagtgcgttaaaatcaagtcggacattaccaagtatatggaagaaaacctcaagctggaactgtcacaggaaaagacattgataacaaacgcacaaaagcccgcgaaatttcttggcttcgatgtttcagtccgtaagtctgatgctatcaagcgagacaagaacaatgtgccagcccgttattacaacggtaagatagtcctaaaggtcgccatagaaacggtgcggaacaaactggaagaatacagcgccatcagatacaaggtagaaaatggccgacaagtttggtttgcaaagttcagaggcaatcttatgaagaagaaaatcgaggacatagtggcggcatataactctgaaatcagagggttctacaactactactgcattgccaacaacgtggcatacgcgctctcaaagtttggatacatcatggagtacagtatgtaccataccattgcaggaaaaaccaatagcactgtaagcaaagtcattgacaaatataaggttgggaatgacattatagtgccatatcaggatgcaaaaggtaaattacggtacaggaaattctataatgagggattcaaacgtaaaccaccaatgtactatacggaggtaaacgacttatcctacacaatcgcaattccacagccgacacctactgagcgattggatgcgagaacatgtgaattatgtggaaaagtcggacctgtagtcatgcgtcatgtcagaaagctaaatcagcttaaaggaaaaactgaatgcgacaggctgatgcttgaaaagcataggaagacattggttgtctgtgaaaagtgttatgccaaaatacacagccatgctaaataaagtcatgttatcaacggagagccgtatgcgtggagacatgcaagtacggtttgggggcaggtacgggaaaacctactgccgaaaggcagtaaggcgttctgtaccgagcctacgcgcaggcaagggcggcaacatcatcgcactggcaaaggaactctattgctccgacagcctgccatacctgttaaaccggatagcggaacagacaccgcacgtccgcccggtcagtttttcttttccccagcgtaggacagaaccgagtttccaacatttggaagtccgtgacttgacccatccggcattgctccgttacttgcagggacggggtatcaatatcgaactggcaaaaagagaatgtaaggaactccattttaccaataacggcagaccgttctttgctatcggtttcccgaacatagcaggaggttacgaggttcgcaattcctttttcaaaggctgcatcgccccgaaagacatcacccatatacggcagcagggagagtcgagagagaagtgtttggtattcgagggttttatggactatctttctttcctcacgctccggatgaagaactgcccgaccatgcccgaccttgacaggcaggattatgtcatactcaactctactgtcaatgtgccgaaagctattgacgtgctgtacccgtatgaacgcatccactgtatgcttgacaatgacaaggcaggatatgaagcgacacgggctatcgaattggaatactcctaccgtgtgcgtgacttctcgggcaattacagggggtattcggacttaaacgattacctgtgcggcaggaagcaggaacagaagaacagcaccagccaagcgcaggagataaagcaggaaaccggacaacgtgccgccccaagacagaaaaggggcaggggcatttagtccggcaggattaccagcgacaggcggtttaatttggagagcaaggttatgtttcggtaaaccgaaactaccttgctttgcttgacagcaaagaaaatttctcccgttggtcgcaatttttaagatactatttaaatgtaaaaacctatgacgaatataaaggataagccggggggacgtccggcaaagaaacggatagagaagcagcaacgggtagtcagcacgaagctgaccgagttgcagtattatgccatcaggaagcgagccggggaagccgggttgcgtgtcagtgagtatgtccggcaggcggttgtttcggcagaggtcataccccggctgaataggcaggatgcggacaccatccgcaagctggcaggggaagccaacaacatcaaccagctggcgcaccgagcgaatgccggaggtttcgcactggtggcggtggaactggtgaaactcaaaaacaggattgtcgaaattataaatcagttgtcggatgattggaaaaataaaaaagggaagcgggtttaagggctgtgtgaactatgtgcttggtaaggagcaggcggttttgcttcatgcggacggggttctgactgaaagccggggcgatataatccgcagcttctgtatgcagaccgggatgaatcccgatttgaagaagcctgtcggacatattgcgttaagttattcggcagtggatgcacccaaattgacagacgagaagatggtacagcttgcgcaggagtatatgcgtgaaatgaaaatcaccgatacgcagtatatcatcgtgcgccatcaagaccgggaacacccacatgtgcatatcgtgttcaaccgcatagacaacaacggcaagaccatttcggacaggaacgatatgtaccgtaacgagcaggtatgcaagaagctgaaaaccaaacacgggctttattttgctggtggaaaagaacaggtaaagcagcaccgcttgaaagagccggacaagtcgaaatacgagatttacacggctgtaaagaacgaaatcgggaagtccaagaactggcggcagttacaggagcggttagcggaaaagggtattactgtccggttcaagtacaaagggcagacaagcgagatacaaggtgtttccttttccaaaggcgaatacacgttcaagggttcggagatagaccgcaattttagtttctccaaactggataaatgtttcggggatgcaggactgaatacggtcggaaatcaacggcagacagcttttacacccgttcgggagccattgccgacacagggaaagactgacagtccgttgataactggctcactcggtctgttcaccgcttcatcgccccctgcggatgaagaacccaacttgaatttaagaaagaagaagaaaaagaaaaaacaacttaatttgtaaacacatggagaaaaatttgattttagaggggcttctctcaatggttacagaactgaaagagaagcaggaagcacaggtaacgccagccagtcgggaggaaactcttgaaaggctgaacgcaatcgaacaggtattgtcggaattgcacagcaacccggctattcccgaaaaagatttgcaggctattcaaagccagcttgacgagatacggaacgggatgcaaagtcagcagaaacatatcgaagacaccaagaaaatagtattggaaacctaccgttgtttcaaggtaatgcttgatactttgggctcttgcaagacggataaagaggaagctgcgcccttaccgctctatcaacggatttacaacaaggtcgcttcttggattcgtccgggattgttccttttttcggcagtgctggttatctgttccgtttccatattcttgaatatccgtttggctgaacgtatgcagcagttacaggacaacgatatgaaataccgctatttgctgatgcaaggacaggcagacggggaaacttttgatatactggaaaacaagttcaagtggcaacgggataacggctttatccgaagtctgaccgattcagtgatggattttgaataccgcatccaaaagcaggcggaagcactggaacgtgcaaggctgttgaacgagcaagccgaacagctaaagaaagaagctgataagctgggtaagccataaacggggaaagccgggatggatgaagcacattcaccgttccggcttttcagattcacttctttttcttcgtacagtgttctttctcgaactggcgtagcgtggtgacgctgaacctttccttgatgaactcccggacatcggaagccttgtaatacacttttccgctgatagtgaagtatggcaacgcaccgatagcccggtagcgttgcagggttttgatgcttactttgaacagcaggcacaagtcttgattatccaataggttatcatcttcgggcagtaccctgtctgcattgcgtagtacccgtacatctttgcagagttcttccagtttggcatacagcttctgcatccatccaccaaattcgtcattgtctatatacataattgcttcatgtttcagattatacattcttgtttgtcaatcgattgatgaagcaaagttctaaaaacggatacaaagaaattacaggagaactaatggagtcccctataaataaatcataagttgctgattatctatatcctttcttatcatgttcatttttgattaggtttgccagtccattaagaaattcggtgagtttgcccggcttccgttttatcacgtcctcatgtttttggtggcagtcgcttatcttaatgttaaacaaccattcaaaacctttggataagtccactaaataggcaggtttaccgttctgataaacgatgtctttggagaggaataagccgcttaccacttccatgatattgataagggttgttttgtcggcgaggtagagaggggaaaggggctgtttattgatgcgttgctgtagttgttccgggtatttgatgcgccattcaataaggcgtatttcagtgttcaaaagtcctatcgcttcatcaattaaatgcaaatagggcatttttttcttgctcaaaccgtacacgatacgatttaagacggtgtaaaccaaaggaaaaatagcgaagtaaaatactgtaatcctgttcgttgataccaaaatcggctacatgcgtagccaattcctcaatagcttctgtaaactccgatgcagaaactttacgttgtgaatattccgacaataagcggaaaaatcgctgttctaaaattagattcatgtatgtattcatataaaaaataagccttagcgagacttaggaaaaggcttatttcaattcataatattgtaatccgcaagttgttgttttgggggaatttagaaaaatagtttatagcaaagtaatcccaataaaaatagcactaaaaggcatattgtaagaaatatatatatcctaaacatatatatttggtctgattgctccttttctatggtttttttacggatttcttctatcttttcaatggaaacattggataaatcagcatttttacctttgcctacaagatatttgtgatgttctttcatcctgtctctattcaacttgcgaagctcacggttctctttgtcccgttgtagcatatcatttatgcaacctaatgttcccattttccagttaacatttaatttccaaaccttgatatatcaatttctttttgtagttccctaaagatacgttccaaatcatatccatgcggattggaaatttggaaacatccgctttctatggggctattaacctgaggggcagttatcactgtgtcattgaaaacgaaagcgatgtactttcctacactctttgttgtggcttctctccatataggcaatttatcttggaggaagacaccggtaatgaccgagtgtccaaaagcatcagtttccaaacgtaaagaatcgaaatccttaacagtaaggaaaggtgtttgtgaaaggctgtctgtaatctgtgatgttacgtagtaccagccgtttatccggtgaaaggattttgtctgcatacaggctgtcattagtaggcagaaaaagagaattgttgaaatcttcatatccgctatttttaggttaatacatcttctccaacgtccacaccatcttattgggattataggcttccattacgaggtgtgttcctgtgtattccagcactgtccacggacctgctatgttgtcgaacgtgatgatttttccatttacttggtaagtaaaatctgtgttccacatatatccgtcttcttcgttcgtccttgtataaatgccttctgattcgttggtaaactgaagaatggattgttttgtgtagtctatctcatcttcgatattgtacacggtcatttgcgcttgccaagtagtttgcttcagggcttcgggggtgaagacagaagtaggggcatcatcgttactacaatttgtcagacataacatggcgcaaataatgaatgtggaaagcaccatacataaagtaattttctttttcatcttatctctattttaagtgattgacaataattatatatttctcttcatagggatactaacaatacctttattaatctctttttcacccacttttttgaagcctaaagatgtataaaaagtttctgcataggttgaagaattaactgttatataagtgaaattacaattgctcatcatatagtcaaatagcgatttccctattccttgccgatgatagtgtggcaagacaaagaagagggatatatgttgcctttcctgatgtacaccgattattcctatcaataaatgattgtcaaaagcaccatatatgtcaagtgtattcatcaacgatgtgtcatacacgaaacttttaaaggtttcaataccttcttgggtgaaatcattcctgccacattccatatatacttgataggacaaatcagcagcattattatattcttcttgtgttaatttacgtatcatatcaatgttattaaatcatgaatgcaaaatacggaagaataaagaaaaaaggtcttgacaattgtcaagaccccggtataatggatgttaaaagattggctatttctccagtttgcggcgtatgcggctaatggtttccggtgtaacccctaagaatgaagcgatgtttttcaaaggaactacttctgtcaagttcctgtatcgtatttcaggcgtacaatatgaatcaagtaatcgttcatataccatttcaaatagactctccgccacatgccttccgaatcgttgagttttcatatccgtttcccaatattcaataatgtcatgacgggatatttcatgtacagagcaatctgttatagcttgaatattcactaatgataaactacctttcataaaagaagaatagtcacaaataaattcatccgtaaaagagtatcctacaatatgttcttctccttccttatctatatatgtatattggaatgtaccgttttctacccacccggcaaaacgttctatttcattctgacggataaagaaattttttttgcggtatatacgttgcttccctttttcatgaaataaatcttttacgagggaatagtctaaattgtcgaggtatgaattaaaatctttcattgtcgtaagctatttattcagtccacggcgtatgcgactgattgtttccggtgtgacttgcaagaaagaggcaatctcctttaacgtaatgtactcttgaatatcggggcatctattcaataagtcaagatacagttctgccgtggtcttgcagtacatatctattaatctatgatacattaataagtatgattgttcaataagagtacattttacttgcatggtttctacatttgtggcaaagaattcctctacttttaaatagggtatataacaaatctttgtatcgcaaacggcttcaattgttactaatgacggttgattaggtgctataagtgtgcataaacttcctgcaaattctccggagaaagtatatcctactatgtgtatatttcctttttcatccacacgagtatatctcaataagccgtgttcgatataagctcctcgatgattcactttgccttgaatagtgaattgttcaccctttttgagttcgatataagtgccatgttccaaaatgaactgctttagctgttctaatttcgaatggttggcatattgtgagttaaaatcttccatactataaactaattgcaattaaaatatagaataatctcgtgagttgttctcttaaaaagcaaaaatagattcctgactttatcaaaacatcttcctccctttttataaatccattttattgtgagtttagtttatgcttttgtatatatatccaaaacgaactaaacttatttctattgactgaaagtatatgctggcgaaaagaaaaaaagtattcttcttttcgccagtttttaggtttgttgttctaatagtttgaagaagaaatgaactcctttatttcttcttcggttggaagctctatcctatacttctgtacaaagatatttgggtctaacccggcagtggcatactttactaatgtatctcccttttcggtgcagagcaaaataccgataggcgggttatcatccggctgcatcacttctgctttaaaatagttcagatacatatttagttgcgaagcatactcatggtggaacttgtctatcttcaattctacaataacatgacatttcaaaatacgatgatagaacacaaggtcggcaaagaaataatcttcatcaatcaagatgcgtttttgccgggcttcaaagcagaagccatgtcccatttccaataggaagcgttgcaagttgtcaagaatggattgttccaaatcgttttccgtcactaatgcacgttcattcaaccctaagaattccaaagtaacaggtgtattgataacatctttaggttgtaataaggttgcttgttgctggactaaagcggagagagcttctttgtttttggatagtccgctacgttcgtaatataaagatgcgatttgtcgctccaactccttaacagaccagcagccacgaatagtttccatttcatagaaagcacgttttaccgggttctcaattcccgatatagtgtttaaatgggtggaagataatctattgaataatctatcagccggaatcatccatgtttcggtttgtgggtattctgttgatagtttccaaacgccattttcagattcggcggtcaccaaccgccgaattggttctgtgaattcggcggtcaatgactgccgaatttgaatttgtgatgcaatatattgtgtaacaggtccttttagttgtggataaacaaggtacaaccgcctaaattcacggaatctacgttcattcagaccttttgttttcagttgttgttccagcttcttcaagagttgttcaccgtaggcggcacggtcttctccgttctgctcaaattctacgatatagcaccccataagccagttacgggaagtaagggcaaggtttacagcgtgtgcggcttgtgcctgcaacgtgttctgtatcgtgctgatatgttttactaatgcttcaaagttcatagttacaaagataagtcttttatggttaaaactttagttcgggtaagctgtttattgcttcctctttcaatttatccaccgcacgggtgtacttctccgtatgcttcaatccgctatgccctaaaaggctggctacggttttgatatttgccccattgttcagaatgttcacagcaaacgaatgccgggcacaatgccagcttatatgtttgtctatcccagctctctttacccaacgctttactgatttacagcaactttcgtaagtaggtaaatcgaatatcaagcagtttttatctgccggggtttcaccaatgatagacaatagaccatcattcaggggaataaccacaccactactggcagaatgtccctttgtcttgctttgttcaaatttcaataaccgattagcgtaatccacattcttataggtaaggtcttttacatcacagaagcgcagaccgcagtataagcagaagataaaagcacgtctaacattcgggttctcgttgtcataatggcaagccgccaacttttgtatttcttcgggagaaagaacatcttttcgaagcatttggctatccactttacaggtaacacttttgcatgggtctttcaacattacatcgtggtcaatcgcatatcgaataactttcttgaaacgctggtaaatgcttttagcaccctcacccacacttcgggattgcagataggttacaaactgttccatcatttctttggtgataagttccggtttgatactaaactcattcatggggtattgctcttttaagaagtctttaaaacggctaagcgcaatttgcaccatgcgaatatctttcttggtataactgttgatataggcttggaaatagtctaagaaattgaccgttctatcttttttcaaccgatagcccaacatactttctttaaattcctgctcacgctccgcacgtatctttgtggcaagctccaatgtttctttgttctgctggcgttccgcaggggtacggggcttatctatcagatacagactaaggttttcttttcgcctgttatgctttactgcaaacttgggtttaccttgcatctttccactatcatagtacacttgattgccgttttcatctaatacgggcttttcctctctacctaaataatactctaagtaaaggctgattctaccatccgagagcttattttgctctaacttggggttttctttcgttttattttctaactttgccattgtttagaggttttatcccgatttaggtaccataaccgggtgattacgctaaacagttgattttcttttgttttccgatattgcaaaggtacaaaagaaaatgatatttcaaagtgtactaaaagtgtactgaataacggaaaatgggcaaaatatggcaaaaatagagaaaataggaaatactcaagtgattgataataaggaagataatttcttttattttcctatgatttctatggcttgtaccggcaagaagtattccacctctgcctgccagatacccttgtcccacacatctttggcaatgcggaacaccggagaagcagcatcgccgtacattacctgatagagcccttcttccgtcacttccgtgaaatcgaactgcagatagtggtagcgttggaaatctccccaatccttggcagcctgctgctttaccagtttcctgccatcggcagcaacgcgataaagggcaggttgcttgaagtctgtatcccgtttatccaactcaatgacagccactttcttctgtccaggatggtaacctacttgagaggcttgcaccaccggtgcataacgccagtctttagtgactgtcggacggattatccatttcaccgcaccttcctttgtccctgccgggaactccgaacggagcacaaaccaaccgttgttatgatttatccttccatcatacagcaacaagtctcctttctcactttcaatcgtaatctttgccaaatcatcctgaggattgagtacaaactttttccctgcggccaaaggagcagagacgatatcatcggcaatcatcgggttataagtctttctatccaacagcaactggtccaaatcagctttcccgtcaggattgaaatctccgatatgctccatattggaagactgtttcatggtgggccccatcgcctggtggggaaagactcccgtccggttgtccataatccacggcttgcccagcaaagtggaaggtaccaattccagattaaagcccaacttgccggcaaaccgctcgggcactggttggtccaaatcaacggtcaataccagataatccttctcgcctttgaccttaatggtatagccaaaaacaaaatccggataaagcatcggattaaagcctgccatgtgtttggccgaatccggataactcaatgtgacacggatttcattgtcagcctcatccaccacccggcttctcatcttgggcaatccctgccactgcccttgcgagatttcaaagcgcacatctccattggcagccctgcggtctccattcaaaacaagggtcagtcctccctggtgtccttcagggtagacgtcactgaacaccatcacattggccccgccattctcaaaatatcccgatggattgattctgaaatcctgggcgtgcagccccatacaaagcatcagtgatgctgcacctgctataaatttcttcataaatactattttaaacgattatgtatttctactcccaagcgtaccgtatgatatgggcaacgccacatactcactttgggagtatccttcttgggttctccatcaaaacaatcactgtaccattcaccgtattcccggtctatcatacagtcctttacgaaagtccaaaccgtatcggccgattgcagataaacgtcattcccgctgatttgccaggcattgacacaagctatcatcgtttcaatctggccccaccatgaggcatgcccggttgttcttccgcccttcttttcatacatcatataccctttgtcactcagtccttccgccaagcaagcatccgtcacatccagcgcaagccgattcgccctatccatcagttgccggtcttctaacacacgggcagcctcacaaagcagccatcccgcctctacatcatgtccataagagtccatctcaaccagactgttccatgcattatcaaagaacaaattaaaatgtctctttgaagagtcataaatgcggtccataaacaactcggtgcagaattcgagtcttttcctcagtccgtcgtctttccagcactgatataaaagggtataagcctccagcacgtgcaaatgcgcattcatagtcttgggtgcattgttatcataattatccagttgtttccaatcttcagtaaaagattccacataaccgtcatattgcggttcgcggcctttctcctccaaggtatgatataaaccgacagccatatccagactctcgctgttacctgttgccagatagtgttcagccagcccatagatggcgtaggtcatggcatacgtatatttggaagcattcagcacctcaccgtcaggattgaccagccaatataccccaccatgttccttgtctataaatgtatcaatgaagtagcgttgcgatttatccgcaagcttcagataagcctcatccttaaacgtacggtatgcggcagaaaaactccacagaatccgggcattcagaacccctcctctcggagcatccactaccggagtaccattccgcaatacagttccataaaaaccgccgtcgggagccactgcataatccatccaaaacggcaacacgctgtctctgacattcgtgacaatctctgtacgcatgcgtgtctgcatatctgtctcccctgaatgcgaccggcagcctgccagacaagacgcaaccagcagtgctatccaataaaacatcttcctttccataattattctctaaaaccatcaaacttttccttgtataattccccgtttatcagaaactggtgttcgtcgtctcaagtactggtgtttgtcatgtcagacaccggctttcatcacgacagaccctgacgtctatcacaacaactactggtgcctgacatttcactcacaaatattttattattaagtgtttatccttaattccgcaacactattacaaatataactttttaagtacctgagcaacaaaaagttgctcaggaatttgccatgtcagatttttcacctatcttagtgttgcaaatcaaaatatgtatcaaacccgacagacatggcaaaggtagcaattaaatccgagaaactcactccttttggaggaatattttcaataatggagcaatttgactccagactctcatctgtaatcgactcaaccctcggtatgagatgcaggctgtatggttatcaatacagcgaaatcatccgttcgcttatgagcgtttatttttgtggcggctcatgcatcgaggatgtcaccactcatctgatgtaccacctttcgcttcatccgacacttcgcacatgcagtgccgacacgattcttagagccataaaggaactgacccaggataacatttcctacacatccgacactggcaagacctacgacttcaacacggcagacaagctgaatacactgctcctcaattgcctattgtccacagggcagctgaaagagggcgaggggtatgacgttgacttcgaccaccagttcatagaggctgagaagtttgatgcgaagcctacatacaagaagttccttggttatcgccctggcgtggcggttattggcaacttgattgtcggcattgagaacagcgacggcaacacaaatgtccgtttccaccagaaggacacgctgaagaggttctttgaaaggtttgaacaaaacaagcttattatcaaccgtttcagagctgattgcggctcgtgttctgaagagatagtggaagagattgctaaacactgcaagaccttctatatccgtgctaaccgatgcagttcgctctacaatgacatctttgccctcagaggttggaagaaagtggaattgggcggcattgagtttgagctggcctccattctcatcgagaaatggaaagggaaggcataccgtcttgtgattcaaagacagaagcggatagacggcgaactcgacctgtgggaaggagaatacacctaccgctgcatccttacaaatgactacgagtcttccgagaaagagattgtcgaattctataacctccgtggagggaaggaacgcatcttcgatgatatgaataacggattcggctggaacaggcttccaaaatcctttatgggagaaaacacggtgtttcttctgcttatggcactcatacgcaacttctataaattcatcatggcgaggcttgacgtgaagaggttcggactcaaagcaacaagccgcatcaagacgtttgtctttaagttcatctctgtgccagccaaatgggtcaggacatcaaggaagtatgtgctgaatatctattcatgcaacaatgcttatgccaatgtgttccagaatgactttggataacaccgacaacttatagtcgtgattttgcgtattgcctcaagtcgcatggtggggtaaggggcatttatatgtctttatggtgacattcgatgcactgtgccccctttttactaacgatgcagattcttttcgcttctgtatcatattaggcgcgtagttgcggatttgaggttttcttaaaaaggagctaaataaatactatataggaaagatagaaaccccttcagaggctttcatgtcttgcgaattttaagtaggtttgtgacatgctttaacaaatgatatcatgaacagccccataaccgacttaatatgctactggatgctttttctaagcatcctgctcccctataatacctatgccagtcccacagagcaaagcattgtcatgttcagacagctatcgacaacagaagggctttcaaacaatagtatcaacagcttgtgccgtgacagtagaggtttcttatgggtcggtaccacttctggcctgaaccgttatgattcctatactttccagcaatactatcaagacacggataacctgccggataacagcattaccgacatttttgaagactggaaaggaaacatatgggtggctgccacacaaggctacgccatatatgactatcaaaccggtaagttcaataaaaatagtgaagcgatactccggcagctcaacattgcctgcgataccattccccgggtggggacagaccgtaggaaaaaatatctatgggcctatgacaaaagcaagatatatctccacgaccaccaacagaatatcacaaagatatatcctctggcagatacttacatgacaaggctttttgtcacagatgagcatgtatattccatctacaacagcggaaaactgtatgttacggatatcaattcatcgcttacgcaggaaatatccatccctttccaatataaaagatatctggaaaaacatcttcccagagtatatattgacaacaatggaggtatatgggtctatacattccaaaacagcctgctgctatataaaaagaacatgcagacagcgtgggaagaaataaagctacccatccataccgaacaattcaacaggatacgtaatatagcagaagacagtaacggaaatatctggctcatcaccagccacctcggaggattcatctaccagccccagtccggtagtttgactaacttctcccatgagccactcaaatcccataccatagcaagcaataatctcagtgccatccacattgaccaagaaggtattatatggataggaaatttcaaacacggaatatcttactatgctccccaatcacaagtatttctgaaccagaaactatggcaatacaacgatatgctttcattctgtgaagattctctctccatctggtatggcacagacggaggtggactcatgcgccaatctctaaatgctaccataccggaacaagtctccacacctgctaatgtcattgtaaccattaaaaaagacagtaaacataggctatggctgggtagttttcaaaatggactgatttgttatgaccagggaaaagtcacccaatataccaacgaaaacagtgaactactggggaatgacatctatggtatacaagaagataagaatggagatattctgataggtatgctggatggatgtatacaaaaactagatgtaaaaaaacaaaagttttataccatccttgacatgcagaaccagctgaacatcagagaactgttgtacacaaacaatgacacgctatacgccgccacttcattggggctgatggcagtcaatacagaaagcggtaaacaccgattcattcgccacaatacccaaaacagccagcctctgaaaagactgaacctaaacaccatctacaaggacagccgcaacattctctggatgggaggcagtacaggattggcttattgggacctccatacagacagtatcttctacatcgaccacagcagcggactacccgctaacatggtgaccgccatcaacgaagacaacaacaagcaaatatgggtaggaacctgcaatggcattacccgtatcaacttgtcacaaaagccactatctatcacaaattacgatgtatacgacggcatcactgccaacgacgtcaatgaacgcgccttgtacaaactgaagaacggcagtatactagtagggactcccaacgggtatactactatcattccacaagaaatagtccatagtacctataatgccaaagtatatctgaccggtatagagcctaaatatttccccttatccgaaatgttgaacggaaagtctccggagtgtgccaccgaggtggtcatggaagaggggataccttccttccagttacatttttccacacttgatttcatagaaccccgaaaggtacgctatgcctaccgcatcaaaggacagctgtccggctggaaccataccaccaataaccaaatagaattttcaatgctcaccccaggtagatacgaacttcaggtaaaagcatgtaactcggaatacatgtggtcgcccaacatcaagacaatcaccatcaggatattgccaccttggtacaagacatggtgggcttatctttcatatctgctcatcaccaccctggccggatggcgaagcattgcctatttctattcaaggcgtaaacagagagccactctgaaagtcatagaacaaaaaaacgaacgccaacaaaagattacggacatgaagatgcaattcttcgccaatgtaagccatgagttaagaacgccattatctctgattatcaatccacttgaagagtttttgaataaatatccccaatataagaacaccttgttgtatactgcccaaaacaatgcccgctacttgctggaactcatcaatcagctacttgatttccggaaactggatgccagtggggaagccatgcactacattcatggagacatcgtgagccttgtaaaagaccagttccaggccttcgaaagtgctgcccgtaaacgagaaatcagttaccggattataagccagcaacctagtatacagatggactttgactatgacaaggtacggaaaatcgtgatgaacatactctccaatgctttcaagttcaccgagaacaagggaagtatagaaatcagaatcaacattgttggcagtaatgtcgtcatgcaattctgtgataccggttgcggaatagacgccgcacaacagaagaagatattccaatgtttctaccaggcggaacatcaggaaaacacacagggaggaagcgggataggcctatatctcgtagccgaatatgtaaaaatgcacaaaggcaacatccaagttttcaccaatgttccccaaggcagcatctttaccatcagtctgcccatacatgcaaccatccctccacaaatgcaggaggagcaaaccgaccagacagaaatgcaacaacccgtaccagcattctccaatataggtgaacagaactataccattctaatcgtagatgataactacgattttcttgatttcctaagtgcctgcctctccactagctacaatgtactgaaagctaccaatggtcaggaagccttggaaatactgaagacagagaatgtggatattgtcatcagcgacgtcatgatgcctaaaatgaacggactggaattgtgcacggccataaaaagtgacctttgtatctcgcatattcccatcattcttctcactgccaaagccagtgaagaatatcagctggagggcctcaatatgggagcggatgattatatcaccaagcccttcaatatggaagtactgaaacttcgcatcagcaaatttatagagagcagtctgaaaaagcacgagctcttcaaccaacaaatcaagatagaacccagtcgtctcacaattacctccctcgaccggcagtttgtggaaaaagccattgctattgtggaagacaacatcaataacgtcggattctccgtagaagaactggctgcgcaactgaatatctcgcgcggctacctctacaagaagatggtgaaaattaccggaaaaacatctctggaattcatacggattgtacggatgaaaagggcacaacaactgctggctgaaagccagttgcaagtagcagagatagcctataaacttggctacaactctcctaaaatctttaccaagcacttcaaggaagagttcggcatgagcccctccgagttcatgcgaaagcatacgaaacgacagaaaaatgtagtaaactatatttcagaagtttagtcacagctttcaaaccaatatcaacccctaaaatataggtaaacatcagaaaaagacacattttataacgttattagctacaaacaaaaaccatccgtttcccaattagtccgtatattagtggaaaattctataactcaaaaatagatactatgagaaagagacattttctatttgcatcagctttagcactgctctgcagtagcggtgcgctgcatgcgcaagacttcaagctgacatcctccggttatttcaagaaccagggagtcgacgtcatggcttttgatgacatctatcccgaaggacaccagggaggggtatgcatcatcatgaacggacaccgtgtggcaacaaacggagacatccgcctggaagccacgcccggacaatggcagcccgtaccgaaacagctcgaccggaagctcggtgacaacagcatcaccgccacgctgtgctatcctgactcctcacgccatctcaccggattcaacccgatgatttacccggacctccaccttatatatacggtaaacgtggaaagcaaaggtaaaaacatagaggtgaccgtagaccttgaccgccccattccccaggaattcatcggaaaagtgggcttcaaccttgaattcttcccgggttccctcttcggcaagccctggattatggacggtcagagcggcatcttcccgcaacaacccaactctcccctaatgacaacccaacccaactatctgcatacgggaaattatcatgacggcaagcaatcgctggcagacatggacaaactgataggaaaaggttacagcccgattgtggccgacgacatcatcagcgaaccttatgccaaaggccgtaagtttacctcccgccccgacgacccttacaacaaagtaaccatcgaatcattgagtggtgacctacaactgtttgacgggcgtatgaaccacaataacggctggttcgtactgcgcagcaacataaaaccgggtgtcaccaaaggggccgtcaaatggattatcactccgaacgtagtggccgactggatgtatcagccggttatccagacttcacagataggttatcatcccgcccaggacaaggaagccgtcatcgaaatggatatacgtgacaatagaaaggaaacggcacaaatcatccgcattgacgcagacggcgagaaagtggtcaagaacgtcactcctgccaattggggcaagttcctgagatacaactatctgaaggtggacttcacggatgtgaaggaaccgggactctacaagattaaatacgatacctccgtatcccctatcttccgcatcgacaatgacgtatatgcccgcggcgtatggcagcccgtactggaatacttccttcccgtacagatgtgccacatgcgcgtcaacgaaaaataccgcgtatggcacgactgctgccacatggacgatgcccagatggcaccggcacacaatcatatcgacggctacgaccagaaagagggcctgtccaagttcaaaccgggtgaagtggttcccggagtgaacataggcggctggcacgatgccggagactttgacctccgcatcgaatcccaagccggagaatcctatatcctggcactggcctacgaagctttccacccgaatctcgacgtgacttccatcgaccagataaaccgtgtgacggaaatccaccagcccgacggtaagaatgacctgctgcaacaagtagagaacggcgcccttacggtagtcaacggctacctggcactgggacgtctctaccggggaatcatctgcaacgaccttcgccaatacgtacttctgggtgatgccgccgccatgacggacggaaaaatcggtaatgaagacgaccgctggatatttacggaggataaccccggacgggaactgtcgacagccgcccaacttgctgccgtatcacgcgtattgaaaggcttcaatgatacattgagtgtacattgtctcgacattgcccgcaaagtatatgcttctaccgaaagcggcaacaacagagccttgttccccaaagtgcaggcagccgtagagctgtacctcaccacgggcgaacaaccctatatggacttcatcctggacaatcaggcgctcatcatcaagcagataggccgcattggctggtacacggcacgcgtagaacaacagtttgcacagatgaagaacaagaaagccaaagccttctctaccgctttccgcaaagctctggccggatacaaacaagaactggacaagcaagtgcatgaaactccttatggcgttccctaccgtccgaacatctggggtgcaggctgggatatacagcgtttcggcttccagcactacttcctgacaaccgcctatccggaaatattcccgaaaacaccggtattcaatgccctcaacttcattctcggatgccacccgggctccaaccaggcttccttcgcctcgggtgtcggcgcacaatcagccactgtaggctacggactgaaccgcgcagactggtcgtacattcccggtggagtcatttccggtacggcgcttatccgtcccgacttcccggaactcctgacgttcccgttcctctggcaacagactgagtatgtgttgggaggaggttcgtcccactatatgttcctggtacttgcagcagaacagttgctgaaacaataagaaagacagagggggaacaaaaccctctggatattttcttttaggcgcggattacacggaattcacggatttagtttactgcatccgtgaattccgcgtaacccgcgcccaatattatagtataatgaaagtgtttatatacttttcactctttcaccaattatccgtccggaatggaatagtgggcagttcgttcccgccaatcattgtaccgacctggaaatcacggaaacaatagcgcacggcaacaggacgggacaccttctccgaagaaatcacgacctcattcgtctgccagtgcagccatactttgtcggcaggatggaacacacggtcctcacccgccacttcgaaaccgcgaaggtcatagttgcgacagatacccatttccaaatggtcgaaggaaacccatgcttcactgcctttagcagtccatgacttatattgtgggccgaaacagtgtatctgcttcaatccataggtaaggttcaatgccagatagctcaagcgttgacctacctttgtcttgttgcggggatggatattgtatatctcataaggctctacaaggtcgtttgtagaaatcatggcactgttcggaatcaggctttgggcacggaattgcgcttcacgtaggtaagcagctttctcttgctgggtacctccataggcgtacggcgctatttcggcaaagtagaaaggcaattcgcccagtccccattctttgcgccacagctgcaccatatcggccagacgctcggcgtatgtttcatgacggcctacgttagactcgccttgataccagatgaatccctttatggtatagttctgaagcggcttcagcatggcattgtacatcagcatggggcggtgcatggggtgcaggcgttcgatggaatcggggttgagggaaatgtccggatagttttccagcaactcccggcttatccaaccttccacagtggctccaccgtaggcactgctgatgatacccacgggaatacggagggcacggctcagtgaagttgcgaaatagtaagctgttgcactgaaatcgggtgcggtctcgatggaggagaggttccaactaccttcgcagtctgtttgcggttcatacgtctgatgcttgggaacggtgaacatgcgcacacccttattttcggcagaagctatgatatcatccaccccattcatgatgcaacagccggcaaaacctttcaagggcatttccatattactctgaccggaagtaagccatacttcaccgattaggacattcttcaacgtagttttttctccgtcatcaaaagttatctcataaggcgtgtatcctgctgccggagttttcacggcaagcagccaacgtccgtccttatcggcacggcaagtggaggtttgtccgttccacgaaggcgtgacgcgtacttcggctttcggtgcagccgttccccacagtttcacttcagtctgctgctgcagtatcatgttgtcgcctaccagtgcaggcagttttactttagcgcccagcgaggcggcacagcataatagaatcaatgcaagagtcttacttttcatggtatatttgtgtttaatactatactcggaatcaataacgtgagcaaaaataaggcttttttgctcacgttctccgtttcatgtgcaaaaagtgggtgtttttgcacatgtgctcaaacaaaattatacatagatgtattatacattgatgtataatttgtatatttgtcattaaatcaagaacagaaagcttatgaaatcaccttttcaatacggcacactggttgataaagaaagtttcgtcaatcgggtagaagaacgaaagcaactgaaagaattgcttggatcgggcatcaacgtaatgcttatttcaccgcgccgatggggaaaatcgtcgcttgtaaaagtagctatggacgaactgacacaagaagacaagcatatccgtgtctgcttcattgatgcattcagcatcaagacggaagctgaattctaccgcatctttgcgcgagaagtcatttcttgcgccgcctccacccttgaaaagaggcttgaagatgtgaaacagtttcttaaagccgtttctcccagtatcacattgaagagcgacccaaccgataccctctcctttgacctgaaattggaactggaagaaaaaagtgtcatggagatactggaactacccgaaaagatagcagctgccaaaggcatacacctgattgtctgcatcgacgagttccaacaactggcactactacccggctacaaaagtatggagggaaaaatgcgctctgcctggcagaagcagcaacaagtttcctattgcttttacggaagcaagcggcatatgatgatggacatcttcaacaattcttctaaccccttctaccgcttcggacaagtactgttcctgcaaaagataaagaaagaggaatgggtgcccttcatcgtcaatgccttccaccggacgaacaaagaaatcagcgaacagcaagcagaacaactgtgcgacatcgtgaaatgccattcgtggtatttgcaacagttgtgctatttcatctggagcggtacgtctgaaaaagtgacagatgagattatcgaaatccgtacccgccaactgatagacaccaacatgcctatgttcatgaacgacaccgagaacctgactgctgcccaaactgccatgcttcgtgctgtagccgatggtgaataccgcttcaactccatccccgtagtgcggaaatatgaattgggcagtgcacagaccatcacacgcaacaagcgtatgctgacagaacgtgatttcattgagaaagaaggaaacaagtatgctttctccgaccctatattcgagctttggttcagaagggagtattgctaaatgcgagaaagggcgtgagcaggaagtgatgcttcctgctcacgccaacaactaaagtttcatagacattaaaatacttcttccttgcaactcatatatagcagactctattaagaccatcttagtacttattccactcctacacaaattacctaccctatgactatcagacaacctttgcccttgggaatctatatattcagtatgtacatatacatctgcatctttcaaatctgataaagaatattccagttcaatagatgcatgcattttctccgttatcgcaagcggattaaaaggcttacaactatgtgcatgattcgctttcgtaaactcatttagtaacttagaatgagaaagactaatatgagtatttgttattactgcattttgccagttcttatttacataagtaaccataatccgtatcacatcatttctgattattccattacaagcaatcaatgctattcttgttttcctctctatatagttacgataaaacggaatcccagtaacaatagctgatacggttagagaaatgatagagattatcaaagatgctgtttccatatggtataccttttgatagtagaacaagctaacaactcattcctcgattatagttttaaagtttctccaacctacagcagtataatatgcttcataacaacctttaggtacatataacgttgcatcgttgtaaatatctgaagcaaatccacaatcaggaggagtaatcgctttgcaatgaatttccttaacattgatacagctctggtaattaaaacatctagcttgttttaaactagaacctaatatgattttttccaaagaagtacaatcttcgtatttacaaccgattattactcaatattttatagataataagtcagaaatatggttgttatttttaattgcacattctaaaaggtgaagatttaacgcttttattgattattaactcaaaaaggacatcaacttgggtcgtttcttctcttttccttgctattcgtttccgatattccacttttgttttggtctatctcatatgtactgcaaaggtattgatttttgtttgatattgctccttgcttgctccttgtcgtagattaattttcacacaggaatttttgttctctttctataggggcttgaaacaatccatttattggaaacaattaaagacggagctggtttgccccagtgctttttaagaaacagggcaattattttatctccacaaaggctcttgttcccaattatgaggaaagcctaataaacgagttcttactgatgggtatttcgataaaagctgcttgaaatctgcaacaaaagtgttgcccatagaaatggagttaagccaatacaccacatagcagagttgcggataaagtgtttgttcacggaacgagaaatccgtaatccatgtgtttggcatacgcataggcatcattggcttgacaggaaagacccgatttgacagtcttgaatgatgggcgcagcaattacgaagtacgggtctgggtacggattaaaaggctaagtgattatttccagtcatttagcctttttaattatctaatttttccccacattttccccacagctgtctatttatatatttttatatattttagaaacatatttttccgtaaagttatgtacctttgtcggcaaataaagatattctcgtcaaacaaatataaataatataaacatggaaaaaaacagaaaaaaacaaatcgtagttttgagtatagctttagtttgcattttcatcttggtattttcattgttccataaatcagcgacaaaagatagcgcaaatcctcctttaacaaatgttttgactgatagcatttctcaaattgtctcagcttgtcctggcgaaattggtgtggcggttattgttaataacagagatacggttaaggtcaataataagagtgtttatcctatgatgagtgtgtttaaggttcatcaggcattagctctttgtaatgactttgacaataaaggaatttcacttgataccttagtaaatataaatagggataaacttgacccaaagacttggagtcctatgctgaaagattattcagggccagtcatatcattgacagtgagagatttgctgcgttatactcttactcagagtgacaacaatgcaagcaaccttatgtttaaggatatggttaatgtcgctcaaacagatagttttatagccacactcattcctcgttcaagttttcagatagcttatacggaagaggaaatgtcggctgaccataacaaggcttactctaactatacatctcctcttggtgctgcaatgttgatgaatcgtttgtttactgaaggtcttatcgatgatgagaaacaaagtttcattaagaatacgttaaaagaatgcaaaacaggtgtagataggatagcagctccacttcttgataaagaaggggttgttatagcgcataagacaggttcaggtaatgttaatgaaaatggtgttcttgcagctcacaatgatgttgcctatatatgtctgcctaataatatcagttataccttagcggtatttgttaaggatttcaagggaaatgaatcacaagcgtcacaatatgttgcgcatatatcagctgtagtatattctttattaatgcaaacttcagtaaaatcttaaactgcacttgctttgataattaatgataaacaatctaaaagcactctaatcgttatcggagtgcttttagattactaatcaaattgcttctattataatttgaatcctctactttttctttcttcctgttgcggcactcttgctccatatctaagcctgtgccattgctccctgaaccagtcggcaatcggcttcctgtttattgtcaggttcagcctgctttcatcgtcagggtcattttccacccttaaaatatcatcctttatatcaaagttccgcctgtgttgctcggaatagattttaccgctacatttcagggcttcttttttgactataagactttcagtcatttctttagagaatcccagcatggcacaaaacttttccatgcgcagcatttccctgaacatcggaaaccacctgaaagccttgtctatgattctggcgagccgtgacagttctttttctttcatgtcaagttcctgcctgtgcatttctctgagattgtggatttgcgtatcatgctgtttctgcatctgctgtacttggctctgcaatttttcaatattggtgttccgttttgaaacctcgtcttgcagtttttcgttggcacgttccagttctttcagttttccactcccgaaaagagaagcaactccactagttatggctgtcgctgccgtggtggctgtcttctttaacttgtcagtgcgtatttctgatttcacctgtttcagttcctgctcggcaagatttatctgttcttctttgtgccgtttggctgcatccatgcgttgcagttcagctttctgcttctcaatgataaagtcgttccgttccagatgctccttaccagtgacagcctttgactgcccgcgttccatcagcaggatgtcggatgcaagggtctgcatctgcatcatgtcatcgtcattgagctttcggctctttcctgtttcgtggttcatccagtcgaaaacgatatgggcatgatagttcggcttgaaccatctgtccccgactttgaagctttccctgtcttccgcttccggctgaccgttcagccaatgcccttcatccttgtgcaggaagatttgcagcggtgtgattccccagcgtctttgacactcctcaccgaatttacgcacgtctgccagtgtggtgtccgacctgacaagcagcactccttcacgtatgggggagcatcccgcaatcttgactattttaccgttcttgcctttgcgttcacgctccttttcctgcatggcacgtccggtcttttcctttaccatctgtctgatattgtcataatgcatccgcaaatccggactgccgaagtcgggatttatccactgttcgttatcggtggatagttcaggaacgacatagattctggactctccgatgtggcgcatgtattcggcagtcctcctgttgtgagcctcgctcgatgcgatgttgcagggcttgatatgtatgcttgattttgttgccatagatacttgttttttggtttgtactttattgtttgcttttccgctgtccgtaaacgcatggggttcttaggggtgcaacccataagcggagattgcaaagagagggtcactctttgctctgggttctcaggggagaaacgccctgagtgggtcattagggtaaaaccctaatcccctcgggagagcccacaactacgtaagcggagcgtgtagttatagtgggctatatcaatggcaagccattgtctgcaaactccagcctacggcttccgctctcctccgtcagggaggtttttcatcatcgttgccgattggagatgcaccgaccagcacaaggtctaaatcgtctatcagtttttgcaggacgggattcttctctatcatccgctggaggattctctcagcctcgaccaagtggttggctgtactcatcaccttgccctcccgtatctgaaagataatccaatcggctatgtcgatatgggcttctttttgtttcggggtggcattcctttcgatgatgtccgaaaccaccaccttacaaaagtacatgctctcggctcgctgtttccactcggcataagcatcggcatcgggaaagagaagcacggttcgccctgacagtacacggagtttctcttctctcatctgactcttaccacccgtagccagccatacataatcggggaagatagcagaaccgataacggcactcttctcggattccaccaagaccaccaccttgtcgggatgcgttttcaacaagtgttccccgaaaaggcattgggatagttgccaatcctctgccaacacacgctgctttttcaatatgctgtgtatccagttcactgccgatgtctgtcctcccttgatacggtgtccgtcttcgggattgtactgcatcacctttcccgtgcgtaccttgcccgtcctgtctatctgccaaaagataacagagccgtcacgggtagcccccaaacggtattcctccaacaaccgcttcaacacctctttcgccttgtcgccatagtaggaagtaaggagtgtgaagaggaaacggaagaaattgctacgctcgctttgcgacttctccacatagtgagggggaatatagccgatggctgtcggcttactttgctgcttcactttcttctgctctgctctttgcctgtcaaaagagaaatcattggtagttctgtgttcaggatgctcttgaaaatactctttcggagtgtagtgatacccacaaccgctttcgtggttacatctgccgaccgatggatgcaacggcacattattttcgtccacgtaatagacgaaagaatgcctgtctccgcatttggggcaggtatgccgtgttgccgttcctttatacttctgtaatgaataattgcccatagcttagtccgtttttgatggttgattgtcggctgtcccatcctgtcccattgtcccacactctaagggttgggacagtgggacacttgggacacctgcgtttttactctctttgctgcgctggatgatacggtttacggtggacttgccacaattcacctgtgaggctatctccctgacggacttgcccgattgggagagttgcagaatttggcaatccctttggcttgattcattgtcgcccaattttttcaagtgttccttttccgtggaatagcccctgaacacgaactgcaagaaagcatccaccttgtcaatctcgtaaacgattacattatccgcatcatgagagaacgtgccatagcgcactttaagctgcttcacatagcgaagccctccgtcttgggcactttttccaatggtgaacacgctgtcaaagaaattgtagagccgtttgcttccggcaaggtcgttggatgtgatgggacaatccaaagagcgtttgggcgtatgtgctaggacaaggatagagagcgcatatctctttttgagattgttcagctgaatcatcagccgtcctgcggcatcgcctttctccatggcgcaacacaggtaggtaagattgtcaatgatgaaaatcttgcagtcggtctgcacagccatctgttcaatgccgcctatgatagcttcctcaaagttggcatccaaaagctggttgcagtcaatagacacccgatagagtttgtcgggaaaggtgtagagctctccatgctcgttggtatagcggagctggaactgcttttcggacagttcaaagtccagatacagcacattgtcggttcgggcgatgcggtcggctatctgcacggcaaggatggacttgcccacgttggaatcggcaaacaagcaggagagttccccctcgtaccaaaagctgtcccacagcgcacggggcgtaggcaataacgatgcttcaagaatggtttggtttgccgtcttgatattcatcatgcctacactgtcgggcataccgttatgcgcttgggatgcttttgtgaggtcgccacgtatcaggttgatatagttcttatcctcttccatatcattcaccagttacgtgggttgggcttgcgacggtgggaagaggataaggacttgttcagttcctcgtctgacaacggtatgggattctttcgggcggtttccagccacttgtccagttcgtcacggtaaaggcaatagcgtttgccgggcttggtggcagggattgtcccttctgacagtttcatgtagagcgtacccttagggatacctaaatactctgctgcctcgtccacagacatgggcacgtgggtgtccaccgttttggcattgttcacactgcgctgctcggcgagcaggcttttcaggctcatcacttcgtctcgaagctgagcgacaacctcggggaggtcgttgaaggtaagaattgatttttccattcgcgtactcgtctcttttgtaagacttggcgcaaaggactgaaatgatatatccgtgaatatctccacgacacgtcattgcaaaataattcccgaataattaagcccagccataaatgacgggtaaaattactcgggaaacgatgtaaaacaggcggttatgagttaccggatggttgtcgttggtgtcgtgattatcctaattccgcacataatcctcgggatagtggaaatcaagtttgccgttttcgggttcatcaatgggaatttccgtctttaacggctctaccttgaaattcttgatggttgataagtctgtatcagcaaacgatttcgggaaaagggctttgatgaacttggcacggttatccccattgtagtatctcttgtacaggaaacgctcagagatattccatacgaagtgacggagtggaatgttgttgatgtctttggtaaacggtctttgtatgggcttcggggtataagtgttaagattcatccatttgtccacctcagtacagatgtggttcacggtttcttggtcggcaatgcgaggcaggtaataatggcaatactccatgaccatgcggatgcgctcttccttttcccgttgctctctgcttgcgtaattggcacggttcttttcgtgaagatccggggcgatagtaagctctatcggttgtgtttggataagtgtctcttcttttgtcggggatgattcgggtacaggctcagggactgatgtaggtccaggcacagatgtggcttcttcaagtgtattttgtgacagttcttcctgcacctctatggcttcggcaatcgtttctttcttgccgaacttgattttgtagatttcgtatgtatcaaagataagtgtctgaaaggagagatagagcaaccatcccaacaggttacagcatacgaatactatccacctgacaaagttgtcttggttgaagctgtccgctattaccagcgtggcaatggaagatattaggacgatggcgaagccgacaaagcccaagatgatgtatttgtccttgattgatgattccatatttcgttgagagattgaatgttcctgtattattttgtgcaaagttaatgctatttttcccaattactgcccgttatttgcggttagaacggtctttttcaatgtatttcacgaaatgtcatcatatcatactctgtttcatactctgaggggcttataaatggtggcatcaagccaaaaacatagaggggcgattatagccttgtagccataaccgcccctctgaatacctgtcaatgtgagacatttatgcctccttgcgtttcaaggttatcttgtccaccacctgacacatctgctgcgctgctatcttggaatagatttgtgtggtggtaatgttcttatgtccgagataggcttggatgacagccatgtccgttcccatttccacgtgcaggcttccgaagctgtggcgggtacagtgaaaggtgattttcttggttatccctgctgccgtgagccaccgttggagtggtccttgcagcatcttgtccttgaaatcctcaaagataagtccctcgccccgttctcccagcagtccataggcttcatcactgatggggttatgcactatttctttggttttctgcatacgggtggtaacgaacatcctgccgttggtgtatggttgtatctgctgccacgtgagctgtctgatgtcgctctttctcagtcccgtaagacaggcgaaaagaaaagcttttttcaagacctcctcctcacagggtgtttcggcaagccgtatcagttcctcttggctcaaatgctccctgatggtgggaatgcactcgatgcggtctaagaagccgtttgggttctcctttatcttcctgtcacggtaagcggtgtgcagcacggcacggaaagttgaccaatagcctgctgcggagttgatgtgcagcttttggttggtgtggatggattggggtgcatcaagcaggtattccatgaacttgcggcacaaatccacatccacctcctcaaaggtgcatttgccgttcacgaaccgctggaaatgcttgtatacgtgctgccacttgatattcttgcggtcagccagtcctttgaaataggcaaggaaatcgcccttcatcttggtcttgtcaaaaaagccgttgttttcattgaaaatggcttcgtagcgctggttgcgcaggatgaccgctttcttcatcatgcgtgcgttgaagtcccgttcctgctggtttgcaggtttggcgaagatgtaaattcctaaggcttcacgtgtaatcactctcatggtgacattgtcacggtagccgggatagtagtcaaggcatagtgaatactgtgtcccgttcttaatcttgcgcttacgcaaggtaactgttttgcatttactcataataattatgttttaattggttgtatacattttggagttgtatccatgtttccgatggcaaaggaacaacgtgaaatatccgtgaatacctccacgatacatcattttgaaataattttcgataatcccgatttttcacggttatttgttcctttcagccatgacacgctccacatctgagcgcaaaagcaggtttttcacacccacctttatcttttcgatgtgcttcaccttgacgatatggcagatgttggctgacgaaagaccatagatttgctgcacctgctcaacggtatagtagcgttcatcgttcacaaggtcagttctgcggagttcgttcaaatgtgatttggagtaataggtacgcccgtactctcttttagtgggtatcttatggcgataggtgtaggcacggagtgcggtcggcttcatgccgaacagttcctccacctcctcggtcagtagccagtcggtaatttcgctaatatcaactgccacaccgaaaaactcgtcaatatgcttcttgctgtaatagttctttcctgcgatacggcagatggggatatggttacgcttggcggaagtgtaaagccatgactgctttaccttaaaaagggacatcacctcctcgcccgaatagaagtccaacacttcttcgctttccttttcccttttttctcttttggcaggtaaggaagatgaagatgatttccttggtgtggaggtgttgccgggcaggatgcggtgatagggattgccctccaacatctgctcgatgtcggctctgcggatgaatgccatgcggttgctgatgcgtgaggctttcagcttgccgatggctacaagtttgtaaatgtactgtcgggaacagcccatgaggatggctgctttggaaaaggtgagatactcctgatgctgtatctccatcaagggttgggcgactttgaagaggttgttcttctgcatcactctggctcgtttggcttctgcctgacaagcctcactgcaatatctttgcataccgcttcgggttacaaaggacttgccgcaaaaactgcattttctggttgctttcataccgttttatcgtttaatggttcatttcttcaatcctatatctctgaaatggtaaacggatgtgaacggaagtcaaccattgtcgcttttctacacagtgtgactgtttccgcatatcggggcggttattgtcgcttgtcgtaaacggttgtaaacccttgtcaactgtctgcacggtgtgacaaaaaacaagccccgcaaattctccacgtcagaaatacgtctcaaaaatatgtggaaatttgggaagcgacaaatggcaaccgaaaagtgttaaattttagaatatgctggtaattaaagatttacactcggatatttctgattagttttggttgttctatggttataaatacaaataggaaaatgttccattaccaatataggtaacattatcgggaatacttattatttttaaacttgaacagagaccaaaaacagagtcctcaatatatgttacagattcaggtattactatttcttttaaagatggacaattaaaaaatagacttctatataatcgaataatcccattgggcaaattgatatattccaaagacatacaacgttcaaatgtaccttctccaattatttttattgaattcggtagattcatttcctgcaaaagagagcatcctgcaaaacaccattcgccaatagcagttatattatcaaatagcttaatgtttataagtttatcacaatcttcaaaagaagcatttcctatcttaaccacagaatgaggtaacagaatttctttaagagatttacatttacggaacatacaatctccaaccacattgttttttgcaatccccacttcatatctatcatattcaggataacaaaaaatttcccctccttctacaatgttagaactagtgagatctaaatattcaagaataccatctgtttctttttcaacataatctacaccagccatttccctaataagtttgatatctgacccattaatgtcacctttaagaataagttttcttatctttaaataatcaacattcaacttttctatttctttttttaaagagccagctgtttccaactttaattctaaaatatctttctgaacctggacaatcttcaacgtatctgccatagatttatcattcttatcataatagataatttcagcttccctcttgtcataagtttcattcggggcaatcgtataataaagcgtatggctggaaacacttctcgttacagttgcggtaatccaatctacctgcggcattttcacatcaaagtcaaaattactgtttagttctactgcaatttgttctcctttatcagaaacggtatattcattcttagttagcaataaaatacctcctcctgtctgatacaccttcaagacttcctccaattcaccgcttcggaagatgatttctccttcgcgcttgtcatattcctcgctcttgctgatgtaaaacttccgcacagttctatccatgtcagtccttgtagcagattcgtgcatttgattatgtcctttgtcgcccataattatttgcccggagccagaaccttcacgtatccagctttggtattgcttaggaataacaacttcataagtaacatttgcttttacctctacctggatttctcctccgttcttatctacttcaaactttgcagtagtcagagtaatagcatctttctgtttctgcgttactacaatactcttagtcaagtcaccggctgtcaagttcaataccacattacggtcatcaactccttcatttcttgccactctaaccgatacttggttttctccagctttgcctttattagggaacaccgcacaccaactgacatcaccgcctgactgtgaaacatctatcgaccaatctttattggttgtaaaagaaagaatcgcttcgccactatccgaagtgaaatccaagcttttagtaaagtaaatctcactatcagggttagggataatctctgccggagcatcatcatccgaacaactgctcaaagcggtcaacaggcacaagactgccattgagtacaacaaacgcacatagatggaacttttagaattcactttaaatagaatcataaccagatagtattagtcctcgcgttcctccgagaatataaaaaaagacagcgtggaactgcgtgctattcatcgtctttgaaggtcctaggaaaacccgatacacaaatgaacaaacagcagacccacgccgaaaccagcgtaggaatcgtctgtaccattcttgtgtatcttgaaaatttcctaggttctcaaagacaagaatgaagcacaacgcttcttacaatatcatttcacaaaacattgaagctaaggacacttccttgcttcgatggcaaatttaacgataaagaatgaaaacaagaaaaagattggaaagtatttttaaggctgatacctacagaagataaatatgattttgtcattctgacactttgtattttctatcgcacgagaatcccgtatttccgaccgattatccacacagaaagaaatacgagagcgaaaatccataagtgtcaagttataagcattataccaaaacgaacgtccttccaataaatcgaaatcacacctccgaaagccctgatacaccgaaaatgcaaaagcaaaagaacgttttactaaaacagagtaaccgttttactaaaacgcaataccccttttagtaaaaagcaatcacccttttagcttaaaggtgtagccaatttctgcataaaagccctacaaaagcggaagaatatgcaagaagaacgcatctttatgaccccaatatccacaatatatcctaaattcgtccttctgcccaaccatgtgcggcagagaaatctacagaaacattactttttgtcaaaaatataaggatattactgcctttcagcaccttttataacaacccatgcagttcccacgcccacacatgccgtattccttcattggatggcagacagaaatcatcaagcgaaacaaccagtttctcataattatcttgtatcgactccaacgaagcatactcacgacgcatcgtctgctcgtcaaccaacatataagtggattgcagataaaccgtgcggtcgcctttccgtgccacgaaatccacttccttctctttggcacatccggtatagacatcatagcctgccctgagtaactccagatagacaagattctccagtttataacccacaccataggctgttccgggatagaggaaattcttaaaggcaaggtcgttgatgtaatatttcgccgtaccggacagtatttcctttccgcgcaagtcaaagcgttcacaacgatacgccaagaacgagtcttcgatatagcctatgtaggcagccacagcatcatagctcgtcttccggccctggctcttgaaatagttcacgatgttgccgatggacactaaattagaggcattgcctacaagaaacgcaaaaaggtcctcaagcagtcgggggtcacgtatgctgtagcgttggatgatgtccttcagcaagatggtgtccttcaaggcagacaagtaattgcgctgcacctcctgcttttcgggcaagacaaaaagttccgggattccgcccgtattcatatagcccatatagctctcacggttctgttccagatgccttatctctgtatactcctgatagctgaagggatatatcggaaattggacgtatcgcccggaaagcagcgtggcaagctcaccggacagcatccgtgagttggagccactgataaagagctcgtactcctcggtatagtcctgcgaataagaattgaccgacttttcccattcttcgatgagctgcacttcgtcgatgaaaatatatatccttccctgagggtgcagttcgcttttataaagcgccaccaactcttccaaatccttgtgaatcttcaagaaagcaaagtcgctcagttcccggttgatgaacaaggtgttctgcggagggacaccgtttcttatcagttcccttgctatctgtctcaacacataactttttccggtacgccgctgaccgataagcacctttacaagacgattacctacgtagtccatgattctgccggtataagctacccgcatgaaaccgaagtcaaaatctccttctgtccagagattgtacttcctaagtatatccattctttcgtccataacctaaactttagttgcaaagataacaattttcggttataaacggacatttccatcaattctttcgtccataacctaaaaagtttgcaaaaaaggcaagaatttcgattataaacgaaagattcatttagacaagcaaggaggatacttcctttccgcatccccctttatcggccggatattccctctatagaatcatcattattgcatctatacttccaccgcgctgcatctatacttccaccgtgctgcatctatagatgcagcaaatcccttaacctatcctaataatgctgcttattgtcacctatttagaagcgaaatcattatatttgcgcccatatatgccaatacgttgactaagcgatggcaaaacagcttgtaaaaaacaaaactgaataataacgaatttcatccgaatgaaacagtacaaaaccgtaaacaaccttgtaggctggattaccttcctcattgcagcgacggtctactgcatgaccatcgaacctactgcaagcttttgggactgcccggagttcatcaccaccggctataagctggaagtaggacacccgcccggcgcaccgttcttcatgctggtagccaacctattctcacaatttgcttccgatgcctccaccgttgccaagatggtgaactacatgagcgcgctgatgagcggcgcatgtatcctgttccttttctggagcatcacgcacctggtacgcaaacttgtggtgacagacgaaaacaatatcacacgcggacagatggtcaccatcatgggtagcggtctggtgggcgcacttgcctacacgttcagcgataccttctggttcagcgctgtggaaggcgaggtgtatgccttctcctcactgttcactgccgtcgtattctggctcatactgaaatgggaggacgttgccaacgagcctcacagtgaccgctggctgattcttatcgcctacctgaccggtctgagtatcggcgtgcacttgctgaacctgctctgcctgcccgccatcgtactggtgtattactacaagaaggtgcccaatgccaacgcaaaaggttccctgctggcattgctcgcttcgggcatactggtagcagccgtactctacggcatcgtgccgggtatcgtgaaagtgggcggctggttcgaactgctcttcgtcaacacgctgggcatgtccttcaacacgggtgtcatcgtatatatcatcctgttggcagcctgcctcatctggggtatctacgaaagctataccgaacgcaacaaggcacgtatggcactctcgttcatactcactatcgccatgctgggtatcccgttctacggacacggtaccagctcggtagttatcggtgtcattgtcattgccgcattgtggctctacctccgtccgaagacgcaggcagccgtcaaagagaaattccgcgtatcggcacgcacgctgaacacctcgctgctctgcaccatgatgattgtcatcggatattcctcgtatgcacttatcgtcatccgctccaccgccaacacgccgatggaccagaactctccggaggacatcttcacactgggcgaatacctgggacgcgagcagtatggcacacgcccgttgttctatggccctgccttctcctcgcaagtggcgctggacgtgaaagacggttactgcgaaccgcgcatcaagtacaacggcacgaagttcatccgcaaggagaaagctacacccgacgaaaaggattcgtacatcgaaatccccggacgcattgagtacgaatacgcccagaacatgctgttcccgcgtatgtacagcagtgcccatacacaacaataccatgcctggcaggacatcaagggttacgatgtgccctatgacaaatgcggcaacatgattatggtaaacatgcccacacagtgggaaaacatcaagttcttcttctcctaccagctcaactggatgtactggcgctacttcatgtggaacttcgccggacgccagaacgacatacaaggcagcggagaaattgaacacggcaactggattaccggtatcccgttcatcgacaactggctggtgggcgaccagagcctcttgcctcaggaactgaaagacaacaagggacacaacgtattctactgcctgcccctgctgctgggtatcatcggcctgctatggcaagcctaccgtggacagaaaggcatccagcaattctgggtggtcttcttcctcttcttcatgaccggtattgccatcgtgctctacctgaaccagactccgagccaaccgcgcgaacgtgactatgcctacgccggttcgttctacgccttcgccatctggattggtatgggtgtggcaggactcgtccgtctgcttcaagactatgccaagatgaaggaactgcctgctgccgccatcgtttccgtagcctgcctctttgtccccgtgcagatggcaagccagacttgggacgaccacgaccgcagcgaccgctacatggcacgcgacttcggccagaactacctgatgtccctgcaagaaagcggcaatccgattatctataccaacggtgacaacgataccttccccctctggtacaaccaggagaccgaaggtttccgtaccgacgcccgcacctgcaacctctcgtacctgcagaccgattggtacatcgaccagatgaagcgccccgcctacgacagtccttctctccccatcacgtgggaccgaatggagtacgtagaaggcaccaacgaatacgtccccatccagcctgagtacaagaaaagcatcgaccagctctatgccgaagccgagaagcaggcactggacggtaatcccgaagcactggtcaatgtaaagaaagaattcggtgacaacccgtatgagctaaagaatatcctcaagaactgggtgcgcaacaagaatcaggacttgaaggtgattcctaccgacagcattgtcatcaaggtagacaaggaagccgtgcgccgcagcggcatgatgataccgggcgactcaatccccgactacatgcacatttcgctgaaaggcaaacgcgccctctacaagagcgagttgatgatgctcgaaatgctgagcgaggccaactgggaacgccccatctatatcgctgtcagcgtaggcagggagaaccagctgaacatggagaaccacttcgttcaggaaggtcttgcctatcgtttcactccgttcgacaccagtaagacgggcgtgacaatagactccgaaaagatgtacgacaacctgatgaacaagttcaagttcggtggcatcgacaagccgggcatctatatcgacgagaacgccatgcgcatgtgtcactctcaccgtcgcatcttctcccaactcgtgcagcagctgatgcgtgagggcaagaaagacaaggcaaaagccgccctggactatgccgaaaagatgattcccgcctacaacgtgccttacgactggcagaacggtgccgtacagatggcggaagcctactaccaactgggcgaaaccgccaaggcggacgagatgatgaaagcccttgctgacaaggctgtagagtacctgacctggtatctgagcctggacgacaaccgcttcatgatttctacccgtgaatttgaataccactgggctgtactcgatgccgaggtgaaggccatgaagaagtacaactccaagctcgccgaaatctacgagccgaaggtggaagaactgtataatatgtatgtggacagaatgaaggagtgagaataaggattagggattaaggattaaaggattagggattagcctgtgcagttcatcactaatcattaataactaatccttaacccctaatccttaatcattaacccctaatccttaatccctaatcccttaatccttaatcacgtgtttatagaacaacctcctgagttttttcgcaaactatatcccggtgcagtctggaggatggaccccaatgaaaaagccgtttatctgactttcgacgatggccctatccccgaagtaactccctgggtgctcgacctgctggataagcacaacatcaaagccaccttcttcatggtaggtgacaacatacggaagcatccggacgaattccggatggtcgttgagcgtgggcaccgcatcggtaaccacaccttcaaccatatccgtggatttgaatacacggccaagaattatctgggaaataccgaacaggcgaagattttcatggaaatgggtggggacatcaattgcaatgtggagaaggttctctaccctctcttgttccgccctccccacggccatatgttcgccaaccagtatctcacgctgaaacgaacctacaagattgtgatgtgggacctcgtgacccgcgactacagcaagaagctgcgcggtccgcaagtgcttgccaacgtgatgcgctacgcccgcaacggctccatcatcaccttccacgattccctgaaatcctggtgcaacggaaacctgcagtacgcattgccgcgcgccattgacttcctgaaggaagagggatatgaattcaaagtattataaacttgaaacagcagaaagttaccaacatctgctgtcacaataaattccacataaaataagaaggggttgtctcggcaaaaggcaaccccttacattttataggctcatgtcctgttccacaagaataaacagatgttttataattaccaagtaaatgtacatctgtattcatcccactggtcttttacaaccagttccgtaggataactgtcggaattcaatgtccatgtaaaatacatatcggacacagagtcctcgccattgtatgtataatgccctacaagcggcagatgtttcgtagccttaccaagcatacctccataataggcatatatcatctcgtccatatccacatccagtatttcatcaaacaacatcaggcagcccttattctcgataggagctgttatattatccgtcgtatagtctatggcagcactatactcccactcgtcattgctgtcgataattccgtcaccattgagatccccactagctacataacgtgtggaagtcttcaccacatctccatccttataggtgatgttcgttatttcaccatcgctttcagagcgtttcattacaaccagatggccttcagtgtcgtattccatctcccaagtaaactcatcggcatcgggagtaccagcgtggtctattgagttgcaaaattccacataaccatcgctgttgagctgcaagttcagttctgtaacatcgccctcttcatccgtcacggtgattcttgctcggtcctttgcaacatctgcctttgtagtagcgggaaagtactcaaagacggctttatccccatcctcagttgtaatgttcgtcaccagcccttcttcattgtgagaaatcgccatgcccgaaaccgacttcggaagccctcccgtaaacacttgcgaaggattgaccacagtggcggtgttttcgccaccctcaccattctcattttcgtcatcgtcactgcaagcagtgaatcccaagcacaacgccacacccaacatggaggcagccatcattttaaacattttcataagttacaaatcttgttttatccccatccctctaaggaaaatccataataacaaaagtataaggaatgccgtccgtatctcacgacaacaagactctgccattcaaacccggacagatacttttggccatttatcattcccagacaaagcttaatattttttgcaaagtaataaacttttcctttcactccttgtcactgaaaaaggtgatttttcagccacatacagaaaaaattcagcatctccaataaaaagcaaaatgaataagacgtatatttgcaacaactaagcacagattgaattccactaaaatataccgatatgagggtacgccatactaagctattatcactcctcttttctttaaccactatcctgcttcacgccggagaaataccaacagacactctgttggcacacttctacaaccgggcagccaatctcatggaagaaggacactacgatgaagcgcaacgtagcttcgacagcgcctttgccacccggaacgtaaagcactccttcatgtatcccatcttgctgaacgaacaagccacactgctggtctatgtgggaaagacagaagaagcctttgccatgaaaaaaaatgtgctcccctacctgccgcagatagatgatttggaaaagcacatcagcgtatacaacgatttgggcctcctctaccgtcagcaccaaatgaatgactctacactctactattacaataaagcactggacagtgccttgcaatatggggacgaaagctggatagcccacatctgcaacaatgtgtccatcctatacttcaatatcaggcagctggacgaagccgaaaagtataccgacatggccgccgaacatgccgccagaaccgaagacccattcgtagccttcaccacctggcaaatcagggcaaccataaaggctgaactgaacaagctggatgatgctgaaaaatccaaccgcaaagcctggaacattgcctgccacggagagggaaacgaagacctatggaagatacgctgcctgcccggcatgctgagactctttgaacgaaaagaacaacccgattccatagaccactacttgaaattggggaacaaactactacaacgggtaccatccaactccatcgctgccataggattcatacaatcgagggcagccaccgaaacaaaccgcaaaaactatgcccgcgccttgaaggacttccactggctgcgtaaccggaaaaccggtaccgagcccaaaacattatttacacaaatggcacgatgctacgatgccttgggaaaccccaaactggcctacacctatatggatagtgcccgcatgtggactgatacgctggcacagcacaatctgacgcaacaaatggcagaattcaacgtgaaatatcacacacaagaaaaggaattggagatagcccacctgcaacaagaacaactggaacaccaagccttcctgctaaaagcctccattgctgtagcccttctgtctggtcttgctctcattactttgttgacgctccgccacaagaaacgaatggccgaaaagaagattgaactgctaaagcaagaaaacgaactgaactcggcacgccgctacattgaagggttggaagaggaatgcaaatattttgccaaggaactgcatgacggtatagccaacgacctgctggggctgcaaatgaagatagaaacttctgccggcaaagggaatgagcaggaactggcctcactcgtcagcaaactgagaaacaacgtgcggaatatctcacacgaactgatgcctcccgaattcgagcatctcagtctagaccagatactcgaccgttatgctgccaaactgaccgagaacaccggcatagaggtcagctatcatccaacggagaacaacgcatcacgccatcttcccaatgaaaccgcttatgagctgtaccgcatcgtacaagagctcaccatgaacatcgtgaaacatgcctcagccagtcatatagtcatcagtctccgtgccgacaatgaaaataaatataccctgcaaattacagacaacggtaagaatgcaaacaagcaacaaacagcaacaaacaacaatgacggcataggattgcgcaccgtaaacgaccgtatcagagccatcaacgctaccgccaatgtatgctcgtcaacagaaaacaacgttttcaccctactgcttaacataaacgaatgaaaccaaacaaagaaacatacagaatactggtaatagatgaccacccgattgttgctgaaggcatcatcgcattggcctcgcaactcgaagaagtgacgtgcaaaggagccacttgtgcaaaagacgtggaacaactgaccctcaaagagagattcgacctttgtatcattgaccttgaactaccggatatgaatggattccaactcatatcccaccttcacagccggatacccgaatgcggcattttaatctataccatgcatgaagaaccttggatcatagccaaattatccaccctaaacatcaacggagctgtttcaaaaaatgccagcaccagcgaattgagagacgccatcagtacactgaaaaacggaaccagatacttcagcaatgttttcagcgaactggacaaggaaaaacaaaacaccctaccacatgcacttcccgaattgtcgagacgtgaaaaagaagtgctcgcctatctctcgcaaggactgagcacttctgaaatatcccaattactatttctcagcatcaatacaatacagacttaccggaagcgcctgatggaaaaactggaggccaaaaacgttgcagaacttgtctacaaggggaagagcttattctgagaacatttgtcattcgtccggacagttacaaacctccaacttctcaatcttctccgtctgaaaaggaagaaaatcaacttagcggatactcaccgtcatcggattgcgcaccttctgtgcaaaatcagccatgtatcggttccaggcttcagcagtcttgatgtccgcgcggtcccaggcaaagccccagtaatacacgtagtcagcgcccggctcatagtcgctgacaaccagtacatgaccgtccgcattgttacgtatcttcttctcctctatggggaaaagcacggttttggcttccttcacaacggcagggaaagcggcccccataaatatcttgccattatccggtccggtagtggggtctacatacgtcatatagccaccggcggcatcagccaccacagcaccgtccggttcgtgcagcacaataccggtaacaatgggcaaagattcctttagattgctatacgaaacggcagtacggttcagatgagaaccggcatccagcgtaatcagacgtgtttccaccaccgcagtatcccctttcacagccaacggattgaactccagcttcacggtgaagcgcaacggaccgttgtccagcacctcctgcgtcttgtagcaccacggatagataatggtatcattcaccatcaatgcagacactccggctcccaatgttggacctactgcatagcagtccatgccataaccgtggtctatatgataggagaatgtgcgtaccagctcatcggctgccttcgggtctgtcttgcgcaattcattaacctgcttccaggagtctgcatccagttccttggcatacatgtcttccagtaccggtgcagcagtgcctcgcttcgtaaacaagtcgtagccgaaaccgcgttcaccccttgcctgcaatgcaggaccgtaggcacggaagcctaccaagtcgttctcccaggccatgtcgtccagacgttcgggatactgccgcccacaagcccttacctccacatcgacgggagtaccggcctggacggtatatgcagccgatgcattggcagctaccgtcgcagggaagattaatttgtcatcgtaggtcacttggtaaggcacctgctccccttcgacattcagaaccacaatctgtgcggtgtctgccagattcagaaggtttgagatttcggtcatggacacctctaccatctcatcggaacggtccatcgctaacggattggttaccgtaacagtcactatcttgctatcgttgcaagcaagacagcagagggccgccatacataataaaagaaagtttctcatataatcattgctttttcctaatcagttgtataactttcttttaggcgcggatttcgcggattatacggattttccttatcctttccgcgaaatccgcgtaatccgcgcccaaaagaaaaaggtgacaagtgacattatcctgccactttatcaccttctcaattatccttaaatttatttcggttgctttccgatataagccaagatacctccgtctacatagaggatgtgaccgtttaccgcattagaggcttccgatgccaggaacactgccggaccggtaagttcttccggagccagccagcggcctgccggagtcttggcgcagatgaacgagtcgaacgggtgacggctaccgtcggcctgcttttcacgcagcggagcagtctgcggggtagcgatgtaacccggaccgataccgttacattggatgttatattcaccatattcagagcagatgttgcgagtcagcatcttcaagccacccttggcagcggcataggccgacacagtctcacgacccagttcggacatcatagagcagatattgataattttaccgtggcccttcttcatcatggcaggcagaacagcctttgatacgatgaacggagcattgaggtcgatatcgattacacgacggaagtcagcagcctccatctcgtgcataggaacacggcggatgatgccggcattgtttacgaggatatcaacagagcctacttccttttcaatctgggctaccatggcctgaacagcaggttcgtctgtcacatcacatacataaccgcgtgccttgatacccttttcagtataggcagccaagcctttgtctaccaactcctggttgatatcgttgaaacagatagttgctccttgctctgcaaaagctgaagcgatagcaaaaccgataccataagaagcacctgtaacaagggctactttaccttccaaagaaaaattcaaatacggattcataacgttaaattattaagtttaaataagtgatattctatttatgtacgatttgcaagtagtttatactcaatggaaactttattttgggagaatgccttccctataaggaaatcgcagcgaatgcttttcgtatcgtagcttttcacatcatcgggatgctcagcatagcgaatttcatagttcgttttcatgattgcactacatttaataggttataacttcagccatcaaatacacatcgtttgcgtacacgatgcaaatgtaacaaaagaaaatggagaaaccgtataaatttgtgtcaattatatagcaatatcgttcaaagattcgtaaaaagaaaaaatctatacctatagtgccaacaagagggggaaagaataacaaaaaaacccactaaaacttgcgattttagtgggtttttagctgcaattagctgtatcgtagttggactaccaggattcgaacctggacaaacagaaccaaaacctgttgtgctaccattacaccatagtccaaacatagggctttctgttaaaaagcggtgcaaagataaaaggaagccccgaaatatccaaatatttcggggctatttttactgccgaagcatcatttccttaattacttctctttaggctaccgttatttggcgataatcagatagtaattcttcttgccgcgctgtaccagcaggtatttttcgtccagcaggtcggctgtcgtaatcacctggtcgaaagcagccagtttctccttattcagagaaacgccaccgccttgcaccagcttacgcatctcgcccttggaagcgaatacagcagcattatccacgaacaaatccaccgccttcacaccggcagccagtgcatcacgggatatttcgaactggggaacaccctcgaacacagccagcagcgtatcttcgtccaacttcttcagtgcatcggaagttgcattgccaaacaagatgttggatgcatccacagcagcgttatagtcctcttcggaatgaaccatgatagtcacttccttggccaggcacttctgaaggacgcgcaaatggggagcagcctcgtgctcggccgtcagagcgtcaatctcctccttggacagtgcagtgaatatctttatgtagcgtttggcatcctcgtcgctcacgttcagccagaactggtagaacttatatggagaagtgtagcgcgggtcgagccagatgtttccggactctgtcttgccgaacttgccaccgtcggccttcgtaatcagcgggctggtcagtgcaaatacctccccaccgttcgtacggcgaatcagttcggcaccagtggtgatgttaccccactggtcgctgccacccatctggagcttgcagcctttggtttcatacagatgaaggaagtcgtacccctgcaacagctggtaggtgaattccgtgaaggaaagaccgtcacgtgcctcaccgttcagacgcttctttacagaatctttcgccatcatatagttcacggtgatgtgcttacccacttcacgggcaaaatcgaggaaagtgaagttcttcatccaatcgtagttgttcaccaactcggcacggttgggggcatccgaatcaaaatccaggaacttggagagctgggccttcataccggccaggttgcgctgcaacgtctcttccgtaagcagattgcgttcggcagactttccggaagggtcaccaatcatacccgtagcaccgccaatcagtgccaacggcttgtgtccgcaacgctggaagtgacgcaaaatcatcacactgcaaaggtgcccgatgtgcaaagagtccgcagtagggtcgaaaccaatgtatgcagtcacttgttccttagccagaagttcttccgtacccggcatcatatcgtggagcatgccacgccatcttaattcttctacaaaattcatcgaatgattaagttatctgattaattatttaagtgattatctatgaattgtttgattcctattttaatctgcgcaaaaatacgactctttattcgaagaaacaactcttagggtttaaaaaagactttgcagacatttctccggagtgtttctccaagctcctcgggagagatgccgcgcacttcggcagcgcgtgcatacaattccccgatggaaacttcgctttcatccgtttcgatgaacagccggtcggcaggtacccggcacaaggctgcttcctggtatttctccccgaatgaaaggtaaaagccatgtttcagatattcctccaccagcgccgccttgccacggaaaccatgtattatccacggattcgacgggcgcaagtcccgcttcaccttcagcagttcatcaaccgccttcaccagatgaatcaccagcggctttcccacttcctctgccaaacatgcctggcacctgaacacttccacctgcaaatccatcggagcatctgccagcttgtccagcccggcttcgcccacggcaagtacttggggatggcgcactaactcctccaggccgcacaccctgctagccacagcaccttcggctcctgagtgttcacctccactccgacctatatgccagggatgtatccccaccgaataccatccgccgctctgtggagagaacgtttcgggatagcaatttgcaatggcagttccgggtacttgcggaagccggtgtgtatgtatgtcaactggaatattcatggaacgggatcatatccggaacctccccagggatggcagcgcagaatgcgcctgactgccagacaaaaccccttgaaaggtccgtgtttcttgatggcctccaccgcatattgcgaacaagtgggggtaaaacggcatgaaggccctatcatgggcgatatgcacttctgatagaaatagatgggaagcagcagcagatatgaaagcagacgcttcatgacacctgcggagtttgctcggtttcagcatttgccgctaccttctcggcaatgcgtgccaaagctgtcttcatacggtcctcgatgacagaagagtctaccaactggtccgaaagatagatgaaggccacggccagacggcactttttttccgtcaacactgccagcagtccgtgtttgttcatgcggtaggtttcacgtatctggcgtttcacgcggttgcgcttcaccgcccgcttgaaacggcgtttcgagacacttacaagaatggaaacgggtgcctccagctcctccaccggcagatacaccacacgcaaagggaaaaccgaaaacgaacgtgagccgcccgcaaacatcttctctatcactttcttcttgtccaaccgttcggacttacgcaaggtatttggcatggggtgatgagttataagttatgagtgatgagttatgagtgataagttatggggcgatacaaaaacgagctacaagtacctggcgacataaaagcacaaccacttgtagctcaattttataaatccattgttatgcctacaagctataagcaaatcactcataacttataactcataactctttttactttcctttattattttccttgataaacatgtcaagcgccgccgtcattgagggtgcctgcacgctgggagcttccaggtcaagacgaagcccggcatcacggactgcctgggcagtggtagagccgaatgttccgatcttgatttccttctggtcaaaatcagggaaattcttcttcaaggcactgatgcctgccggactgaagaacaccagcatgtcataatcaaaagcctcatctgcagcaaagtcattgctgacagtacggtacatgacagcttccgtgtgctgaatcttattcttatccagcagattcttcacgtcatcattgtgtacatccgacattggtaccaagtacttttcagtcttatgcttaacaatggaaggtatcaaatcgtcaatcttcccggtgtttccgaagaaaatcttacgcttacgatactgcacatacttttggatatacagagcaacggcctccgtcacgcagaaatacttcattgtttcgggaattgtcacacgcaattctgtacacaagtggaagaaatgatcaatagcatgacgcgaagtaaaaataacggcagtatgatccaataccgaaattttctgttgtctgaactctttcgctgaaaggctctccactttgataaatgggcgaaaatctattttcacaccatacttctcggcgatgtcgtagtaaggagatttctctgatgccggttccggctgcgacacaagtactttcttaattttcaacgtcctaaaattttattatcaaataactgtttagctgcatcacaccttgatataacacaaaacaaggcatgatttcaagggcacaaaagtacacaattaaaagcaaaccgccatataaattgttacaaaaaagctttaaccacttgtataacatcaatattttagcaaaaaaggctaaaatcaatcctattattatcgtcagctgcaaactcaaatcaaaatagactatgaacagagcaaacgggaaaagggcgaatcccaagtaataaagtagcgtagaataggactcaagccatagtgttgtaacactttcgtcaaaaaaaatccaacccagaaaagagtagagcatccacttcaagcacaaatagaggagacacacaccgatgtaaatccccagcagaaatcccggcggcacatggtgtaccaattccggctgtatatcattgaagtagctgaagatacagacacccacaaggatgcaggtttgcaggatgagcaacagcagatagcgcatatcggcggctgtggaagtggcaaatatgctggtacgttcgcgatgaagcaggaaatccttcaccagctgcagcaggaacttgcggctgcgtgacaaaacataggccgacagaaagaaacagcacaaaagaaccacggtgatgccatcgtccattctcggagaatatgggataggaatcccctccgtccccactactgcacaagccatcaacagtcctatcatattgcagcgaatttacggatggaggcgtcccacaagggagtggtatgtatcagttccacggcttcctgcggcgtctgagccacatgccagatggcaccgtgctgcacgcgcatgaagttttcgtccactgcctgccggagcatatcgagcagagggtcgaaatagttcttgacattcagtatcacaatcgggttcagatacagtccgagttgcttccaagtgatgatttccagcagttcttccagggtgccgcaaccaccgggcagggcgatgacggcatcgctcaggtcggccattgtctttttccgctggtgcatgctttccacttccacgagttgggtaagtccggtgtgatgccatccctgctccaccatgaagtggggaatgacgcccgtcacctctccccctgcccggagtgccgcatcggacacagcggacatcagtcccatatttcccgcaccattaatcaggcgaatttgccgctgccccagcaaagcgcccagctcacgggctgcatcgaaataaacggaatctatctttgtgctcgaagcacaatatacgcatacggaatttatcttgttcatcatcttgccacacccttttttaggtatcgccacaaaggtacatgatttcggggagatttgaaacaagagagtcttatttccaaagttcttccggatttgtggtgcggacgctgttctcgaacagccattgggtgccaccgctccgaacggtaaatccgacgggaataggtgcaagtctccggtcacccggcaaggggtcgcctgtttcatcgtccatgcggctcagttcatgcatgctgtaccaatagttatttttggccatatacgtgtcatagtattgcccttcatttgcttttctgtttatagccttacacagaccgttcgataggaaaaaatacgaaaaagctcttccttctcactcatatctgtcaattttccataaatttgcaatggacctaaaacatcatgatgtgaaatacaaacgttggatttacttaaccgtcactttcgtcatcatattggcaggacttgcttcccggaaatatggcaatgcattgcctaaatttattgcagagtatattggcgatacactttgggcagctatggtctattggggattacgctttctcttcccttcggcatccatactcaaagtggccgcaatctccttactgttttcttattgcatagaaatcagccaattataccaggtcgattgggcgaatgccatacgaaacaccacgctcggagcattggtcttcgggcatggatttttatggtcggatatgatatgttatactgtcggggtaatgttatctgccaccgtagattcttgcgcttccttttcttcttcggatgaagcagtataaaaacaagacgcggacaaaggaacacagattctatgcaagccgctattatccccgccaaaagcattcgtaggacacatttcacgaggctacaccttttactccggatggctacaccctttctatgcgatggtatagccatctgcaaaaaagggtgtagcccggcacggaggatagttacaacattagaaatggtatgactgttatatgacaaaaaaatatcctaacatgcaagatatgggatatctgatgttaggataacgataaaaatagtcaattcatatcaaggcaagacggcctaattatcaatacaaaagagactgcgtttgtttatgataaactgcatttttcttttgaagatttacggctattgacaagagaagctactaaataaaagatattaatgattacatagcatagaaaaaacttccacactttaatcgtttcttttagccactcctcaacccataagatatcaatcttatccccacatcgattttcaatctcatatttataactaatttcacaattaataattgcgtatataattaataatgaaagaattattgatgtggcaacaaacacaattctaagccatttcataatctatcttgttttataaactacacctcctggtttggatattctcactaaatgattctgcattgatattggaagaacaaatctgttgacaataggaatagtagtccatgttcccaaattacttgtttgttgtagccttgtccctttcagagcatttgacccacttttattcaacacgtcagataccattgttgtacaattattacttgtcagcttatattcatcaataatacgagcagaagaactgttataataatcacttttaggattatctggcattgtagttgacatattaattaaacttttcgtctaaaatattagcaactttttcatctgccacatctgttactacaaatacagacattccaccagctgctttttttgtcattgtaagcttttgcttcatcccccattaactttaaaagaacaccggaaccatttcctaaagaattagagcttctatctggccctttattagttccattgtatcgtccgtagctataaacagtcatattagatccttcaccaacactaatccatgtgtgaccaaaggactgagtttcagtgcaaattctaatactatctccattcacatcaatattaacaaccggactattcgccccgtactgatacggagacatcgaataatacttctcggcaaatctgtcattagtcgtaaaccttcctaacgccgtatcataatgtctcgccccataatcataccaattcaaacccttcttcgtatcaaactccttgccgttatacttgtaaggctgggtattgcctgcagtggcaaatacaccaccgaaagggtagtaatggttagtttcctccacagtgccagactggttgatcactacacggttgttaccctgatggtccttcagatagtaatgatactgctgggtaccggccaggttgatgtaaccctcttctgtgagtaacaacttctgagtaccgttttcatagatcacattaccgcaatagtcagtcgttgtggttgtactgcctatcttatggactgttctcagtttcgtgccgtcagcaccataagtataggtaatcgtgctaccatcactgaacgataccgtactgggcaaatttaatacattatattgaatatcggcaattcccttattcaaatctttcgttaaattaccattgacatcgtaggcatactcccctgcggcgcttgcaccgttcacaaaggcagtgtttgtaccgtatgcagcggtactcaccgcatcctccacacagctcaactgattaccggtcaatgtgtaagtcaggttatcaagcaggccgtaggcactggcaccagtctggccataacgttgcaaactcttgatgttaccgttcttgtcataacccgtaacgttctctgagaagcgattcgcatttgtgctgatacttgctgtctcgccataggtagcgttcagcatccggtcaagaccgtcataagtgaatttgtaaccacggactgtactttcgttcccggacttccaggtcatgctgctgatgctgccgttgtacttcgcagtacccacacccgtgttgtagtacaggttctgcgtgaagcgtgtgccgctgattcccgtcagccagctacgcaggttgtaggtataagtcagcttgttggtgctcgtaccgtgatactgcttggtcagtaaacgaccgaagttgtcataagtcgcatcgtacagagtaatcgcagtactgccaagactatgctgcactttgcttattctgtccgcatggtcgtaggtataggtatatacttccgtgcgcgtggtctttccgctggcagtatgtgtatgtgtcacaccagacggcttgttggagaaagtataaaccgtacttgtgatgtcgtaaccactgagcaagttgttctgcacaagcacggtaggactggaagaaggattcccccctgcagggtcagccgtcccagactgtcgtacaaataatacatataggaaatgttatccagataggaagtgcccgtgctgttaagcatccggagagtacggatgtagtcctgcatgacctacatcatttgatagacctaaaaaactatcctaacatacaagatatagcatatctgatgttaggatagtaattaaataaatctcattgaaaaaaggcaacttatattagagtaatattttttatttagtatgcaaaagctttataatctcaccattactttttcttatttccacataagattgtccacagaaagtcagcgcactatcatttccattaggaatatgcccttctattacccatattccatttaccaagttaacagaaaaaggtttttctttctctatactttcctttccataaatttccaatagtacgcattccgctatctttactgcaatatccgctgtaggtataaatccctctgcaggaacatagcttttcatatcagtataaaaatctgttgagagactatcattcattacatactcaatctgttgagatgattgttgatcttctccgaccttcgatgtactgtttgtacatgacatcgcaaatagcattaaagcaaaaaaataagtcctatacatattgctatctttttaaaatacccaatgaatatgttctctctggctaacaggaatgtttaaatctggcttttgtagcaattctttcattctttgtttacccttttcagcaggaatatctttcggattaatattattctttcgtttaggatctttgggatcactaggaagatcactagtcactattgatgttttcttactataaggattatattctaacaaatcgccactcggcgtagccaaataaccattttcttttgttttctcaatatattttatatcagcttttgagaatttattatttatatgctctgcgtccgcgtctccatgcgaatgaatcgatcctacaaatctctcaccgttaggaggtaagcttatagatacgctgtgctctccttcattggctgcactataagaatatccctttagctttcccttttgcttaacttcataaatagaagagcccatttcacgtttacgtataatagatgcaccattataatacataccccaatctttagctgctgctcttttagtcttaaacagatcaccaggagcatattccataccatttgggtctatgaactttaccggattatcggcacaataagtatacggactcatcgaataatatttctctgccaacgggtcattcgtcgtaaaccttcccaacgcagcatcataatgtctcgccccataatcataccagttcaaaccctgcttcgtatcaagctccttaccgttatacttgtaaggctgggtattgcctgtagtgccaaacacaccaccgaaagggtagtaatggttcgtttcctccacagtaccagactggttgatcactacacggttgttaccctgatgatctttcaagtagtaatgatactgctgggtaccggtcaggttgatgtaaccctcttctgtgagtaacaacttctgagtaccgttttcatagatcacattaccgcaatagtcagtcgttgtggttgtactacctatcttatggactgttctcagtttcgtgccgtcagcaccataagtataggtaatcgtgctaccatcactgaacgataccgtactcggcaaatttaatacattatattgaatatcggtaattcccttattcaaatctttcgttaaattaccattgacatcgtaggcatactcccctgcagcgcttgcaccgttcacaaaggcagtgtttgtaccgtatgccgcggtactcacggcatcctccacacggctcaactgattgccgttcagggtgaaagtcagattatcaagcaggccgtaggcactggcaccagtctggccataacgctgcaatcccttgatattgccgttcttgtcataccccgtaacgttctccgaaaagcggttggcgttcgtgctgatgcctgctgtctcgccataagtagcattcagcagacggtccagtccgtcataagtggacttgtagccgcggacggtgcttgccgttcctgccttccacgtcatgctgctgatgctgccgttatacttggcaggcccgttgccggtgttataatacagattctgcgtgaacttcgttccgctgatgcccgtcagccagccgcgtacattataggcgtaagcctgcctgtccgcgtcggagccgtgcagcgacttcgattgcagacgaccaaggttatcataagcataggcagcaagcgtcaccttcgcccctcccaatgtatgctccaccttggagagcctgtctgcatggtcatagctgtaagtgtatgcttccgtccggctgtccttcccgcttgccgtgtgcgtatgcgtcaccgtggcaggcttgtccgtaaaggtatagaccgtggatgtcacgtcgtaccggtaacggaaagcgtaccgctccaagtcagcatgctcctatatgaaattccctgcttacatccaacataagcagggaattgtttagattatagaatcagagattcttaatatatcaatattcgagccaaaaataatcaggtgtacgtaaagtatcccacaacaaaataccaccgttggagctacatgaaattacaatattgggaatattatcaatccggtatcggaacgtactatctatgaccctttttccacaatataataccgtatccagagatgtgacacgtatctttatttttaaactatcatatccgcttttatcgaaacgggtgatttccattccaagccaatcttcatggtagtccaatatttggtcatccgtcttgttcacatacagtccattaaaaacaaggctgtcattcacccaacattggatataatctttaccggtacgctccttaaaaccagtacctactcgaatcatgaaatcattctctgagtccaaatgaccaatgcacgccaccagcatggcaagtatgattataaaaataaatatacgtgtcttcatattactgccttcttttaagtttttgcctccagttaggaatatgcctattcaacttgttatggatataattatctcggactgtttgtatctgagaacggtttaactgagttgctttaagataatctccatcaaaatcttgaataacttttttctgtgtcatcaagttttccacattcattgtatgccccaatcctcctgaatgaccaagttcgtgagcaaaagtccggttatcatcattgttcaacatattagaaaccgctttcgttcctattttcacatccagactatttttataagtctcagccataactacacttttatccgtttttgtcaacatatcttgatcaacaatctgcaaaacgtgttcagtgtcctttatatcatccaccgagttgacagttctcaattgcatatccatagtcgaaacaaagtcatcacctgaaatcgtatatgcggcattcacttgctctactatttgtccagccaaagtctttatatcaagctccttattattagaattatttatcaaagccgctcttaccgtaattttatattctatcttatccgtttcacgattataatgggtttgcacgcgccaatcatttccatccggatcaatgcgaccgacaggctcatttccacaatagacataaggagatactttaaaatgtttgtcatataaagcatcaaccgttataaaccttcccaacaccgcatcataatgcctcgccccataatcataccaattcaaacccttcttcgtatcaagctccttaccgttgtacttgtaaggctgaacattgcctgcacttgcaaataccccgccgaaaggatagtaatggctcgtctcttctaccgtgccgctctggctgatgactacccggttattcccctgatggtctttcaagtagtagtgatacttgctgtcgctcaaagtaatataaccctcttcggtaagaagcagcttctggactccgttttcatagatcacattgccgcaatagtcagtcgttgtggttgtactgcctatcttatggactgttctcagctttgtgccgtcggctccataagtataggtgatggtacttccgtcactgaacgttactgcattcggcaaatttaagaaattatatgtaatgccgctaatacctttgtttaaatctttagttaaattgccgttggcatcataagagtactcatcggcggcattggcaccgtttttgaactcgaagccgccattgtaggtggaagccgctaccgcatcatccacgcggttcaactgattgccgttcaaggtgagagtcaggttgtctatcatgccgtaggcggttgaagagagttgcccgtaacgctgcaatcccttgatgttaccgtttttgtcgtagcccgtcacgttctcactgaaacggttcgcgttcgtgctgatacctgctgtttcgccataggtggcattcagcatccggtccagtccgtcgtaggtgaacttgtagccgcggacggtgctttcattcccggacttccaggtcatgctgctgatgttaccgttgtagcgggcggtacccacacccgtattgtagtacaggttctgggtgaagcgcgtacttgtgatgcccgtcagccagctgcggaggttataggcatacgtcagcttgttcgccgcagagccgtgcagggacttggtactcagacggccgaaactatcgtacgtatagtctgccagagttattttggttcctcccaaagtatgctccaccttgctcaccctgtcagcatagtcgtagctgtaagtgtatacttcctctcttgtagtctttccggaagcgggaagtaaataaaaaactatcctaacatgcaagatatagtaatatctgatgttaggatagcaattaaatagattatttcaagaatataaaatacttatttatttaagatatacaaaactccagtttcgcaatctgtattaagataaactccatgatgaaataacaaataaatcaaatatttttcttctggatatgacaaaccaacagaaagtacacctttctcattaaaaagcaaagaaataagattttctacttttcctttataaattgaatctatgtatggctgtggagttaccatacagtccatttcctttagtgaacaaaatgtaatgctgtctatacccaatgtctgttctaataaaattggaaaaagttcatatcgatatttcttattagctaccccatcattcagaaataggtacatatctccttctcttggaactatcgaatatacactatctttgtattctatattcattgcaacaaaaggactttgccaagtagaatcaacaaacatatcttcatacctctcacttgttttatgtacacacattacaaataagagattaatacccaacataaggataatcttattccaacagtttttggggtattttccttccacgatattccgttctttttgcatctcctgttctttttctaattttattctcagtattaatagcacgaatttctctcatgggtattccatttcctatattttcataagacataatacctttatctacatccgacgaatgctgtaactcatggcttaaaccaattcttggtgtccgatgatttccattaatatccgttttaacatcagggtcataatttataatgcttccttgcggaatgtcttttttagctttttctctatcaaatcctgaagaattagactttcctcgtttagtccttgttattgaatgaacattcttacttttctccagttcaataatcatctcaccaatttccttatcatccttcttaagttgctgcaaatctgctttcacgtccttttgatacttggtatcaaatccaaaaaatattctcacattatctatcaagccattaggattaggatttacaacaattgtatctccattcacatctatgttattcaccggattattcgccccatactgatacggagacatcgaataatacttctcggcaaatctgtcattcgtcgtaaaccttcccagcgccgcatcataatgccttgccccgtagtcataccagttcaaccctttctttgagtcaagctccttaccgttgtacttgtaaggctgaacattacttgtacttgcaaacgccccgccgaagggatagtaatggttcgtctcttctaccgtaccgctctggctgatgactacccggttattcccttgatggtctttcaagtaatagtgatacttgctgtcgctcaaagtaacataaccctcttcggtaagaagcagcttctggactccgttttcatagaccacgtttccgcagtaatcggtagtggtggtagtactgcctatcttatggactgttctcagctttgtgccgtcggctccataagtgtaggtgatggtacttccgtcactgaaagtcaccacattcggcaaatttaagaaattatatgtaatgccgctaatacctttgttcaaatctttagttaaattgccgttggcatcataagagtactcatcggcagcattggcaccgtttttgaactcgaagccgccattgtaggcggaagccgtcacggcatcatccacacggttcaactgattgccgttcaaggtgagagtcaggttgtctatcatgccgtaggcggctgaagagagttgcccgtaacgctgcaatcccttgatgttaccgttcttgtcataccccgtcacgttctcactgaaacggttcgcgttcgtgctgatacctgctgtctcgccgtaggtggcattcagcatgcggtccagtccgtcgtaggtgaacttgtaaccgcggacggtgctttcattcccggacttccaggtcatgctgctgatgctgccgttgtagcgggcggtacccacacccgtattgtagtacaggttctgggtgaagcgcgtacttgtgatgcccgtcagccagctgcggaggttataggcatacgtcagcttgttcgccgcagagccgtgcagggacttggtactcagacggccgaaactatcgtacgtatagtctgccagagttattttggttcctcccaaagtatgctccaccttgcttacacggtctgcatggtcatagctataggtatagacttccgtacgtgtggacttgccgcttgcggtatggctatgcgtcaccgtggcgggctgtcccgtaaaggtatagaccgtattagtcacgtcataaccgcccaaaagattgttctgtacgactttagttacacgccccttgacgtcatagtaatagcctttgtaaattttagtactgctgccggatacagtcaccgcgcttcctgtcagggagcctttactgtagcccgaagtgtcgttcgtgaactggctcgtcgggaaacccgtaccgcccagttctgcacatgcaccacctgatcggaagaaaccgtcttgttcgtgcactccccctgttgcgtcagccgtccaccgttgtcatacacatactccgcgagctgcgcatccggaagcttcttccaagtgcagagattacggtggtcgtcatacacacaataggtatcctacgtctcgctgatagaataacaaaaactatcctaacatacaagatatggaatatctgatgttaggatagtaattagatagattggtttttaatcaacctatatcagaggaagacagtagttcgttacgacgaattaacctaaagcatcaggctctaataaatctggatgtagtattactgatttatctaatgctctaacaaaatgagatttatgggaatataatacttgatactcctcactcttctcatttgcccaaactttcaaaactacagccgcttctaagggtaaactcttcccgcagaaacagcaaacaaccatttctttatttaatattccatccataatttttcgctattctattaatagatttttgagaccaatttcccattgttgttattatacctttcctcccttctacaacagcattaaatctaccgggagtaatttcatgaagataaactgtagctccatcagcctgagtaaaagcctttcctacagactttgttactcttacttcattcacagaaagtacccctcctctcgttgccgttgttccagcaatccgttgcactccgtgagcagttgattgtattgcattttgagtacctcttcctgccacctttcctacagcccatcctattgccttccccaacaacataccgccaaactttccggcaccaaagccaaaggcagcttcgcctataggtcgcgcaatagcatctatagaacgactgttcagagaattgaaaagggcagacttagagtcttcagataaaggactggttttacctaagaactgattctgaagtttaccgcaggaagctatcaagtcaaaagcattaacagcctgattggctaagatacctccattctgatagaagttcagatagttgtcattacctaacgcaatagaggcagatgaaccgatattagtatagccttttaaggcttcactgccttcctgccaacgtaaattcccttgtttatcttcataccagtcagctcctgttgggtctattctgctgatagggctgttaccacaataagcatagagacttgttttgaagtagttttcagcagaagggtccaccgtctcaaacctccccaacgccgcatcataatgccgtgccccgtagtcataccagttcagccctttcttcgagtcatactccttgccgttgtacttgtaaggctgaacattacctgcacttgcaaatgtaccgccgaaaggatagtaatggctcgtctcttctaccgtgccgctctggctgatgactacccggttattcccctgatggtctttcaagtagtagtgatacttgctgtcgctcaaagtaatataaccctcttcggtaagaagcagcttctggactccgttttcatagatcacattgccgcaatagtcagtcgttgtggttgtactgcctatcttatggactgttctcagctttgtgccatcggctccataaatataggtgatagtacttccgtcactgaacgttactgtatttggcaaatttaaacaattatatgatataccggtaatattcttgtttaaatctttagttaaattgccgttggcatcgtaggtgtactcgttcgcctgcttcatgctgtccttgaactcgaagctgttattgtagacgaaagctgtcgcgttctcgcggaaacggttagtgtctgtaccaatgattgtagtattatcataggcggcgttaacatttgctttaaagctcattgaataaattttgccattgggccttcattactccacttggcaagttagactgctaatatttctattatagtgggtaccctataaaaagaaacagcggatgtttccacccgctgtaatagaattgttataaaaatattattcaattatttgttttttatttttaatataaaatagaataagagcataataaaaacctcagataatacacctggtaaatatagaaaccctatcattatatcaaaattaaaacgccaaaatataaagaaaatagtagaaagagagacaacaagtatcaattgcaggcaacaatataataatgtcgttttaagattaagcctcaaattcaataataataataagaagaacaaaaccgttcctaaaacaaacgttattgatcctacaaataattcaactgaaaataaatctcctaatgatatactttgactttccatatctattcaattttaacttgtctctttttaggatcataatttagtgacttaaaattatcttgatactctttaactatactattgggccttggatctataattactggtgccttatcttttacagatgggtcttgtttcaaaacatcagccgcaaaagttccacaattattattccttaatgaatactctttcctctttgaattagcattctccgctatttttgattctgcatagtttttcatttctttaaacttatcactttcaatatatgctccttctattcttccggcatgtcccgcttgttcagatattattgataaagttttattcaatgattccaatgtaggctttttatcttgtcctatttttacatttggaacagcgaatgttctgacaactcctttaccctctttgtcatatctgccatattcataatatttagtcactcctgttttattatcaatcaataatactccagcatgacctaaattcccaattttaccaataggagttgatattttataatcagggaaggcaatataaataccatccttcccgttagggtctatacaatttataggattactataacaataagtatacaaactttctgaataatacttctctgccaacggatccaccgtcataaaccgtcccaacactgcatcataatgccgtgccccgtaatcataccagttcaagcctttcttcgtgtcatattccttgctattgtacttgtaaggctgagtgcttgttgatgaagcgaatactcctccaaacagatagtaatggtttgtctcctctaccgctccgctctggtttatgactacacggttgttcccctgatggtccttcaagtaatagtaatacttgttgtcgctcaaagtaatatagccctcttcggtaatcagaagcttctgggctccgttttcatagaccacattcccgcaatagtccgttgtggtggtagcgccacctatcttatgaaccgttcttagctttgtgccgtcggctgcataaacataggtaatcgtacttccgtcgctgaacgttactgcacttggcaaatttaaacaattatattgaatatcggtgattcccttgttcaaatctttggttaaattgccgttcgcatcgtaggtgtactctccgacctgcttcacgccgtccttgaactcgaagcctccaccgtaagcagaagccatcacggcatcgtccacacggctcaactgattgccgttcaaggtaaaagtcaggttgtctatcaggccgtaggcactggcaccagtctggccgtaacgttgcaaactcttgatgttaccgttcttgtcataacccgtaacgttctccgagaagcggttcgcattcgtgctgatacttgctgtctctccataggtagcgttcagtactctgtcaagaccgtcgtaagtgaatttgtaaccacggactgtactttcgttcccggacttccaagtcatgctgctgatgctgccgttgtacttcgcagtacccacacccgtgttgtagtacaggttctgtgtgaagcatgtaccgctgatgcccgtcagccagctgcgcaggttgtaggcataagtcagcttgttggtgctcgtaccgtgatactgcttggtcagcaaacgaccgaagttgtcataagtggcatcgtacagagtgattgaagtgccgccaagactatgccgcactttgcttattctgtccgcatggtcgtaggtataggtatatacttccgtgcgcgtggtctttccgctggcagtatgtttatgtgtcacagtgttcggcttgccggtaaaagtataaacagtgttcgtcgtatcataaccctccagcaaattgccttgaaccgtttttgtgatgcgtccctcaaagtcataataattagccgaataaagttttgtactgctgccaagaacagtaatcacactaccggtgacatatcctttggcatcgattgttgccgcaggaaagccggcattatcgaaaccggtcagactacggaaggcatagtcgtcataatagtttactctatggacttcgggcgacaccaaggcgaagcttgatgtatatccactgttacccaaaccgctgttgctattcacccgtgtacatgatacaataacattcgaaactgtagccgtattcgtattggaacaaacgccctgcactgccagacgatggaacttatcatacagatagaaactccactgcttagaggcatactgcttgccatcctgggaaaagatcatattgtctgccttatcgtacacatagctcacggcagaagcacctggaagctttttccaattacaacggttacggttgtcatatttgtactggaaagcatattgatccaggtttgacacactctgatacatcggttgtaatacgaagcaaaggttatccaaatcattatacacataataagtatcatgttgctcgctaccctgcatctggcgttccagcaatatatggccttgtttgtctgtgaaagtataagaaacatgttggtcttcgtcaatacgtttcaccacgcgcaactgtccggctgcataagtaccgttgtcgacaagtgccccagacgaacttaccgaatagttaatgcaattcacatcggaagaattagccagataatccatagttacaggttttgatgcccatgccgctcccggagagtatcgcttcagaatgcggtctaatggggaaacactgtaaacaggcttgctgtagggacgggaatcacttgaatagttgcccggagccgcacttttgatagccgaaggagacatataaacagaggaggaaacaattgggagccaactctccgaacgacgtcctgcgccatcatattcttgtaacgatatcaaattacttccggcaggagtaattcccttttgtaccttctggaagagacgccccaagccgtcataataatcataacttgccatatacttgctacctgctgctgcagtcatagcatgggtgcgaacgtaattctgcgaagtgccgtcaggagaccactgatagaagtacgaggcaataggattttggttatgatcctgcacatcagataaaccacccaaagcattatagagatagaaatccttaaaaccagttgcttttcttatctccttcagcccataagaaggattgtgaagccaggttgtgacctcgcattccggaaaggacgttttcagtgcatagagggccgtcgtattgggtgaaccggcagaacacaaagcatccaaacctgttgttccgagccgagacactacttccgcataagtgatacctttgaggcgggcaatcggcaaagaatatttatagccccacaaatagaccacagacatgttgtcgggagtagtaacttccaccggattccatttactatcatacctataagaaacagttcttttctcaggatacaaactactatattcttcactggactgcaaggtgaatttagaaaagacgtccccgtacgtattattcagatacagcgtcgctcctcccgatgttcgttggtagttctgtacagcatcaagcacgttattagccttgaattcatctttgtaggaagaaacatccgctgcataagcatagctttccattacatagcccgaacggctggtacttgtgcggcaagtagctatctggttacgactgttgtaggtatacagtttttcctgcgtcaccggtacaccatgggcatattccgtcgaaacttcccgttttaaccgtatatcataggtaagatgcggatataaagttatctcaaaacgtccgtgataagccaatggatttctaaagctcaccgtctgtcctccgatgttttcattataggtgatactgccggaatagcaattaaccggacccacatagttgtcccttacacggatgttggtcaattcttgccacttgtttgcaatctcatattcataggtgtcttcccataccaagatattaccggcatcatagatactctttttcagtagtcgcccattatagttggcaggcatataagccaaggtagcatcataatcctggccggctatgttactgaatacgagttcctctctccccgcatccagaaaatcgcgctgcttgacgacacggctgtaacctacaggattggcattgggcgcagaagctggtggagtttgcgcctgagcataaaaacggcggaaagtgtggtaactggtagaagggcgtatcactccttcaggagttgtggtatagcttccgcgccggacattaaaatcatcataggacttgactgagaacatcagaatgccagaggtcttgtgattctcgctttcatacaagtaaccggtacgttccaacacttcacctgtattattctttttagtaatggtcttgattctcactcctccgccaactttctgcaatgtgtctttgtttactgcagttccaccgcctctataggtcaaagtagcagaactggcattgcgggtagaataaccttgattggtaactgcagaactcaatgtacttgtcaggacataatctcccgcttccaatgtgaacgactcgttgacatgatacacatgcccactggtattttgtgaagtcactttgtacgatttaatgacacttcctccggcaccgagtttccgcaaagtggttccggagccgatgacttgattgacttcataatcgggaaaattgacttgagcatccaccgtcactacctgcgtggtgggcagagtgaaagtagcggaaggcgtcactatcaggtcgttgttgttgacagtattgacacctttgacttgtgcgtcatacttattcaaatcctctgcagaaatgaaacgattgtctcctacaaaagtgtgaggttcaaactcaaactccacactgccgcccgtaggatatgtgattttcttcagcatattggccgtaatatactcccggctacaatttctgacagcggtagaaccggataaaggaacattcgtcaaaccttccagggagggaatcaatgtatgaacacggtttgtaagcgtggaagtattctgctgtccattgtaatatccccaatagtctatggcaaaagaagtcttataaggcaagttcacagcttcattataagtgaatgtatgcttttcaccctgcgaagtgccattttttcgaagtacagaaagcagtttcagacgtttacgaagtacgctggtgggtatggtagacgacgacccataatcgtccgatgacaagtaattaccgccgactgattgttcgggacaaatgaagtaatcataattgaactggtaagaatacacatccttcccgtccaacttactctttattttcatgtttgtcagttttccggtagttcccggatagcggtcttcacgacttcccatctcgaaaatcacttcttccgtatcggtttctatcttgcttaaatagcaagtctgtgaaatgccggcagtaaagttccgttttatatagtcattgtccggaggagtacctacggtataatactccgacataacaggcaccgaatagcaactggcggtaacataggttagagtgatagtatgtcccgtcacatccgtcatacttgtcagcatataagtcaagggagcattggaagttacaaatgcataaggcctgaaggcataagatgtgcctgcttcatctgtaatgatcactttttcagcactatgccacactttgcaattcatcctagaaccgataatgacaggagtctgacttttggggtgcaagaagtatttgaatgatcttcctccgggcaatgcaacttcaaatatatctctttcaccttgccctataaggccttcattaataattccattggtcgtattactcgtattggggtcgaacattaaatttccccacaaattcatcagttcctcggtccccgaacggtagttcaacgtatcagcactctgtactttccagtgatattttattttctcccattcagcccaagtagcaaatgtaccagaggtcgcgtctaccttgcccacagcattaaggttgacgcaccctcctgccaaaagattccaaccaagacctacccacgtagcttcttgagccaccttgactccgctcgcatgataagacaacgtaatgggtagttctatacgcccacatttaagggtatatagcggtatagagatatcaggtgttcctgtgtattcacttacaggaatgtttccatacaattgcatacctgccgcttcgggaatagcaggtacataatcatttatccgcagaagatgattattcatatctccaccgtcctgtgcacgtaccgactgcgttgtaccacataacataagaagagctaacaatacttttattctatttttcatattcaatgaaatttatatatttcttaaataagtgcgcctgaagtaggtatttcggcttccggcacacttttttagttttgtaatacttgtttttacagtggcatcgcctgcacgcccagcacactggctatggtggcaatgatggtgcccacaattttcaagatatctttccaggtttctttgcttattttcataattccatgttttaaggatgattgttttaaaattctttacttacctcgaagcacggacactgcttcacccactcccacggctccaccgtcccatctccgtccaaatcgggactgaggtcgcggtggccgcatacacgggcattccggaactgttgtagcagctggtacaccagcaggtgcagggccgaacgctgctccggcgtacgggtatccttcggatttccccgggcatccagcccgccttcgtagcagatacctatcgaatacttgttgtgaccgcgacaatgcgcaccgggcagttccagggaacgggttccgagcacggtaccgtctctccggatatagtagtgatagcccgtcgtgcggaagccgcgacggcggtgctctgtctccagagcttcgggagtgagcgcatggccctcccgcgtggcgctgcaatgcaccacgatgtagttgatttttcgcatgaataagtagtgagtagttagtagttggtagttaatagttggtagcgagtagtgatttacgatttgacgatttgacgatttacaattgagattactcttcgtatcataaatgcctgcataggcgcggttatttagcagtacgaatttcaatcgtacatcgtaaatcgtcaaatcgtaaatggccttatcccaacggattttcaccttggtcaccgtcgttaccgcccgagccgtcgtcgttgccgcccgaacctgccgtgtcctgaaggtcgaagcgcacgcacttcaccccggtcaccagcgaacgggtagacaccgtatggtccagattacgcttggaggtgggcagaaaacgcactcgtagtgtggactgggtagccgacaccttcagagggtcttccacaccgttcatggtggacttcatcgtaaggcggaaagtacccagaccgtccagcgtcacgctctcggaagactgcaggtggcgagtcatcacggtcaccaggttgtcgatgacattcttcgagtcacccgtagagagggaagacaactccgcaatctccttggccacctgctcggtgtccacattccccgtcagcaccacgcggggataaaaaagcttcttgccctctttgttggcaagaacggactgaaatgatttgtaaattactggcatagtagttttgttttaaaaattaatagtttgtcttgaaattcaaggattcgtttttttcagatgaaacaatattattttattttcgtgtattaagcttaaccgcattacaaagataaccctatctccggaagtgtacaaattaaaggaaccgtttttcttcatgaatctattcacatatcgaaaactttacttacagcataggctcagcaggtatcgccccggttgccgtatcttgccatgactctcgcgcaaggcataaaaccccttccacaaagggtggccgatagcaccgaaattacttttgaggataatggcatactgctcttgcggaggaatatggaactgcttcagattgaaaagcaacccgtccaggttgcggtccgtgccatcctgcggcggttgcagttgctctattttccgaagatattccccctccgcggatggcacatccgcgccctcagtgcccccggttccgggggaactatggaggaggggattttctttgctgtgttgtgatgtgctatgctctgctgtgctatgtgtacccgatgtcgcattttcgggcttaaatgctgcactttcggcaacggacggcacgcttccattggcagacggcactctcccggcggcagtcggcgcggcatcgtcatcgctctgagaatcatccaccagacaataacgtgtgtctatggcggaagatttccggcgcttggtactgaacagatattgccgctgtatctcagcagaagtcaagatggcgtatttgccgaaaagggcggcattgaaaatgccgtactccacagccagggcaagaatgcgcttcacgtcggcagccgtcttttcatagaggcaggcggaaaggtcttcgtagaaaagctcgtcggcacacacgtaatagccttcgtcggcataaatgcaggagagggcgcccagcagaatggcaaaggagccgtcaccctcacgtttcatgatgcggcgcaccagacggtcgtgcatgaagtctgtgttcaaggggaaatagtcaagtccccgttttttgattctggacatggtttgatgattaggggttagtgattagggggagagagcggcttgtatcattctatatcacctgcttcgcataggcgtttccgcttgcggagcacgctttcgcgcactaccttcaaagcattcagaataagatacatacgaagggtacagtccgaaatttcagtgatgaccggataacggaggggattgcttgctggaagtgagcgacggtagcgggcgttgctcatcgccctacggcattccttgcaataattgtcgggggcaagcgtacgcttgtctacataaaaagaatcaacgggcagttctctgtggcaacatccacagaaacgaacatttttttcaataatctgttccataaccattttttgttaagaattagtacaataatattttttcggcacgcccctgccaaagatgcttgtaggggctgtttgctggaagtatatatccagcgtattctatctatacatccagcgcgttgtatctatacttccaacgcacctcatctatacatccggcaaggcggatgcccattttttcaaattcgtaagtatttttgctaaattcggatgcttccggataaaagaccagatgtgtattttccataaatccctcccttttatttgcatttataaaacatgatatgtatttttgtcccaacaaagataatgctgttttcatttataaaacaaacaaatcgggaattaaattcttaaataagacgtaagacagtataaatgaggagataatagtttctgaataatttacacgtaaaaactgaagaatatggcgaatgacaaagacccggtattttgtgcggcagacatcataaaacgtgccaaactggcgaaagaattcaagacagacagcgaacttgccgcctttctgggtatatcacgctccacactgagcaactggaacgcccgcaacagcatcgacttccccctgctgctgggcagcctggacgacgtggactacaactggctgctgacgggaaagggctcgcctgcacatcattcaaaattctgtgacaatgacttggtacaaggtgaagtggaaatacttcacacaccgaaaacagccgaccctatggacgaccgtagcgtgaccctctatgacatctctgccgccgccaacctgaagacactgctggctgaccgcccgcagtacgccttggggcggattgtaattcccaatatccctgtgtgcgacggtgccgtctacgtctcgggcgactcgatgtatcccatcctcaagtccggtgacatcgtaggctttaagtccatccgcgacttcaccgacgtcatctacggtgaaatgtatctcgtctccttcgaacggggcggcgacgaatacctggcagtgaaatacgtcaaccactcggaacggccggactgcatccgtctggtgagctacaacaaccaccacgaccccatggacctgccgctggcggcagtcaatgcaatggccatcgtgaagttctcgataaggaagaatatgatgatgtagagggcggcattatcaccggaaatttcgtaagaaagctcctggcaaggatcattcaacaagcaaacagagaaattatacaaaaaaagcttgtaatttattcttttatcttatttttgcgatgccataggcataataataagtatccggaaaaaaacatgcttattccatccaatagaacaaagagggagtgcattctttcaaggttatgttttctagtgctttcagtatgggtgttcctaccttccgcagcacagaacaatccctacaagatagacgatgcactctaccccatctaccagcgggcttccaagcaggcacgccagcaggaggggttgctggtggccgacactttgtatcaacaggctctgaagctcggtgacaaaaaagcacaatgcctggcatacatcatccccctgcagttctatatatcccaaaaagatgatagcaaaatagaaaaggcatccactgacctgaaagagatttcacgtgccaataactatctgcaatattattatcacgcttggagcagcgaaatcatctacttcctgaaccaacaacgctcattgctcgccttgcagaaagcggaaaaaatgaaaaagcaagcttttgccgacagatacccttacggtatcttcagctgtatccgaaccatgggccatatctacaaatcacgcggaaacttcgacctctccgcccaatactatcaggaagccttggactatatgctgaagaatatgcccgaccaagatcccagccaactatactcaagccttgccgaatattaccgtaacacccaaaaagattacgccaccgcactggactattgcgaaaaagccttgaagagcgccaaaacagaacggaacatagcccaagccatgatagagaaatgcctgatactattccggcaggggcgtatagatgaattcaacgactgctataaagaagccgtacaaatggcagaccgttgcaagctctctgccagcgtttccctactgatagcccacatcagcaagaacatactggacaaacagtatgagcaggcccatgcccacgctgaccaattgtccgagaaaggcttgcaacaacatgcctacatttacgaatgcgccaaagactatcccaatgccatcaaatatctgaaaaaataccaccagcagttggattcgacgaacaatctcctgcaactgtcggacatcgccgaactgaacacccagataggcgccgaacgtctgaaaatggaaaacatacaggccacctcgcgctaccgcatcactcttttcagcattgtcaccggctttttgctgttatccctgcttttcctgatgctctacctccaccgcaaacgtaaagtcaacctcgaactatgccacaagaacgaggaactttccgaagcgcgcgaccaagccgaagcagccaacaaggcaaagagcatcttcctgcagaacatgagtcacgaaatacggacaccgctcaactctatcgtgggcttctcacaactcatcacttcccccgacgcgaacctttcccaagaggaaaggcaggatttctgccatctcatacagcacaattccgacctcctccttacactggtgggggacatcctcagcgcagccgagttggaaagcaacagatacaccatgaagatagcgccgcacagttgcaacaagctctgccgggaagccataaccaccgttgaacaccgcaagcccgaaggcgtgaagctctactacacctccgaagtggacgactgctacgaactgagcaccgacgggcaacgtgtgtgccagatactcatcaacttccttaccaatgcagagaaacacaccacacaaggcgaaatccgcctgcactgctccctcacagagcatcccggatacgtcaccttctccgtcaccgataccggtaccggcattcccccggaatactcggaaaccatcttcgaacgctttgaaaaggccgacaacttcgggcaaggcaccggtctgggactcaatatctgccgcctcatcgccgaacggctgaaagggaaagtgctgctggacaaggagtacaaggagggggcaaggttcgtgtttgtactgccggtggaggaaaaaaataagagttatctcaaaacttgaaagaataggtcagcgaagggacgatgccataaagatacagtttatagatacgcccgtttcctacagaaaagtgcccttgcctccctgcataaatagagaacacatttttccggctataagcattgatgatggaaaggctcaagttgcggtcttgcctgatacgccacgtcgccgaaaagtccaactggtggaaagccggagcacgataaccgttccgggcagaataaatatagaccagtacatgttccgattcatactttccaatggggagcgtaagattcatccccgatgcataggagaaagtggaagacagagaccaatgtctgttcatttcccagtttacgaacaatttcaggttatggggacggtcgtacaccggtctgtactcctctcctcctatacggttacgcgcacgagagagagtataactaatccatccggtcacggctcctttattctttgacaagtagaattccaatccacaccctctggcagaaccggtttcgacttcatcctctatccagtcattctgaaaaatatcggcatttttccgataatccaccacatggcttgtccggcgcatatatgcctccagcgacaatgtatattccttatcaggaaaattgtactcatatcccaatgccagttggcgcatgacggagggcttcaacagtgcattggcaggcatccacatgtccgaggggatacctaccgaagaggtggtgagcatgtgtatgctctgtgccgcttgtgtatacgatgcagaaaaccggtgcgaggcattcggaataaaagagagctcggcacggggttcgggcatcacaaatgtcttggctgcataataggcagaggccggtgcatgcagtacggacagcctgaccccggcattcagaagaaaacggggcaagaatttataatttgcctctgcatacaatgccgcatcccacaaactcttgcgcggcatttgcgaaggagtgatgttagaatccttaccggacttgcccacctcaccgggcatcgtagtgaaataatgtaggttcacccctcccttcaaggtcagcagattgttctgatacctctcccaatccgacttcaactgatacgactgcatgttcgacttccacacatatctcaatccgtccgacaacgatttatacttataataatagttgctgaagacagcactcgtattcacattcgtcttatcattcagtatatggttccaacgtatggtagccgtggcatttccccaatccatcccatagcctttcaccagcttgttgaacacggtatggtcgcctccgctatacaaggaaaagaacatccggttccgagcatccagcgttctgttcactttggcattgacatcataaaaccacatctgcggtttggatgtcagattacttcccaacagtccggctactacccccggatatccaaaccggccggaaagcagataagacccttctttcttcttcaaaggtccctccaacagcactttcgaggctatcaaccccaagctggcactccgttcacgttccttgctgttgccttcgcgcatacgcacgtctatgacggatgaagaacgaccgccatacttcagcgggaagaacgatttgtacaagttcacctcacggatagcatcgttgttgaacaccgagaagaaggacaatacatggctggggttataaactacagcctcatccagcaagaccagatttccccattggttactgccccgtacagaaatattgtttgccccttcattgccactctgcactccgggtagaaattgcaatgacttcatcaaatccggttctcctcccacagatggcaatgcttgtatttcctttgcttctaaagcaaattgtccgctatgcttgcggcttcccactatctcgatacctttcagccaataatcatcgggagtcaatgcgatattcaccaccatgtttcctgataaagtcaaggtatccctccaagtaacataccccaacatggaacattgcaatatacattcccccttgggaagtaatatggaataaagtccgtaagcattggttgccattcccgttcccgaccttcgttccagcacattggcatccgaaagaatctcacccgttttggcatccgtcacacaccctcgtacaacaaccttttgggcaaccactgcctgacagctcaaaaacaaaatacagaaataaatcagcgaccgtttcattagctttatcttcttacgattacaaaacaacacatcatctttcccccgttgcaatgcctttttcagaaactgcactcacacggaagcaaccatacgccccgccacttatattgctgcccaccgatgacggtgcaggcgtataagcaccaccatccgaccgaaactggcgtatcatctggtcgaaaacgtcataacaactcttggaaatggtctgcgcccatacatatagggaatcccccatgggataatcccaacccggaggataacccaaaggattttctccgtcgtcaatcagaaaatcaaccacattctcttcaagatactcatcgctcaagatagaatatccccagaattggccactacttaatagaaactgaggatgcttaagagaataatttgtataactatttgcattcaattgaaacagatagtaattgtctactccaaagggattgataaaactgatacaaggtgcccatgtatgccctttctcgttaaagtcaaaacgcttcaatttcatatcagtaataggcaatgcagattccattctttgaatatcagacttataatgttttcctccataaaaaatatccaactgataagaatgcccttctataccataaatcttggtagtggcatacataccccggcaagaaatattatcatgcccgggattcactgccacacgtgcagacttcttctgataataatcgtaatagtcataaaagaccccaccatagtcatcatacggatgaagcacctgcattgtgtccttaatgccatccgtacaatcagtcactatcatagtagcatcttctattccttcgtattgtccgtcttgacccgatattaaagcaggttttctcaaaaggaaaaagtaaggtggattctcactggttatcaccccgttaaaaacaattccatcaagcatagaatctggaatatcaacatcaaactcctcctcacaacctgacaaaagaaaaagcagacacaacgtccatataatactgaaatacctcaccataatagccaagatttattttacagttccaattcctgcttcaagagtctagtcagctcttcataagaatttgtgatatatatcaatctgtcattaatgataatggtaggagtggcaaatagtccccgttccatcaatttgttgatggtatgatttaccctatcataattcaccgcagacagcagttcttgcttatattcttcgacatccagacccagtctactggcagtagcaaaaacaaacgcagaatcgaccaaagcctcatgttcaaaaatggcatcatgaaactcccagaatttattgtatttgacggcagcttcacatgacaaagatgcaagagtaggctcatcggcgaaattaataaagccgaatctcactttatccttgtattcactataaatctgtttcaacgtcttttcaaagtcaacacaacgtttgcaatcaaagtcggacgctacaataaaagtggtagcagcattaagattccctctataatgtacattcaagtcactaataacacattgaggctgtttgggaggataaagatatctttttatatctgctttattatacagtgaatctgccaaatgctgaattacagcagcccttatatcatttctcaaagaaatattcccttcaatacttcctgaagacactttgctaagcctttctcttgaatggaggacacgttcatctactgagccgaacatcataagcaggctgtcttctttaccatttatcatctcttttacataatcatcaagaaaaacattgaacgttttccccacggcagcagcttcctgctcaatcagtttatgcttaatcaaatcgtccaaggctttcaactttatttcgtaagctgtattcaataaatcaaaagtttcctgagtagttagtcgggacaactctgaagcactgatttcatagccattcacttctgccacaatgctcttgtcccgattggaacaagagcacagaaaaaagaaatataaaaaaataagatacttcatatcgctacggcagagggactcttccaaaattaggatgatacagatttcttaacacaaagtcctccttatccgtattcaagacaacataatatcttgtattatctgttccttctattccatgcatacccgatgatatacttgaagtatcttctttatatcctttatagtgcttcaaccaatttttgttactggaatcttcatcatcaacataaattattcctctatcagtaaatgctggaccatccaataaaaccccatatgtgatagattgttttggaccaagtccaaaaggtggtgtccattgaggacgagggtaaggaggataggcccaagctaaagcagcattagtatccactattgtataaccagcaagatctttaactgacgaaaatcttgtatcagtactacttatgctattcttattatgcttatcatcacaatcatgataacgaacaagaacatccattgtaccaccaaactgagaataatttatatgattaacaagaaataccccacctggataatacctatttgcttcagtcaaacaaaatttaaaattcacattaccattaccatccacatatgtatctcccactggacctgaaactttagaattctgtctagtatcttctgcatctagatgaagagttaactctttgtacgtaccacatgaaccaaccttgaaaactcctactacgtcagttgttgcggcataagctgtacgcataaccctttctttagcaacagacaatctgttcatcaatttctgttcatactcatccatcgtagcctgaatggcctgttcgtcggctattgtctcaattttggcagaatcagcttcagcgctggcggctctggtcgacaattcataatcctcggcagccctggcaagctctgcatcgttctccaataaatcgtagctgttgctgcatgagcaacaagccagcgcgcccaaaaaggcgaacagcaaatgtttcttcattttttcttgaattatagtgttagtacgtaaaatccccgtataatacggtatctccgatagtaatttctatacggtaagcttctccttcatttaataaacctgctaaatttagtattatctcagaagtagaagtagagtacgaatcagaaagaatggtttcattagtaaaaaggctggtaactgaaacctcaacatcagcagtactctttaaatctactgatattaattcgtaatccgaattcaaataagcaaatacttcgaatggaatagtagaacgtcctgctttctccggagaatttttagaatcgtgcttttccaatcttattttcctttcattcttttgatattgtcctgcatttacactcatagaaataaaggaaaatagacataacaatagtagttctcttgtcttcatattaattaattcaatggtttcgagacaaaggaagattactttcttatactaacaaagaaaaaagaggtaataaaggtaacaacaacgggtaacaaaagtaacaaaggagaagatatgccattgattatcaacaatcaaagatatgagagaactgctcagcatcaattttgcccttaatacggtttttccttacttttatggcatctgcagaaacattggtgatatgcagaatgacatctttggggcaacgaagcagagacaacacacaataaagcaggtcgtcattcgtcaaattggggtaacgttctttcaggttacccatgacatcggcaaatgatttccggatattacttacaatcaatgctctgtatgtatctgctatcttgatttgcattgaaggagtggccttcttcagttcatccagtcttttacttcctgccgttgtttcaaacaaagacagacaaatttgaaaacgttctttttccaatttctccagttctgcattcctgtcatcggaagatgcttcggtaacttcactcaggaatatggcttccgcacggttctccatcaatcgctgctgcaaatctacatatttctttttcctacgaccatcacgccacagataaagaataatcaatatcgctaccagaacaagaaaagcggcaaccaaacctacaataatccattgatttctggcagacaactcgcgtttatgcaactccaccagatgattatccatcagtttatcaagctctgcacggtcattcatcgcttggatagaatcataatagataaagaaagaatcagcatacaaagtagactccttccataatttcattttcttgtattcccggaacaagcagtcataagacgatgcctttacatatatgttggaggattcagcacctatcttccaataataaatggcagaatcgctttggtttaagtcacctaaaatatcccctttggtagaacaagctaaagtataatcttttttggaagattgatatgacaatgctttcgatatataaaattcagcttcggcatatctgtcttgttcattatagagagcagctatatcgctacatatagcaaatagcaaatcggaacgctgaagagcagaagccatttctaacacttgccgataatacaccaaagcactatccaattgatattccaccaagaaagtatctccaatatcattcaagagataacaagcccgggcagaatctttacccacacaaaaggcatacccttttttatacatgtctcttgcgatagagcgcagtttttgtccactatagcaactccctaaatgggtgtacagcatcgccacgaatatagagtccttctctggtatcagttccagcgacttcagatagaggcttatcgccttcggaaactctttattttccagatagacacatccccaatagaagtatgcttgcgccagccgttcctgctttctgcctccgtcgtaatagtctaccgctatctgtatcagcgaatcgttctccagcagcacacaactcttgtatcgggcttgtgtcagcagcaacgcatacaaggcgcgttcttctccccgcaactcgcgggaatccggtatctgttccaacaccagcaaagcactgtcgggattgccccacatcatggaatcggcagaaagaagcgcaggatatacagaagcaatctccctcctgcaagaatgacacagaaagacaaggcctgaacaaaagcagaaaatatatagaaggtgtctcatatatcagtattattgtcgtctctgctgcaaaaatacataatttaagacagaatgccgtcacttcatttcaatttataacttacaaagcacggctctttcatttaagggagttatcgggggaggtagaaggagttaaagggcgataactccttctacctcccctgataactccccgactatgaacacctccttctgactcctgcaaatagaatattcgtttgctggtaaactacgaaatcatttgttagtaacaaacgatttcgtatatttgcaggaatcaatcccctaacaagatgatcagacaagaagaaatatcggctatattggatgcgcaagccgagatattccgcaaaaaagaaaacggactgacgcgcgaggcactggccggcgtaccggcagtaccttcgtttgccaccatcatcaccggcatccgccgttgtggcaagagcaccctcttgcggcaactcatgtcccggaagtacgaccaggcgctctacctgaactttgaggacatccgccttgccaacttcgatgccgatgacttcacccgcctattgcgggagatagaacgccgcggcatccgcgtactgttcttcgacgagatacagattatccccaaatgggaaatctttatccatcagatgctcaatgcagaatataccatattcatcagcggctccaacgcctcgttgctgagcagggaactgggcacccacctcaccggccgacacatcccgatggagctttttcccttctcttattcagagttcttgtcgttcagaaacctgcctgccggtgaagattcgctttcggcctatctgcacgatgggggcatcccggaatatgtgaagtatcatgccgagattatcctgaacacactgattgacgacatcctgatacgggacatcgccatacgcaattcgataaaggatgtgaactcactacgcgcacttgccgtctacctgctatccaatgtaggcaaccttgtatcggcggggaaactgaccgggatgttcgatataaaggcaacgtctaccttcttggattacttctcgttctatcaaagttcctatctgctggagttcgtgcccatcttcaattattcgctgaaggtgcaagctcggaatccgaaaaaagtatatgccatggacttagggttggtgaacgaagctgcggccaacttctcggacgctaccgggcataagctggagaaccttatcttcctgcatctgcgcaggcaaccgggcagcatctgctactataaagacaagggggaatgcgacttcatagtcagcgagaaaggcaaagtgtgccgcgccgtccaagtctgccaccagataaccgaactgaacttcacccgcgaatacaacggactgctggaagccatgaaggcactcaaccttacggagggtgtcatcgtgaccaccaatcaggccgatcgtttcgaagaagacgggaagacaatccgaatgatacctgccagcgagttcctgctcggatagccaaattaaggaaatcaaaggctgccacttccgtcccgatacttcggagcagaagggcagccttctatataaatagccgtaaagctacgctgattactttttcaatggataattgataattgacaattaggggaggctataggctgaaggcggcttttaccttctccacatagtccagcttttcccaggtgaagagctctacctctatgtccttgtcgccttcgtagcggctacggaagtgcttgacgacggtctgcggctcgcggcccatgtgtccgtaggcggcagtctcctgatagatggggttgcgcagtttcaggcggtcttctatcgccttggggcggaggtcgaacagctcgtcaattttacgggcaatctcaccgtcgctcatattgacgtggctgcggccataagtatctacgaagatattgatggggcgtgccacaccgatagcgtaacttacctgtaccagcatttcgtcggcaacgccggcagctaccagattcttggcaatgtggcgggctgcataagctgcgctgcggtctaccttagaggggtcctttccggagaaagcgccgccgccgtgggcacccttgccgccgtaggtatctacgataatcttgcgtcccgtcagcccggtgtcaccgtggggaccaccgattacgaacttgcccgtggggttgacgtgatatgtgatacggtcgttgaacagtgccagcaccttttcatgatggatggaagcaatgacacgcggcatcagaatctcgattacatcccggcggatttgggcgagcatttcctcgtcggccttcagctgggcggcatcgctgtcgtcggcaggctgtacgaagtcgtcgtgctgggtggaaactacgatggtatcgatgcgtacgggtgtgccgttgtcatcatattcgatggtcacctggctcttggcgtcgggacgaaggtaggtcatcaccttgccttcgcgacggacatctgccagcacttgcaggatgcggtgtgcaaggtccagtgaaagcggcatgtaattctccgtttcgttggtggcgtagccgaacatcattccctggtctccggcaccttgttccatggggtcctgtcgctccacgccgcggttgatgtcggggctctgctcgtggatggcgctcagcacgccgcacgaattgctctcgaacatatactcgcctttggtatagccgattttcttgattacttcgcgtgcgatgagaggcatgtcaacgtacgctttggttttcacttctccagccagcactacctgaccggtagtaaccagagtttcgcaagctactttcgaactggggtcgtaggccaacagtttgtcaagcacagcgtccgatatttgatcggccactttgtcggggtgtccttcagacaccgattcggatgtgaataaatatcccatttcagttgagaattgatagttgataattgataattcaacgaatggcggaaggaggtgtgtggagtagatgcatccggcacacaaacgtgccgtcagaaaaggatgtgttttagcatttttttctgtggttgcaagctactcaaatctctccacatatcgtttttcgggggcaaagatagtgcaaaccgaacgcagaacaaaatgaacttgttcattttttatgctgaggtgcagcctatcttcgctttccggaggcaaagataaaaaagaaatcttgtatctgcgctacagatagcagagattaacactgattttgcaacaattccccgattgtctttcccaataccggatgcaccacgcctgaagcaatctccgccaacggctccatcacgaaacggcgttcctgcatcagcggatgaggaagtttcagttcgggagtatccagcaaaacgggagtaccgtcatcggcaaaacagagcaacaggtcgatgtctatcacacggtcgctatacactgcattgacagacttatgcgtacgccccatctcccgctcgatttcctgcgtcgtttgcaacacctccaaaggtgccaaagcagtgtctacgcagagtgcggcattcagaaaagtattatcggaagaaaagccccacggggcagtagcataaaaagcagatagggaaatcacttcccctatctgctttcttatcttttggacggccatgcggagattctgctccttatcgccgagattggtaccaagactgaaataaacaaccataattaccggtctgtaatcagcatcgcatctccatacgtaccaaagcggtactcttccttcaatgccacattgtatgcctccatcacctgctcgtaaccgccgaaagcggcaacaatcatcagcagggtactgagcggcatgtggaagttggatatcatggcattggccacggtaaagtcgtacggcgggaagatgaacttgttggtccaaccctcgtattccttcaaatgtccatcggtgctgacggtgctctcgatggcacgcatcacggtggtacctacggcacagacttggcggttcaggtctttggcatggttcacaatccgtacggcttcctcgttcacaatcatctgctcggagtctgtcttgtgcttggtgaggtcttccacatcaatgtcgcggaagttacccaagccagcatgcagggtgatgtaggcaaagtcaatacccttgatttccatacgcttcatcagctcgcggctgaagtgcaggctggcggtaggcgccgtaacagctccttcgttgcgtgcaaaaatagactggaaacgttcggcatcgtccggctctacgggacggttgatgatgctgtggggcagcggcgtttcgcccagcgcatagagcgccttcttgaactcatcgtgcggaccgtcgtaaaggaaacgaagcgtacgcccacgcgaagtggtgttgtcgataacctcagccaccatagagtcgtcgtcaccgaagtagagcttattgccgatacgtattttacgggcaggatccaccagtacatcccacaaccggagctcttcgttcaactcacgcaacaagaacacttcaatacgcgcaccggtcttttccttgttaccgtacaagcgggcagggaaaaccttggtgtcgttgaagataaacacatctttgtcatcaaaatagtccagaacatccttgaacatcttgtgctcaatctcacccgtcttacggtgcaacaccagcagacgtgactcgtctctgtacttcgtggggtgcaaagctatcttctcttcgggaagcttgaatttgaattgcgacagtttcataattagttatgagttataagttatttattatttatatcagtctgttttagtcataagagggtatgagttatccggcagtatgctacacttcatagcaaataactcataacttataactaaatatctatctcctgcgcctctatccactctttaaaatcgaggggattgaggcagtctgccagccggacgtcgcctacgcgggtacgctccagggcggtgaggtgagcgccgctctgcagggcttcgccgatgtcacgtgccagggcgcggatataggttcctttgctgcatactacgcgtacctttatccacggttcggcaatatccagcccgtcgtccagcagctctatctcgtcgatgacgagcaacttgggtttcagctctacctcctctcccttgcgggcaaggtcgtaggcacgtttcccgttcaccatacatgccgagaaggcgggaggcacttgctgtatctcgccgatgaacttcttcagcgtctcctccaccagtccgcgggtgatgtgctccgtgggataggtggcatctatctcatgttccaggtcgtaagagggagtggtggcacccaaccggatggtggcaacgtactccttcgtgtgatactggaattcctcaatccgtttcgtggccttgcccgtacagactatcatcacccccgtagcaagcgggtcgagggtaccggcatggcctactttcaacttcttctcctttatccgccggcagatgtggtaacgcgcatgtcccacaaccttgaacgatgtccatcccagcggtttattgaaatagaggacttctccttctttaaaattcattggcctctcccctaacccctccccggtagggagggggataaaatggtacaacttaatatttttctcttattgatttccggagtaatcagtctttcccccacacaaggaggggactttagcttaatatgagcgttatgacaccggctatcgcgcaatagatggcaaaataaatcagcttgcccttcttcacaatatttatcatccacttgcaggccaggcagcccgaaacaaaagcagccaggaaacctaccaccagcgaaagcgccggaatatcccccgcaaccgcctcacctttcatcatcttcatcccatccagcagtgcctcacccaagatgggaggcatcaccatcaggaaagagaactgtgccagcttcgccttgttgtcgcccagcaacagaccggttgcaatggtactgcccgaacgggaaagccccggaagcaccgcgcatgcttgtgccagaccgatgataaaggcatccttcatgctgatgttctccttctgcttcggcttataataataggagaaagacagcagcagagctgtcagcagcaggcagcagcccacaacgaccagtcccgaaccgaaaatggcctctacttcgtccttgaaaaatacccccacaatgccgataggtatcatggataccagtatattgatgacgtaacgtgtctcctcgttcatctgccacttgaacagtcccttgaaaatccagtcaatctctttccagagtatcaccagcgtactgaacaccgtagccacatgtaccactatcgtaaaagcaagattctcctctccctcaataccgaacaatgccgaaccgatggcgaggtgtccgctactgctcaccggcagatattcggtcagtccttgaataagcccaaggataagcgcttcaaaccattccaatttgtttaagtttttaagttcttgagttgccggaggggctgtccggaagctctgttactactttctttctgattatttttcagacgcagataacgcagatgacgcggatttctaatattccaatctgcgtcatctgtgtaatccgcgtctgaaagtttactcctctgcacgacagcttttaggcttgcgcagcacggcatatatcatgaacacaaaccccagcaggcaaactaccggagccaccttgatgcgtctcacactaaaaatgtccggttcaaaggtcgtcgaggtagacacggggccggtcatcagaagaaaaccaatgataaccaccgccattccgatgccaagcaggataaaattggtcttatcaaaagcgaatttctctttactcatctatacatttactattttactatttacaatttactatttgggggctgcgataacagtgctttctctctatgcacttcaaggcgttaaatataatacagtgtgcttgccttcatcctcagatatttgttgatggaaagcaaagcgcacagccacgtaataagtacaccgaacaccagcacggcacccgacaccagcaccatcacctcgggcgtaatcaccttgaccaactccggttcgtaggacaccagccaataggcggctccccacagaatgctgtcggctatgaaagcggccagcacacctatccagaaattgcgccgcagaaacggacgacggatgaatgcccagcttgctcccaccagcttcatggtgtggataaggaaacgcttggaatatatagccagacggatggtgttgtttatcagcgcaaaggagataaacgtcagtatcacagccagccccagcagcatcaagctgatattccttatattatcgttcacggcatctatcaagtctttctggtagagcacttcctggatattggtattctttttaatcagtttctctattttggcgatgctgtccgaattggcatagtcggaatgcagcttgatttcgatggaggcagtgaaaggattgtagccgaggaactcttgcgggtccgtacccatcgcctcagtctgctcgcggagtgcctgcttcttggaaatgtattccgtctgcttcacaaaagcctccttgtccagcctcttctgaagcttcaggatgtcgctctccttcatgtcgtcactgacaagcacggagaaactgatgttctccttgacgtacacggaaagattatgagccgcgagcacaaagaatacaaccagccccaacagcagtaacaccagcgtcgtactgatgctggacgtaatgaactgcatgtcaaaataggataccgagttattctttgctttcattataccaattataagttacgagttacaagctacaagttatgtaaatcagtcgctattaatcattaatccctaatcccttttctcaccctttcttcctgaacacgtaaatcatggaactgctgcgttccttcttcaccaacgcgctgaaccaggccagtgtaccggtcaccattccccgcaggaaagtacacgagtgcctcatgtgcttttctgtcagcatggagacgtagaaggcatcgaacggcatgggatgccgctctgccatgatgaaaccatgcttggaaccgaattgctggatggtgcccggtgtgaagtgccacaaatggcggggcacatcgtaggcagcccagtaagccccgtatttctttgcgtcgaaggaggaacagttgggcacagctacaatcagcacccctttttcagtcagcagggagtgcagggtttcccacgtttcgttaaggggttccagatgttccatgacatgccatagggtgatgacgtcgaaactgcccggtgcaaaatctttcaatgccgtatggggtttcacatccagattgaagtgttctttggcaaaggcacgcgcctgcgcactcttttccacagcttccacctgccagccgcgacgctgcatggcatcggcaaagtaaccagtccccgtacccaaatccagcaggctgccctccttgcggtgtgcttcacggagcacaaggcgtgccttgcgtcccagcatatagttgcgcacccaatggtacacggagttcatcgcccccttgcgggtatcggtatgtgatatgtaatcaggagtttcgtagtaacgaccgatttcagcctccacgggaaagtcttgcgtgaaaaggaaaccgcaatcccggcagcggcacaagtggaacatttcgcccgaggcataatggtctacacatgtcagggcacgctccaaatgcgttccaccacataacggacaagcttttatagtgagtttattcatcgaacgttctgccaataaggaagtgcagcccgaatgaaacagaccacaccatacctaaatttggtgcaaaataacaaataaaaagtgatttatagggtttccattaaggagatttaagaaaacaaacgcttgctccggccagctggcggaacgaatgaccaactgttcgatattaagcggacaactgtccgataatgaacagttttcgaaagcatctattcattgattatcaacaacttaaatctttggcatgggaattgactataattaggcgaaggcgtttgagaaaaagattagttggaatgcaactttttaatcgggaacaacgtctaaaagaaacagagtaagtaacaacaattaaaaataaagattatgaaaactacaaatttattcaaggcagtcgcattcgtagcaatgactatcgtaagcgttatgaatacagaagtgaaagctcaggaaaacaacttcatcaccaatgaagaagtgaaaaacgaattagtagttgccaagaccatctttaagcaagacggcgcacaactttaccggcacatccgttatgaatactcttatgacgaccagaaacgcctaacctgcaaggaagcctccaagtgggacggtgtaaaagacgaatgggtaccttacttcaagatgacataccaatatggcaatgatgaaatcaccatgtcctacgcacgttggaacgagtctcacaaggcttatgacaaagacataaagaaaagtgtgtatgaattgaacgatgaaaacatgccggtagcttacaaactctacaatcaggacgcgccaaagtccgaattgaccctggtaagctacaacaagaccgactacgtagcgaatattctggccatggcagaataaaatttaaagtttataatatgaaaagcacgagcctcacggctcgtgcttttattctatataccggtgtcatcatactgatgtcatcgagacttttctatcctgtcagccggctacctcttctcctttcagcgtagccgaactggattcggtaaccttcaccatcacaaaatcgcccacacggtgcgtgccacggtcaaacaccaccacacggttctgctccgtacggccgaacagctggtcgcggctgcgtttggaaacaccttccaccagcacctcgtacgtcttgcccacgcaacgggcattcgcctcggcagagagacggttttgcaaggcgatgatttcattcagacggcgaatcttcacctcctcgggcacatcgtccggcaggtgcttggaagcatgcgtaccggggcgttcgctgtacttgaacatgaaggcggaatcgtatccgcactcctccatcagcgagagggaaagccggtggtcctcctccgtctcactatggaaaccggagaatatatccgtagacaagccacaatcggggatgatgcggcggatggctgccacgcggtccatataccactcgcggtcgtacttgcggttcatcagcttcaggatgcggctgctcccactctgtaccggcaggtggatgtgcttacatacgttgggcatgtcggcaatgacctggagagtttcgtcgctcatgtctttagggtgcgaggtagtgaaacggatacgtacgcccggcgctgcctctgccacggtgcgcagcagcattgggaaagtaatcgtctctccgtccggcttctcgaagcggtaggaattgacgttctgtcccagcagggtgacttccttataaccctttgccacgaggtcggccacttcattgaggatgctttccacatcacggctacgctcacggccacgggtgtagggaacgatgcagtaagtacagaaattattgcacccacgcatgatggagacgaagccggagatgtggtttccgcaaatgcgcgaggggatgacatcccgataggtctctgtggtggagagctccacgttcattgctttctcaccggcctctaccgaggcaatcagttcgggcagagtaaggtaggcatccggccccaccaccaggtccacatgatggttggtgattaagtcgtccttcacacgctctgccatacagcccagcacacccactatcaagccgcgtttcttcttcttgagcgagtggaagaactccagacggttcagaatcttctgctccgcattgtcgcggatggagcaggtgttcataaacactgcatcggcttcctccagggtgtcggccaccgaatatcctgccatctgcatgacggatgcaatcacttcactgtcggccacattcatctggcagccgtaagtctcgataaacaacttcttgttgtcatcagcagttgcagatttaaagtctgctcccgttactttttccataatcagttcgtttaaaatcagtttatatcataagttggtatctgtcatccggagcgcaaagatacttcttccctcccaataaacggatgaaatgaaagaaaaatgccattacaagttgtcaatctgcgccttatcagctaatttatgttaagagagcaaacattttccgagtgttaatttggcatagagcaaattaattcacaaatttgtggaatgaaagaaacattagattttttcatagttaaggtttaggttaaaaaaattaaggggagctgtgaagctgcccttttttattaccaattccttggctgtaatcagattaaataattaactttgcccaaaagcaaagataagagataattgcacaatctttgggtggaaaatcaaaaagaatatggaagatgtcttcaagtttctgttagttgcggctgtcatagtaatcggactcgtcaagcagtttaagaaagaagcaaataaaaatgctgacaagagtcccgacatacctatgcccgacgttgacaacccactgcccgaatactggggcggagatacttacggaggctttattcccgaaggccccaagccggcagaaaagcccaagccggtatccaaaccgtctgccaaatccaagcacacttccataaaggcttcccctccctccccggcatcccgtccgcaggaatccgatgaagtaacgtccgaatacggcatccactcggcagaagaagcgaggaaagccatcatctggtcagaaatacttcaacggaaatattaaagacagtcgataattgcagaaccaattacgagccccttcagaatctttacacgaaaaaataactatttatattatggcactcaattacatttcggcagcagaagctgcgagcctgattaaacatggctacaacatcggcttgagcggatttacccccgcaggaacagccaaagccgttacggctgaattagcaaaaatcgcggaagcagaacatgcaaaaggaaacccgttccagataggtatcttcaccggtgcttctaccggagattcctgcgacggtatcctttcacgcgccaaagctatccgctaccgtgctccttacaccaccaacgccgatttccgtaaagccgtgaacaacggtgaaatagcctacaacgacatccacctttcacagatggctcaggaagtccgttacggtttcatgggaaaagtgaatgttgccatcatcgaggcatgcgaggttactcccgacggtaaaatctacctgacggcagccggcggtatcgctccgactgtctgccgcctggccgaccagattatcgtggaactgaatgccgcccacagcaagaacgccatgggcctgcacgacgtctacgaacccctcgaccctccttaccgccgcgaaatccccatctacaaaccgagtgaccgtatcggcctgccctacatccaggtagacccgaaaaagattgtcggcgtagtggagaccaactggccggacgaggcacgttcgtttgccgccgccgacccgctgaccgacaaaatcggacagaacgtggccgacttccttgccgccgacatgaaacgcggaatcattccgcctaccttcctgccgctgcaatccggtgtgggtaacattgccaatgccgtattgggtgctttgggacgtgacaagaccatccccgcttttgaaatgtacacagaagtcatccagaactccgttatcggacttatccgcgaaggccgcgtgaaattcggcagcgcctgctcactgaccgtaacgaacgactgtctggaaggtatctaccaggatatggacttcttccgcaacaaactggtgctccgtccgtcggaaatctccaacagcccggaagtggtgcgccggctcggtatcatctccatcaacaccgccatcgaagccgacatctacggcaacgtaaactccacgcacatcggcggaaccaagatgatgaacggcatcggcggaagcggtgacttcacccgcaatgcctatatctccatcttcacttgtccgtccgttgccaaggaaggtaaaatctcggctatcgtgccgatggtttcgcacatggaccacacggagcatgacgtcaacatcatcatcaccgaacaaggtgtggccgacctccgcggcaagagtccgaaagaacgtgcacaagccatcatcgaaaactgtgttcatccggactacaagaacattctgtgggattacctgaaactgaccgacggcaagtcacagactccccatgccctgcgcgccgcactggctatgcacgctgagctggccaaaagtggagacatgaagaatgtagactgggcacagtataaataaactgctccctaaaaaggcggagaaaaaccgcccgaaagatataccgcgttgcatgtatatttccggtttgctggatctatatatgcaacgcgttgcatatatagatggaacacgctgcatctatagttccaacaacaagctatttcagtacctactacatccctgtatcaattcctggcaaaacctccttcttaccggtaaactcactatcttttgcttcagtttccttttcagtttcttcaatcgatctctcaccgagccaacgcttatcgttcgcattgagtgaaaaactgcaataatttgtctagagaaatacttgcctccatttgatccctcctattcattgaaaacgggctgcctggaatcacttcccggacagcccttccttcacatttaaaatgaagatgcagagagagtagtatgatgacactctattcctgacctccccctaacgccttgtagaggttaatcaggctttgtatttcagaaaatcgatttgccgtctgtgccagttgtgcgttgagcaatgtctgccgggcggtaagcacctccagataggtggtgttgccatgctccatcagcagggaagtgctgcgggcagctgtctgcaaggaagctacctgcttgtccagcagttcgcttttggataggcttgtctgccaggcagtcaaggcatcgttcacctcgctgcctgcattcagcaatgtctgctggaaggcaagggaagcctcctcctgctgggcacgggctatgcggtactgtgcaatgacctgcccgcgggcaaagagcggctgcgtcagcgaacccactgccgaagccaggaacttgccgggattcacaatcattgaaccggcagaattggtccagcccgcactcccgcccagcgtgatggagggatagaaggcagagcgcgccgcattggtgccgtagaacgccgcttccagtgtccgctcagccgagcggacatcaggacggcaggaaagcatctgaacaggaatccctatagaaaagcccacagggaactgctgctctgccagcacaccgcgctcgtaatgacggggcgtctctgccagcaacagcgcaaggctgttctccacctggtttatctgttcttccaaatcaagcacggaagtctgcacctgatagtacgtggcctccatctgcgacacggcggactcgttcgccatgcccgcattcatcagggcacgggtggaagcaacggtttcccgccatgtctcttcggtctgcctggagatggcaagctgctggtccagcatcagcagggtatagtaagtattggctatcccggcaatgagctgggtacgcacggcctggagatagtcctgactctgcgcatagagcgccttcgactgtttcttggcattgcgcatgcggccgaaaacatccagctcccaactggcagtaacgggcagcgaataggtctgtgtggccttgcggctgtcaaagctgctcaccgtgccctgcggcgcaagggcaaaggagggcaggaaggcaagctttgcggacagcagggtggcttcagcctcttccacgcggagctgtgccgactggtagtcggtattgttctgcaacccttgtccgatgagtgcctgcagatgcgggtcggtgaaaagctcgtgccagtccatgccgcccaggccaaggtccaggctgtcttcggtggcagccggagaaccggcgaggctctccgtaaaagctgccatttcttccccatagaggccgtcggggacctcggtagcgggtttgtatttggtgtacacgccgcaactgctgaacagcaaaccggcggcggacaataggatgatatgtttcttcattgttccaatctgtttttattttattttcctcaatctttcgcccgttctgcctcactcttctgcttttcaagcaatacctgcatatcggcttcttcctccattggcggacgaaccttctcctgcaagtactcaaagatgatatagaatacgggaaccacaaatagcagcgccaatgtgcccacaagcatgccgcctactacgcccgtacccagcgaagagttaccgttggcgcccgcaccactcgagaacatcagcggaagcataccgaatatcatcgtcagcaccgtcatcaggataggacgcaaacggacctgggcggccgaataagctgattccacaatgcccattcccttgcggcgccgctcgatggcatactccgtaatcaggatggccgtcttggcgagcaagccaatcagcataatcacacccgtctgcaaatagatgttgttctccaatcccagaaccttggcaaagaggaatgaacccatcagcccgaacggtacggagaagatgaccgcaaacggtatcaggaaactctcataaagacatgccaggatgagatagataaggaagatacagatggcataaataaagacagtctgcgcaccaccagtattggcttcctcacgtgccatacctccgtactcgtaaccgtagcccagcggcaatgtctgttctgccacttccgcaatcactttctgcacttcgccggaggaatatccttcggcggggttcacattggcggtgatggcactgtacagattgaaacggtttgccgtctccggaccgagcaccttgttcaacgtcacgaactggctgaccggagccatctccgtaccgttgcgcacaaacatattacccagtgcctgttcgtccagacgatattcgggcgatgcctgcatcatgacgcggtacaccttgccaaactgattgtagttggaaatataggcaccgccgcaatagctgcccaatgcgtcgagcaccgcacccggcgagatgcccgcacgcttacacttggccgcatctacatctaccgatacctgcgggaagttcatagcataagaggtatacgccatagccacctcaggacgctagttcaacgcacccagaaactgtatcactgcctcgtagaacgtagccatgtcaccacccgttctgtcctgtaggttcagctccagggagttacccataccatagcccggaatcatacccggctggaagctgaatatctgcgcctctttcacgccgtagaactgggcattgagacgggccaccacagcgtcggacgtgtgttcgctccccttccgctcgccccagtccttcagacggatgatgatggtaccgtaggaagtgccctgaccggacatcagtccgtatcctgccaccttggaatagtgttctatctcgggagtgtttttcaggatgtcctccagcttgctcatcaccttcgtagtttcttccagcgtgcttcccggagacgtgctgacgttcaccatgatgacaccctggtcctcctgcggcacaagccccgtcttggtggtactcatcaggtaaaccagcaatacgacggtagccgccaatgaagtccacaccatccagcggtggtggatgaagaacatcacacctttcttatatttgcccagcacggcgttgaacgaggcattgtatgccgcacgcacccgtccgttgatgctcttcgcactcttcgtaccgtccgacggacgcatcatgatggcacacaaggcgggacaaagcgtcaatgccgaaatcatggagatgcccaccgccgttgccatcgtgacaccgaactgcgtatagaacacgcccgaagtaccgcccataaacgtcacggggataaataccgccatgaacacgcaggtacaagagatgatggccatcgtcacatcgcccatcgcatccttcgtggcaaggtaaggggacttgtatccggcatcgaacttggactgcaccgcctccaccaccacgatggcatcgtccaccaccgtaccgatggcaagcaccaacgcaaacagcgtcaggatattgagactgaaccccgcagccaccaggcaggcaaacgtgccgaccagcgacacgataatggaaatggagggtataagcgtactcttgaagtcctgcaggaagaaatacaccaccagaattaccagtataatggcaatgaccagtgtctccaccacattgtgtatggaagcgaagaggaagtcgttggaactcatcatcgtcacaaattccgtcccttcgggcaggctcttcctcatctcgtctatctgtgcggtaatctgcttgttgacggcggttgcgttggagcctgccgtctggaacatcatgaaaagtaccgccggcttgctgtccatctcactgcggaaaccataggtcagcgtacccagctccacatccgccacgtccttcagacggagcacggaaccgtcactctgcgagcgtaccaccgtgttctggaattcctccacactcttcagacgtccgcgatacttcatcgtaaactggaacacgttctttgaattctcgcccagcgaaccggtaggcgcttcgatgttctgctcgcccaatacggcggtcacatccgaaggaaccagtccatactgcgccatccgttccggtttcagccagatacgcatgctgtatgtatcgcccagctccattacatcacccacaccttcgatacgcttaatctgcggaatcacgttgatatcgaggtaattggctaggaaagtctggtcgtagcgtccgtcggtgcttaccaaagcaccgatttgcaggaagctggtctggcgcttctgggtagtcacaccgattttcgtcacttcggcaggcagcagtccctgcgccttggatacgcggttctgtacgttcaccgcagccatgtcggggtccgtgccctgcttgaagtagacctgtatggtggcagaaccggcattggtggcggtagagctgatgtacatcatgttctccacaccgttgatgctctcctccaacggcatgatgacactgttcaatacggcttcggcatctgcaccggtgtagttggcgctgacgtacaccgtgggaggtgcaatatcaggatactgttccaccggcagcgtaaagagcgagataagccctatcaccagaatcagtacggatatggagatagccatcaccggccgctttataaatatatttcctttcatcttaatgggtcattgatagttgataaatagcagttcattatttcacctgtgtcccttcgcgcagcagtccggcaccggtggaaacaatctcgtcgccgacttccagtccgtccagcactacgtattcgcgtccgtcatttattccggccacggtaatcaaggcagaaacggccttgccatccactaccttatataccactgtcttgtcctgcaactgcacggtggcctcttgcggaatcacaatacagttcttataagtggtaggcaccaccaccgtgcccgacgccccactgtggagcaggcgcgattcattgggaaataccacacgtgccactaccgtacccgtctgacggtcaatgacgccactgatggactcgatggttcctttcttgtcatagacggaattgtcgttcagtctcagttccgcttgaggcatgttcttcaatgcctcgtccatgcttccgtattggcgggtcagggcaagcaactggttctcggtcatggaaaagtaaacgtacatgtcgctgttgtcactgaccgttgtcagcggttgcggcaagctggggctgaccaatgcccctgcacggtagggcaatgcccccaccaccccgtcgctgggactcttcacttccgtataggagaggttgttgcgtgcgcttatctcctgggcctcggcctgcgagagttgcgccttggcggtaaggtagctgttttcggcagtcttcaggctgaattccgaaaccactttctgcgcatacaattccttgttgctgttataagtcagttcggcagtagccagtgcggcacgtgccgcttccacattggcaacggccgttttgagtgcagccttgtagggaacctggtcgatgatgaaaagcagttgtccccggcgcaccttctgcccctcggtcacacacaacttctcgatggtacccgacacttgcggataaatatctatgtcctgccgtccgcgtatcgttgctgagtacgaagtggaaagctctttgtccgtcgcctccactttcatggtagcataagaaggtttcattccggaagcatccgatgcctgcttgcaagatgccaaacacattgtacaaccgacaatccctatcagccgtatccatttcctgttcaatgtaatcatactttttctcattgtctttttgttaaaactggtggcaaaagtaggagaaaggaacaacgccataatgaccaattacactccaaagatgttcctttttcgacattcatcttttttaaggctaatgaattgtctataaatgacatatagaacaagaaagccgcataatggaacatcccatatttcccattattcaccaactttgcaaaacgaaaaaggaagaatatggagaaagggaacataaaaatcgtagaaatcgcggactttaaaaacagcgaacatgtccttgactatgtagacaatgactttgtcataatcaacagtctggagggaagcccctacaatgaagatacaataagattgggatgcttccttatcgctatctgtctagaaggctgcatccagttggacgtcaactacaaaacctaccaactggaagcaggcgacttactgctcggccttcccaataccattatcagccacgcgatggtaagcccaaagcacaagataaggcttgccgcattctccacacagttcctacaacgcgtggtcaagatggagaaggatacatggaataccgttatgcatatccacaacaatcccataaagtctgtcggggaggaaggggacaaggaaatcttcaaattctaccgggaactgcttatggcaaagataaacgacgagcctcatcactatcacagggaagtgatgcaatacttgttttctgccattttctgtgagatgttgggacacctcaacaaagaagtgaacccttcagaaatgacagtcgatacaaaagaaagcatcaaacagtccgactatatcctgcgtaagtttatagagatgttgtccaaagacaacggcatacaccgttctgtaggatattatgccgatgcactatgctatagtcccaaacacttttcgaaggtcatcaagcaggcatgcggacgtacaccgctggacttgattaacgaaagtgccatcgagcacatcaagtaccggctgaagcattcggacaagtccatcaaggagattgcagaagaatttaatttccccaaccagtctttcttcgggaagtatgtgaagtcttatctgggtatgtctccggcacgctaccgcaatacgaaagaggaatgatttcccctactcttggggctcactccgtaaaggtctgcattaggaagctaaaccttaactttacgacgctaaaggtcaactttacgatggctaaacctcaacgtatcatctcatcacacaccgcatcctggaaagcgcgtgcttccctgcccgacagtgcattctggttcatgatggcaaaggctatctcgtgtccgttgcgggctttaaggtagccggccaggcagttgatggcggtaaaggaacccgtcttggcatgtacatttctgtgggaaagggtgcctttcttcatgcggaactccagtgtaccgtccacgccgccaatgggcaaagccttataaagtttctggaaaacatccgtacgcgagtaggcatatcgcaggaaagaaaccaagagttccggtgaaatgtagttgtaattggaaagaccgcaaccatctgccagattatacctatcggggttatatcccatctcttttatcagcatgcggatggcagaaagcccgtcctcggcagagacacgcttctttccgctgctctgcacacccaaccggcagagcatggcttcggcattgagattatcgctctccttcattatctgtttcaccacatcctgcacggaagtttcataggaagccatccgtacggagaggctgtcttgccggaactcaccgaagaggtaagaagaagcagtggaagagggcttacccgtttcaaaagcttcggattccgctacttcattctccggactttccgcttctgccgccggaatgcaccggatgcctcgtgcctgcaaccgttccataaaggtatgcatgaagaagtcctgcgaagaaaatatattgaccgtacctgcacggcgggcatcgacgttgcccgtcacggtgatgttgttcccgttcaccagccagtcgcgcgacacacggaaacgtccggcagaaggggtacggctttgggtcttgttcgtcagtgtataataggaagaggcgggagtgcattcaaggcgtgcgctgtcgccccgttcgccgggtgtggcggtaaccttcaccactcctttattcagcatcagcggtgagaggtagggctggaaggaatagggagtatcatcccacaaccagccgctgccccagtacaaggagtctttcatggagacatctccatacaccttgcctttgatgacagagaaggggaaacgggccacggtagccaccagggaatccaatgcctcttcatcaaactccgggtcgtaaccgcctatcacatacatatccccctgcaaggtatcgcgctcaatggttccctgataccacacttccgtacggaacggctcgtcggcttcgggacgggaaagggcggtaatggtggtcagcagcttcatggtggaagcgggacgggaaagcttgtccgcctgatagccgtacaagggctttccggcagtcaggtcatagaccgaaatggccacattagagcctgcgggaagtttgtgttctatcaacgcatcaatccgcgcagagagcggcttcaccggagttaccgtctcttggggccataatgggagcaggcagacggataaaattaacagcaacaatatccttttcataaatatatttatctttaaaggcaaaagtacgacaatcttacaaatgaacaacaacgaggtagtcttttcataaattatatccagccatccatcttaatattcctttaaaaatactacttttgcatagattgcataggcaaaatctcccagttactatcactctaaaattgatgtaccatgaaactacaacttacaattgccagctttacaatatgcctccttttctcccccatgcttcgggcacaagaatctccgcgcattgtcagttatgacttaaccgtacagattgatgtaccgaaccgacaagtcgaagttggcggttcgtttgaagttgatttccaggacagtgactcaatctcgttggtactatggcgccatgcccgtatcgacacactacgccacagcagccgggagataacctaccgtttcgatacgcttgccccggcacctgcccaattcattcccgacggacggaccttgaccctctaccggccggcaggagccgatgaccgctgccgcataaatacccgttacacactctacatgcaggaagtgcagggccctgcaaaatcattcaatgaccattggattgaacttggttactatacgggatggtatcctgtctgcaacggtaaccgggcagattattcgcacttacgaatcggcatcactgacggttatacggtgagcggctcaggtattatttcccatacagaagaagggatgtgggaaatggaacaaccttgggagaatttcgacaatgttatcctggcttcacccatgctgaaaagccgccgcatcaatgataacggaactaccattgaacttatctatacagacttcccggatgccggtgcagactcggcacttcaatgttgccacaatgccttgaaattcttccgacgcctttataaaattgcgggagatgaggatatttacatgaaattcctgctttcagcttccggcacctcaggagggtacagccgtaaaaatttcattatgctcagttcccgaacattcaatgaatatgtactcaagaacaccgcccacgaaatcggccacttctggtggaacaaggctccggtggaatcttggcacgactggctgaacgaatcttttgccgaattcagtgctttgcaatacatacgccacgcccgcggcgaaaaagcctatgccgcttacatcgacgcctaccgtaaggaaacacgccatatccgtcctatctggggtattgaccgcaacgaccgcgaagcgcatcttgccctctataggaaagggtcagtactactcgccgacctgcttgtccgagtgggtgaagaacctttcttcaactttctggcaggtgtcatccaagcccatataacagacacatcggctttcctggattttgcggaaagccgattgggacgtaaaaaccgggactggattgaaaagcggttaaaagaataaacacctgattattcttcaactgttcctttcgccaccggcttctcaaaatgagtgccgcacttcctgcatacatactcccaatgctcagtgcccggaggtgcggccgacaatgccgcaataacagcagccaccacagcacgcacccgatggctcttcttcagcacaaacttaatctcatccgaaccgcaatgggggcagtacctcaactgttccggaatcatctggttccgttcaagcagacggagggcattgtcatattcgtcctcatagacaaatatatccactcccgtgacatcacggacatatccgcgcatcacggaagacatgttttcattatgcaaaacagacgcaatgccctcattctccaaggcaccctgaatgacgtgtgcctggaaggcatcgtcacaggtgattagctttacggttttcatcttttatgtttatatgaaacaatagtcatggggtctacaatgcctccttgaatatctctcccaccgtggggtgcggaaagacaatcttcttccattcatcggcagtaagtttcagctcgatggccatgcctgccaacgttatgatttctgaagcgggattgcccaagacatgtgctcccaatacggtatcgtcactgcccaacagtaacttgcagacaccgttcacaccttcgttctcggcgacgaaacggccactataggccatcggcagctttacggcacgataggcaatgcctctcttctgcagggattcttctgtctcgcccacactggctatttcgggattggtatacaccacgccggggatggcacgataactcatagtgtccttccggccaatgatggaatgtatggctacttccgcctcgcggacggctgtatgcgccagcaaggaatatcccgtcaagtcgccgcaagcatatactccgggaactgaagtctgcatctgtccgttgacaaagacatttccgcgctccgttctttccaagcccagattctccaatccgaagcctttcattaccggacggcgcccgacactcatcagaagccgttcggcaacgacggaaccgggaccatcggctgtttcataattcacctggataagggaagaagcttcggcagtatccggcatgacagacactacttttgcactcagcatgaacttgattccccgcttggcgtactctgcacggagcatacccgccagctctcggtccataccgcctcccagtatctcgtccagcatctcgacgacggttacctgcactcccaggctgttgaagaaagaagcgaactccataccgatgacaccgccgccgatgatggcaagcgaagcgggcagttccttgttgtccagcgcgtcacgatgggtccagtaaggcaccttgtctatgccgggaatggcagggacaaaggtttcggaaccggtgcagagcagcaggttctcgcattcgtaggtttctccgccgcactccacatgattcttgtccgtcactgtggcctctccgctgacaatcgtcacaccatgggcagtcagctttcctttgattcccaataccagcttgcgtactaccttctgcttgcgggcaataatcttgggcaaatcaaacgatacttcgggcacactgaccgcatacttcgaagcatggcgggctccgtcataggtcttggccgaatacaacaaggtcttggtagggatacacccttcattcaggcacactccaccgagactctgcttctcaaatagtacgacactcaatcctgcttttccggcagcttcggcagcagtatatcccgcaggacctccaccgataatggcaacttggtatttcatggaattaatggttagtggttaatgattagcgataatttgtgcgcaagttaataaaacccgtattatccggcaaaaaagagtacttctttctttcggagaatacagcgtaaagaggaaataattatctttgtcgtgcagcatttacaaagaatgccacgtccaatggacataatcaaataataaccaacatgaaaacgactgacttattccaatccatccttttgttcgctcttttcctttgcggcctgacggcttgcaatgatagcgatgaaatccgcctctcgccctttcaggaaactaccgtgaagggcgaagcctctaccctgcagatagacctaacacgcggcgactggcgcataacctccatcaccaccccatggggagacctcatgatggatggcaacaagctcccacaactggaaggtacgggaagcctgcattataaatggtgggacttggaacgggacaccgacagccatctcatcctgcactttaaagacaactttgacttaggtgaatcccgtagcctcatcatcaaccttgagatgaaaacgggactctacaaggaacaaatcatcatacaccaagaaccgtgcactaacttctatcagatagagtccatcgaatacagcgtggaagaaggtgacggagtgaaagaagccggaacaggacctgataagagtacctataaaaatgaaaatctgggaaacacaaccgacaagcatgactactatccattcatcaataaatggacagaatacgcattcatacccgatgggcactctgatgaaaccttcaaaagcatagacccggagaaacgtagcatctatctgcccaaccacatagaagacggaaaaataatcatgggacaacaactgttattcttcatcaaccaaggcaagtattacaaagaagacgaactgagatataaacattttgaagtagacatagtaggtatgaaatggaacatatacacttcaaccatctactacaaacggcttcaagtgacattcaccgccactctttcacgtcccggtagcgatacaaagaaggtactcaagggtaaattcatgcagagatacccttatgactgctcggaaatacatcacgaagtaaaggattctttagaagattagagtccggtgtctgtcagacaagactccacctcctccctgctcaatgccggagcttgcccatcggcaagcttacggcataccagccgaccggccgccagcgcttccacctttgttgcaaatggcaggcgaccgctcaaagcaggtataaaaggttgatatatcagggtatcggctccatgcagcaccacgtagccgtaaccgccttccacctccatcacccggcatttcaactcattgccaccgccggcagtatgacccgaacagcaagaaaggcataccgccatcacagccggtacacctatctttatcataataaacatcagcttcataagttccgttcaattatggggcgaatcagacttcctcttcctcatcgggtagaagttcgtacacatcatcaaagtagctggtaccacttgttcccgtcagcacaaaaccacgttcgccggtagagaaaccaacggcagccctgcgcgaagaagcaccggaaggataattatgtacatctgtaatgggggtaaagtcgtcatcggaatcgccgtaccataagtccttgtcagggtcgtacagccagtagtcgctgctcaaggaagtgctgttacgtattcccgtagccacaaatccccttccaccgatgacgaaggatacggcttcggaccgtgtgatggcgtagtcatcgtcatagtcgttgtcggagtccgtattggcaatgtcacgcaactgggtccagttgcttccgtcgaacttccagaaatccaccaggtcagtactgttgtttcgcccgcaacagatgtaggccacctcatcgatgacgaatgccgtaccgaagtagcgcttctcgcctccatacccgctcaccgcttcccattgcgaaccttcggctccattgggattgaaacggtaaaagtccatcttgtaggcactctcgctgccggtagcgtcgctgttgcagcccgtaccgacatagccatatccgcctatactgaaagccagggcaccgtcgcgtactccgcctttgaagtcgtctttccgtgtccaggtatccgtggcagggtcatactcccaggtatctgctacacagtaggacgaggagccgtcctttacggaaccggtcgtaatgtatcccttgccattcacggcaaagcccacggcagccttgcgcccggcaacgggcatgtcggcacactgcgtccagctgttccggctcatgtcatactcccaaaggtcgttcaggtaatccttgttcgctccgtagaagccgccacacaaatatccataattgccgatggtgaagccggaggcataagcgcggtacacaccgttatagctggctttcttcatccactgcccctgagtgtattcatcctcgtccgtacaactgccggcaatgcacacgatggccagcaacattattcctaccaatagtctgttcattgtttattgtttttttaatgattaagctttatacttcccactttccaaaacaagaagctgcgggaggtcctttttgtctgtccgcaaaagtaaaccaccgcaaccacaccgacaaaaataaccgacgaacagtccgaaattcccgttaaacgcctttaccgataaaaaccgtccgaacgccgatttttgtaggaagatataaaagttttgcctttcctttgccgccaactaaaagaacagaaatgaagaagtcattgtacagcttattcgcagtcctcgctatcttctgcgcctgccaggacgagaactcgcagcttggaaagagcctcgtggaaagctccttctataatgtatacgcagacacctgctcggtagacatcagcaccatcctgctagactccatagagacccggggcgacagcatctgccagctaggacattaccggagcagcgcctggggagaagtatccgccacctactatgccgaatactccacgtccgacttcacccccaacacagactatacctataccctcgactccctcgtactgcgaatgataccttcgggccatttctggggagataccctgacgcaacagcgcatctccatctaccggctgaaaagccctatcgtgctggacaacgacgaggacctttacaacagcaccgtactcccgacggaagataccccgctcttcagctttaccttcaccccctgcccggggcggaagaaggaagtaagcgtccgcctgcccgactcatggggacaacaactgctgaatgacctcgtggcccaggatgactacttcgatacccaagacaagttcaagaagaaattccccggactggtctttgttcccgaaaacgacgggcagtgtatcaccggattcatggtgaacgactctgccatgagcatcaacctccactatcaggaagtctccaaccagcggaccggacaagtgctgactttcagtgtaaacaccgactatgcctataccggtatccggcacgaccccaccggcacccaccttgcttccctgaaaagcggaatagagaacctcgtccactccagcgacatgggttgcctggcctatatgcagggattgacgggttactacaaccaactggaattcccctacctcaacagcctcggaagtgccggacagatagtctccatagagagcgccacactctacctctatcctctggcccggagctacaacgaagtgagccagcttcccaatgacatccgcctttatatcacggacgagaacaatgtgctggaggactacgtatacggcagtgacggcgtaaccgtacagaccggcgacctgaccatcgacgagatgtacgggaaagagacctactactccttcgacctcaccgaattcatccgcaacaactacggcacttcgggcatcaagcggcagaaactgctgatgagtctgacagacgaagaaagcaccaccaccttcaaccaggtcatcttcaccaacgaccccgaacaagaaaaccaatgcagattagacgtaagattcaaaatatacaacgagcaatgaaacgccattaccggattccccttctgctgtgcagtctgtgtacggcaagcctcaccgccgtggcccagaacaccaccaacctgcccacctccatgtacggagtgggcgaactgagtgccggtgacggcggacgttatgccggcatgggcaacacgggcatcgccctgaaccgtaccggatttctgaacacgctgaaccccgcagccatcacccgcatggacaccgcctgcttcacgttcgatgtgggtgcatctgcctcatatgcccgctactccttcctgagcgaacacagctccaacttcaccggcaaccccaaccgcatcagcatgggcttccgtgtcctgccgcgctggtatgcccttgtaggtgcagcaccatacagcagtgtgggctatgtcatccagaccgaagaagagatagagggaatgcccggcaactacacctactcgctctttgagggtacgggcggactataccggtgctacgtcaccaatgcctttgcactgagcaggcaactgtcggtcggcatcaacctggggatgatagcgggcacagtgacgcaaagcgaaacgcaggaaagcgccgtcgtaaagtacgaatcttctaaacaggccttttatgcggacttcggcatacattacgaatggggtgcgaccggacaacggaagtgggcggcagggctggtatttgctccctcccttcccatcagccacgacaatacactgacttacagcaactcatctaccagcgagaacctcgataaaggataccacagccgtacacaatatctgcccatgcacctcggcaccggcctcagcataaccaccgaacgctgggtgctgaccgccgactacaactacctggactggagccgcaactcctcctcctacacttccatgaaatacgagaaccagcacaaagtgaacctgggaggcagctacattaccaagccacgtctggcacgttccaccgagctgatgggtggaataggtttcggcaactcctatatcaacctgaaaggcgggaagatgcagtatctggaagccagtgtaggggcgagcttccccatccggtactcctatctttcgctgggcgccacctggcggaaacaactgaacacacgcagcaatctgatgcaggaaagccgattcagcctgaatctgaacttgacgttcggggaaaggatttcgagagcaaaactaaagtaatacaaggttccggttcaccacagattacacggattttacaccgaatgattatcatttgttggatctatatatgcaacgcgttgcatatatagatgcagcacgctggaactatagatccaacaaacaaagtatatagtatctgaaaacagggtattacaacactgccagcctggacacataccctttcaccctttcgcggtaagcatcgccaatggggacatccttctgctcgatgagcaatgtgctgcgcccgatggcgctgatgcagtccatgcggacaataaaagaacggtgtacgcggataaattcatcggccggaagtttttcttccatatacttcatgctacacaagctcaagataggcttaggggaatctttacagaaaatcttcacataatcgcccataccttctatatagtttatccgttccaggtcgagccgcatgatgcggttgtcacaccgcatgtaaatcaccttcggaacctcttccggaccttgcctttgcttgggggcggacgtacctgcatcctgcaaagagaaccagcgtgccgctttgctgacagactggaaaaacgtggagaaattgagcccgtccatcagatagtccaacgcatccagacggaaacattcggcagcatagcggtcggtgtctgtaatgaaaatgacacgagtggacgaggacaagagcctgcaaaaatccattccgttgatttcaccttcttccaccggatagatgccgacaaaataaacttccacttttgtctcataataatccttcagcgcttcaagaggattgccgtactttccgtgcaaagagagaaaaggaactttgccgatatactcttccaatcttccggcaatctccgggtccgcatgcaaaatggcacaattcaagttcatatccgtttcttttttacataatggacgctgccacatccaaaaaactgcaaacagaagagctaaaattaagctttatttatgattcaaaaacaatctgcctctacggaaagactatattatcaggaaaataaagtgcttattatgaacagtttcaaaaaataaacttatctttgcatgtacatccccacaaaaagtaaaggctatgaaacaacagaaactattccacctcgtattgtccgccatgctgattgtctgcacgaccggctgttatgataaagacgaaattaaagatgctgaaaaatatctgttcaaagatattcaatactcttttgaagaaggggatggattcagtacgtatgatgtagagctcctgcccttcatcatggaaaacaatttaaacaatagtatcaccaccacaaactcccccttcgaagacacatggcaggaaaccacctttcagagcaacgaccccgaagcatttgtatggatgggggaagaagatgtgttcatcaataccccttacatgtttggagatgaactattgttaagtggggcaaccataaaatatggcagcgaaacaacaaaagccaaaggtccaaacagcagtacttccaccatcagcatacaacctcactgtcggctcatcataaaaggaacactacactacagcaagcttgtagctacctatacgctgacattcgcaggtgaatatacaaaaacggaaaaacagataaagggaaagttcatacaaacaactccggaaagctacacaggagacattaccatggaaccgataacggcagattaaaacggaatcgcatacgtgggcacaccctattgctcaccctctccgttcctctagtaaccggataaactcctcctccttgacgggaagaagcactgcacacttgccctcgccatatttcacgagcacatagcgcatcaccgcaaaccgccctacctgcatggaagaagcacgctccacagaagtgatgtctttcatcagaatttccttactccgggagaaacggccgaaggacagcaccaacttcccgtcgggcgttacggtataggtggtatgaatcagcttctcgataataaccaccagccaaagcatgaaaatagcagccaggaacggagacttgtaccaaagcatatagacggcgagaatacctatcaggatgagaaacagatactgccccatagcaatgcgcgcatgaaagattcgattcattttatctgatttttgccgctaaggtacgtatttttatgataacaacttcttcattagcatctccatttttcgaacttccgtcacattcagcttgcggcagaccgaagcacataacaattctacccgttccggcgaaaaataaatcagttctgcaatctcctttacagactgtccaagagctaccagcatacatatcagttcttcatccttatccacctccggaatagactgataaagtttctctaaaaaagaaggataatgaaaaataaagatttcacggaatacagcctcacgagttccggacaacaaagcctccgaagcattgggagaatcttccgaaatcatttcgcgcaaagctctggcaatctcctgcatattaaaaggtgtcactgttttctttgttttcattgtatcttatttcaccattatacatatttacaatcgttttgatacaaatttgcaaaatatgcacaacctaaccataagaatacgatatacaatctgatatacaatttcatattatatttattatcaaataattaacaagaaacaaaaaaacaagtccattgttgtaaattttaaattaagaaattatatctttgccttacaaaacaaacagtccacaaaatatgaatgccaaaaaactttcatttttacttctgattctcgtagctgtagcctgcaccaaccgctccacctcttcggaacaagacgaagtgaggcattggaacaatgtccttcaacaaatcaatgccttactactcgaaaacaaagcgcaacaaacgttggatcttgccaaacagaccttgcccgaaatcctggaatcggcagaaaaaaacggaactacagataccctgatttactatgcccgcaagatatttaatgcctgcgggaacaattacataaacaccaaacaatacaaagacggcatcgactatatggacagcattggaaaccatcccctcatccgcgaacattgcccacacgaattgctgagcttcaaggccggactgaaccaactgtatggcaataacccggaagctgtccgactggcagaagactacctccagttaccggtctgtaccagtgccaatgactttatccggcaggcagaaatcataagcggtgtctacatgtactccggaaacaatctacccaaagccatccaaatcttggaaaaagcaatagatgtctaccggaaaggcggaaacttcccgaacatgctgcggataatgtcacggttgggcatctattaccacctcagtggtgaatacgagaaagctatagccactaaccaagaggccatagccacttacaacgacagcatagcacctggaaatgtagtgattgcctacggagaacaagctaatctctacgccgaactgggtatgtacgaccaggccctggaaatgaacaaaaaagcccaatactactccatgctgaaagacagcttcggactgggagacttgtaccgctaccgtgcccagatctttcgtaacatgaatcaaaaggactctgtattccactacctcaggctgggagaaaagttgtcaatgatacaaaacagctttaagggcgtattcgtaaacaaagtagaaacggtaaacagttatctggactatcccgactctttggaaaaagcactgcaacttgcccttagcatctgtcccgataccgtgcggatgccccaatgggccaaataccaactcaacctccacctaggccgggccttactgcaaaccgggaaggaacaaaacggcatacgcctgatagaccgggctgcacaagacctcatcaacatgaagttcatggaaggccgcgatgccaacgagatattaatggattactatctggccaaaggcatgaacgacgattttgctcgttgctacatccgtaaccgacagtttgccgattctctggacaataacgaaaagaaacgtgctgtggcagcagccaacatccggtttgatgccaaccaaaaagagaaagaaaacaaactgctctcgacacaagtgcaatggcagcaacagcagttgttctacaacatctgcatctccattacattactgttgctacttatcaccactacagcctatttcatcatccgaaggaaggccaaccaccagcttatagaaaacaacaaacgggaaatacagaccctcattacccggcagcaagacctgaaccgccgcaacgaacaactgacggaagaaatagaacgggccatggctaccaataacctcaactccattcgccagctcaccgtgcaaagcctgctcagcagggaagatgagaacacattccgccggtcgtttgccaccatacatccttcttatctgcccaagctccgcgaaagttatcctcaactgacccgcaacgaagaattgctggccatgctcatctgcatgaaccaaagtaccgacgaaatagcccttatcatgggaatcaaccggaatagtgtaaacgtagtccgttcgcgcatgcgcaagaacatggaattgcccaaagaaaaatccctggatgaagtattgaaacaataccttacataacaaataaaaataagcccgcttattttgctctacgtttggtttacactatctttgcggcgtttaatacacaaaacctatggtaagaaagttcgattttctcgttatcggctccggacttgccggtatgagttttgcgctgaaagtagcgcataaaggaacagtagccctcatttgtaaggcaggtttggaagaggcaaacacttattttgcacaaggaggtatcgcctctgtcaccaatctggccgtagacaattttgaaaagcatatcgaagataccatgattgcgggtgactggataagcgaccgtgaagccgtagagaaggtggtgcgcaatgcccccgaacaaatcaaggagcttatcaaatggggagtgaacttcgacaaaaaggaggacggagagtttgacctgcacaaagaaggcggccactccgaattccgcatcctccaccataaggacaatacgggtgcagagatacagaccagcctcattgaagctgtgaagcaacaccccaacatcaccgtactgaccgaccattacgctgtggaaatcattacccagcatcaccagggaatcatcgttacccgccacacccccggcatcaagtgctacggtgcctatgtgctgaacgaagcgacgggcgaggtggataccttcctttccaaagtcaccatcatggcaacgggcggttgcgaagccgtttaccgccataccaccaacccgctggtggccacgggagacggcattgccatggtctaccgtgccaagggagcagtgaaagacatggaattcatccagttccatcccacagcccttttccatccgggagaccgcccctcgttcctcatcaccgaagccatgcgcggttatggcggcgtgctgcgtaccaaagacggaaaagaattcatgcagaagtacgacccgcgactctcactggccccgcgtgacattgtggcgcgtgccatcgacaacgaaatgaaacagcgcggtgaggaccatgtgtatctggacgtcacccacaaagaccccgaagaaaccaagaagcacttccctaacatatacaagaaatgcctcagcatcggtatagacattacaaaggaatacataccggtagcccccgccgcccattatctctgcggtggcatcaaggtggatttggacggacagagcagcatccgccgcctgtacgccatcggcgaatgttcgtgcaccggactgcatggcggcaaccgtctggcaagcaactcactgattgaagccgtggtttatgccgacgcggcagccaaacacgcgctgagcgtactggaacgttatgacttcaacgaagacattcccgaatggaacgacgaaggtaccatttccaccgaagaacgtgtcctcatcacacaaagcatgaaggaagtgaaccagattatggaggcatacgtaggtattgtccgcagcaatacccggttgacacgtgcctggaaccgactggacatactttacgaggagacagaagcactcttcaagcggagcaaggctacccgagagctgtgcgaactgcgcaacatgataaacgtaggatacctgataacaaagcaagccatggaacgcaaggaaagccgcggactgcactacacgatagactatccgcacgccaagaaataaacataaatcctctccatcatgaggaaacaatatttctctttcatttttttgtatattttctcaagctgtctctacagtcagacgatggacgacaatatcatcatcaactgctgtgaagacagctatgtttttaaagaaggcccgggaaacaaccccatcgtacaaaacacccgaaagaccgaatatgaagcttcacgaatgggagctaccgtacaacctcatatgttctatggcgaattcatctctctggacgaagccaaagctaagggagtacttgcccccaaagccatccaccgccatgccacaccggaaaatgtattcttcgacgatacccgtatctgctacttcaacctctccctaagccggcaggggaaaaaggcggccgtacagttcaaccgtaccttccatgacctgcgctactttacacacatctactttccggaggaatacttcatccgcaagaaacgtatcaccgtcaccattcctgccgcactgtcccgtttccggctggtggagaagaacttcggtcccggcatccggtgtgaaaagagcgtgaataaggaaggggattccctttttgtctacaccttaaaaggagtgcctgccacccgaaaggaagaagctgctcccgcagacaactgcctctatccccatctgctggtgaccggtccctttgccgatgtacaggccatgtaccgctggctgaacggactggccgaggtggactgcactctcccccaagccgaaatgctgacggatgaaattactgccggatgcaccgatgaactggagaagatacgccgcacctatgcctacgtacagcagaacatacgctacatcgcctttgaaaacggattggcaggacatcggcccgaccggcctgccgaagtgctgcgcaagcgttacggcgactgcaagggaatggcactcctgctgcgcacattgctgaaagcccaaggattcgatgcccgaatggcctatatcggtacggacgacatcgccagttctcccgacgaagtgccgacactggctgccatcaaccatgccttctgccttcttttccatcaagggaaaagatattgcctggatgccacctaccgatacctaccgcccgaagacatcccccaaggtatacaaggccgaaaagcactggtagaaaacggagacagctgcctgatactgactcttccccagcaggatgcctctacctctacggacagtctcaattatcactatcgcttgatgacggacagcaatccccctaccctgaaaggcaccgccatccgcgtaagtacgggcgaatacaaggaatacctgctcagtctctaccatgacacccccaaggagaagcagacagacctgctaaacaatcagataaacaataccgctgccgtacaatcggccgatggagagtactgcctcgaagcagacccgcacgaagatttcttccaccagcccattgacaccacccgccgcaagcaggattacctactgccgtggagatgccgtattatacgcgaggtaacgattgatattccacaaggatatgccgtgtcttatttgcctgcagactttcacattgaaacgaatcagggcatcctcagttgctcctaccgcgccggagcaggatatatccacttccgaaaagtgatggagatacgcagaaaacgtattccacttgctcttatccctgcttggaatgatgccctgcgacaatggaaaaaagcctgcaacgaacagatagtaatccggcaaaacaccctttaaacaaataattgaatataaaacgccatcaccatgaaaacaacacgttttttcctactgctgctgatgttacttgccacttcgggactgaatgcccaaaaggaagaagacaaatatgctgcgctcgtaagcgaagtgcgcaatgaagtatggtcgctgaacctgcccgactttaaaaatatgactgtacccgagaaatacagaaacgaacccgccgttatccttgccgtacacagccgtctggaggtaacccggaaaaccaagttggactggtggggaatgggattgaccaaacaacagataacctgccgcagcatctaccgccaaatggtatacatcaacagccaaagtgcactggaagagatgtcacagttcagcttcctttcccaggaaaaagaacgctacacccgtaatgaacaacagtgtatactgggtgtgcgcatcatcaaaccggacggaacaattcaggaaacagacccgcaggagtacatggaaaccgatgaaggcggccacccacgtagccgcaacatccaagagaaatggaacaagctggccgtacccggactggaaatcggagacatcatcgacttgttcttcgtacgatacaccatactgaacaaccagaatcccgaacctttcggtttttactttatggacagctatcctctgcttgcctattccgtccattgcgagatagacccgaagctgagcactttctaccgttgcctgaacggagcaagggacttcgaccatagcaccgataccgaaggaaaccatatcctcgacttgcataccggagactccggacgtgtcattcccgacttctggtacaacagtgcccggcaaacgcccatgattctgatgtacatctacaacagcaagacaccctatgcctggatgccacccagcgcccgcaagccgggactatatgccaaccccaatccaaaactgatgacagatgacacacgtgcctccatgaaggctcccggcaccaactggtccggtctgcgcagcggacggaaaggcgaaatatccaaagccctcaaagcccgtcaagccgaaggatggagcgataagaaactgatggactacctctaccaatactgctattaccggtatatggaaaacggtgcagactatactcccgccagtttcatcctgctgatgcacgaacttctggaaaaagcaggtattccccaccggacaggaatcacgaccaaagatactcgggagcctctggaccagctcatcaactacagcaataccacttggtttatctatctggaatccaacggaaaatgctatactccaccggcctgctatgctgttcccggtgaagtgcctgccagcctgcaaggcgaagaagccatactggaagacaacacatgccttacccttccctccaccaccccccaagacaaccgggatatggctaccataaacgcttctataagcggcaccactctccacatcagccgccgggaagagatgagcggtgctctgaaagaacacttccaaccctacctcattatggacgaggacctttacaactccgttcgtcgccaactgggtattacagccaccatctacgacgaaaccaaagaaaaattccatgccgacctgcgcgaaagttaccgccgtgaacgggagcaggagaaagagcgttaccgtaatgaaatcatcggttatcatggctcggaagaaggactggaaacactcctcggctaccagcttttcagcatcggaaaccgggcagacagtgcggcacttgcctatcaagtggactatgtactggacggatacgtaaagaaagcgggtacaaactttgttctctccgtaggtcggttgataggatcacagccagagctgaaaggcgaacaacgcctgcgcaaggaggacatttattgggagatgccccgttgttaccaatgggacatcacagtcaatctgccggaaggttatcgaatttctcccgaaggcctggaaagactgaacgtaaaagtagaaaacgactgcggcgctttcattgtccaagccaccactgaagacggaacattaagaataaaagccgaaaaacgcatcaaccacaagacggaaccggtagccaactgggagaaactgcttgaaataaccgatgctgccaacagttatgaagcactttcaatagtgttccaagcaaccattaatccccctacatcgccaacaaccggctattaatccttctctgcccgctgcagcatcgccatacacagcttgctgtcgtactgtacagccactgcaaaacgactgcatactttttgcagcgtcactgcataccggtttgcagcagcactgcaacagttttgcagtcgcactgcaatttgtttgcagtgacgctgcagcaaatgtgcagcaattacaagctatatgactgtcacagcaaacaaaaagccccgcagagcttgctttcgctctgcgggactttgttctctctatgaggaaattatcatcaatagtttgacttctttacttcgaaataagcctgcggatgcaagcaagccggacatacctgaggagcttccttaccggtgtagatgaaaccacagttgcggcactgccataccacttcgccttccttggcaaatacgctggcagtctctatattctggataaaagcgcgataacgttcttcgtgtcccttttcggcaatggcgatgttacggtacataagagcgatttcggggaaaccttcttcgtctgcaatatcagcaaacttaggataatccaatgaccattcttcgtgttcgccggcagcagcttcctgaagattttccagggtagtgccgataacacctgcaggataagaagcggtgatttccaccataccgccttccagccacttgaacatacgtttagcgtgttccttttcctggtcagccgtttctgtgaaaatagcggcgatttgttcgtaaccttctttcttggctacacttgcaaaataagtgtaacgcattcttgcttgtgattcaccagcgaatgaagtcagcagattcttctcagtctgagttcctttaacacttttagccatagtctctttttttattagttaatataattacgtataaatgtcgttcgtactgtttataaacaacacaaaattacgaatttaatttggaataatcacacctcttccccatcggatttatttatcgtcttatagaaagaatctatcttcaccgataacccgaagaggcatttcagacataattaatagcacatatctgataaggaaaacaaaatacatcacagttgtgttcactaatatccattattttatctacttttgcaggcaatttgcaatatatacattacattctgtataaaaaaacgtataaaaaagtagattataatgaaagcgttcggattcagaccaaagctatacacggctttaaaaaattactctaaagaactgttcatggcagacctgatggcaggtatcattgtaggtatcgttgccctcccgcttgccattgcattcggtatcgcctccggcgtatcaccggagaaaggtatcattacggctatcatagccggtttcatcatctccctgatgggtgggagcaaggtacagattggaggaccgaccggtgcgttcatcgtcattatctatggcatcatccagcaatacggtgaatcggggcttattgtcgccacactgatggcaggcgtactgcttatcctgctgggagttttcaagctgggagctgtcattaagtttatcccctatcccatcatcgtaggttttacaagcggtattgccgtcaccatcttcactacgcagattgccgacattttcgggctgacgttcggaggagagaaagttccgggagactttgtaggaaaatggatgatttatttccgacatttcgataccgtaaactggtggaacacgattgtaagtattgtcagcatcttcatcattgccattacaccgcggttctcgaagaagattccggggtcacttattgccatcatcgtggtgacagtggcagtctggctgatgaaagtatatggaggcattgattgtatcgataccatcggcgaccgtttcagcatccgtgccgaactgccggatgccgtgatgcctgccctggattgggaagcgataaagaacttgttccccgtagccattacaatcgctgtactgggtgccatcgaatctttgctgtctgccaccgtggccgatggtgtgataggcgacaaacacgattccaacacggaactgatagcacaaggtgttgccaacatggctaccccgctgtttggcggtatccctgccaccggagccatcgcgcgtaccatggcaaacatcaacaacggaggaaaaactcccgtagcaggcatggtgcatgcagtggtattgctgcttatcctactgttcctcatgccgctggcacagtatatcccaatggcttgcctggcgggtgtactggtcatagtatcctataacatgagtggttggcgtacgttcaaggcattattgaagaatcctaaatcggatgtcacggtactgctgattactttcttcctgaccgtcatcttcgacctgactattgccattgaagtaggtctggtgattgcctgcgtgctgtttatgcgccgcgtcatggagactaccgaaatatccgtcatcaaagatgaaatagacccgaatgcagaatcggacattgcaagcaatgacgagcacctgataatccccgaggatgtggaagtatatgaaataaacggtccttacttcttcggcatcgccaccaaattcgaagaaatcatggcgcggctgggcgaccgccccaaagtgcgcatcatccgcatgcgtaaagttccgttcatcgattctaccggtatccacaacttgacaagcctttgtgagatgtcccaaaaggaaaaaataaccattgtgctctccggtgtcaatgaaaaggtacataaggtactggaaaaatcgggcttctatgagctgttgggcgaagaaaatatctgtccgaacataaatgtggcactggaaagggccaaaatgattatccaacactaatcccggcatggcacgaaaaaaaaagaaacaatcgcaaggcgtctattatcttatattgtttatatgtgcggtctgccttgcctatgaacccgttgcaaagatactttcggatgccaggcaaaagagttctacgcctgccaaaatagaactcacggcaggcacacgccttgaaataccggcaaagctgaagaacgtctccgaacagattctccagcggaaaggctacacagtatcctacaacaaagatttaaagatacccaactgggtagcctgggaactcactcccgaaaaactggtggagcgtgaaagccgtacagacaagttcctgcccgaccccgacctgcctgagcacgaggcagtaaccaccgatgactacaaaggagccggcatggaccgcggacatatgtgtccggccggtgacaaccgctggcactggaaagccatgcaagagagcttctacacgacaaacatttgcccgcagaaccacaatctaaaccgtggcgactggaaagaactggaagagtcatgccgccgttgggcacaagaagaaggcaagatatacattgtatgcggtcctattctctatgaccaacgtcaccgcaccattggtaagaagcacaaaattacagtgcccgaagcattcttcaaggtcgttctgtgtgcagacagcaatccccccaaagccatcggcttcatttataagaatgcatcaggcaatcatccgttggacagctacgtcaatacagtggacgaagtggaacgtattacaggtatcgacttcttccccgcccttccggatgaaatagaagagaaggtggaagccgaatatgacttgaaactgtggtaaaggagctattcctttacccaggcatctacaatctcggctacataaacccggtgcaatccaccgtggtcaccgccataccaacgctcgtagacggaatggtcgagaaagagttcttctttcatatcggtaatgaaaagcttgcggcactccaatcccaggcggtcctgctcaaagagaatgtttccccgctcggtaacgataggattcagaccagtttcctttaccttatccacttccctacccgatttactgccacaaaggttgtaaatgctccggttttcctttcctaaaaaagaaagggtgaaatattcgttctcctccataaactcatacgtatagcgctcggaacgaataaagacaaacaccaccggcttgttccaaagccagccaatacctccccaactggcagtcatggtgttgaaatgttctttactgcctgccgtaaccagcatccactctttgcctatcacttcgaagaagttctcgcttaaatctttaattgctattgatttcataagtatattattaataagaaacacttaccgatatacccgtttcccgtatccgttccgcaatgcgatccagttcctcgcgggtggccttctgcaaatcatggtcgggcgtttcgcggtcgatggtataaatcatcacttggcggggagcaatctccttgacagcttccagccagggaagaacaaatttatcggatgtattatccatatcttgtcctttataacttcctttgagaaacatggtctggataatgcagttccctttgaacgctttcatcccttctataatctcccggatggagtaatgtccggtaggacggtcaagtacacggatatactcttcatccaccgtatccagtttaaggatgttgttgtcaatcttgttcaaagcctcgaatacggcaggacgatgaataaaggtagaattgctcagtacgctcacctttgcattcggaaaatacttgtcgcgcaaggcaagtgtatcttctatgatttcagggaaacggggatgtgccgtcggttctccattaccggcaaaagtcagtacatccggtgtaggtccgttttgctgcatgtcccgcagacgggcttcaagggccgaacggacttcttcgcgcgtaggcaacggctgtttgggacgatggtcggcattgaaaccacattcacagtaaatacagtcgaaggtgcatactttgccgtctgccggcaataaatttattcccaaagatactcccagacggcgggaatgaacgggaccgaatatgggggatggataaatgacagtcatactatttacgatttgacgatttacggtttgattaatgcttaaacaatcttaccgctccaaagttaagtgaaaactatggtatctggcaatgttcggcttgcaaaagtttacccataaaagaaaatattccctttataaagcatacatctcatgttaaaaaagtaaatcatacattacattttatctattttacttgtttatatgtaaagtatacattacatttgcagatagcatctaaatgcatagtattatgagaaagaactatttatttccaaccactttcagaaagataggttggtgtttatttgtcccattcgccatcacgtccttcatctgccttttcgacggcagcaatgaagattggttgaaggtaaacgcgttgtcagtaattccctggggtattatcaagaactctttattcgacgagttgagtatgatagggcttacggtttcactcttgttcatagctttctcaaaagaaaaggacgaagatgaatgcattgccaatattcgttcaaactctcttatctgggctaccataacagcgtattccctactgatagtatgcactatgctgatttatgacatgcaatatcttaattttgtatttatagacttgttcatgatattgtttctgttcatcataaagtacaacattgaactttataaatttaggaggagcaacaatgactaatacattaagggtagaaagagccatcaagcatatgacccaacagcaattggctgaagccataggagtgagccggcaaaccatcaatgccatagaatcgggaaagtatgtcccttccaccttgctgtcattgaaaatatcagagatattcggaaagactgtaaatgaaattttcatgttggaagaaagtgacagataaagagaagactctaaaaaactgttttaattttatttcagttttcttctgaggcaacctgaaaaataaaattaaaacagtttctaaaacttgatacgcagttgcatctgcaagtccgctttcctatttcccggtatctcatcattgcccgaaccaatcgtctccctatcctgataaaccgtctgtccgaatttggcaagaaacatgaagttcttactcaaatcatatcgcagatgagcggagtaacggaaccctttgccatagaaggaaggggtatagaaagtatataacaatccacgctcggaggcgtaaacacgcgaatcgtaatcgtccgtatgaaaccaggttccctgcacggaaactgacagagggaaggggaaagtgtacgagcaaagttgagtacactgataaccttgccgtctatcaaagcgataccctttcccatcctgctgacggaagtggttataatctattgtagtacgaaagatatatcttcccggcatataggtcagccgataacggagtttatggtgatagataggttcgataactgcaccgcttgtacccgtcacgtctctttctttctgtttgtaccgataattaaaatacatcgaaaggctctttcgaggagtataagtaacctgaaacatggcatccactccctttgagggcttacttatacggtatttccaccaaggaaaagaaaacacatccagtgaagtgaaaaacttccaccgggcgaaaggtgtggcctctgctgccagataccatccgttctcattctgcggcatactgctttcgccaaaggaacgcccaaacaaagtccaataatcatatgaataataccggtgaacaagtagcagatgataatcggaagaaagattatacttcagccggttcagcaacgcatagcctttactgccggttgccgcttcccccacccagacaaaacggcccagacgatacctataatccatgcccacattatagaaatcacttccatgaagattgtactttgcatacttgttcaaccgaggcttgtaaggacggtcgaaaaaatagtaaatccccgtcactcccaccttcagagagttcttttcataggtcatgtttccacctatcacctgcaaggcaaaggcattcattttatctgcctccttctgcgtgcgatgcaatcccgtcttgtaaatggaagttatctcgccatcctccaccacaccgtccatggagcgatgcgaatagaaagccgaaatatccaagtaaggcaatactcccaccgttgccgccactccccggaaataattgtactcatcagtagaactatgcttacggatgcctccggtacgatattctgttgtagacatagagaatgtttttcctaaacgaaaatccgtactaagtaccagtccctgcccgaagctcagacggtaattgcccaatgccaaagccttcagccgccccagattctttatcagaaaatagaaagaatagtaatcatagccttttctgttgtgcagggcaaagaagggttctccggcatccttctctcccgtcacgcctatttggagataatctccataatgaaaattatagcgcaaagaatggtaaagggaaggtcccaggtaattcttctcatatcctttacggatatagaacggtacatccaaacgtgccaatgtttcgtgtttcccgtatttcagtatagattttaaagcaggataccccctacccgctttcactgcctgcacacagacaaagggcaacagtaggtcgatggtacgtttatccatctcctccaccagctgcaattcataaatggtctgcatctgtccgtgtatatagacataagccagaagattctctatctgtatatccgtaagaaaaggaaactgctccaattgccgtttagtggcggcattgaggttgacaggctcttgcagacgtcgggacaactcctccaattcatcttcccaaccgtattcttcctcattcccgatggagagttgttccaaattttcttccaaaagaagtaaaggctgttctttctgaaggccggatatattttgagcttcaagcataggagtcattgacagcatacttacaaaaactcctatcttgagtaattccattaatagtaggtcactttcatgttttgggaagcgaagttaccttaaataagttaattgagcaaggaaaaatcaacatgatgcaacaacattacacagaatggtgtacttttgcaacatgaacgcaaggcttaacatagtaatactcatcatgtttctttctctcggaagcctgaaatgctttgcacagcagcaaccacagtctgctgcgcaaaagagtgtctatcttactcccatgtgcgtttacgaaggagataccatcccttatgtcaagctccccactgtctacatcttcaagccgcttaaattcaagaacaagcgcgacatgaacaagtactacaaactcattcgtgacgtaaagaaggtacttcccatctccaaggagattaaccgtgccatcattgaaacctacgaatacatgatgaccctgcccaccgagaaagcccgccagaaacacatgaaagcagtagagaaaagcttgaaggagcaatacactccccgcatgaagaaacttacctttgcccaaggcaaactgttaataaaactggtagaccgacagaccaactccaccggatatgaactggtaaaagcttttatgggccctttcaaagccggtttctaccagacttttgccgcactcttcggcgccagtctaaagaagcaatacgaccctatgggagacgatgcattgaccgaacgggtgatattgatggtagaaagcggacaattataaactgatgtttattcccgccttgcgtgcctgcgaatgttgaaattggcgtttcacattatatgtctttccgtctttgacgaacttagaaccggtctgcttgaaccagaagtccactttattttccacacaaattctgcgaaggtccatcacccattcaaaatcacaagggcgggcttcgtaaccggattctccccctgcaactatctgttcaatccattcgccaacagcataagtacttaaatctatcctttccagcagcggttcacagattattatcttatgctttatgggagccctcttataaatgggcaagcgataatcggcgcaagcctggttttcaaccgtacagcagatggttacattatcatatccgtctccccaatcatcgggcagacagtcagaaaaacggtctatacgcttggtaatcatcataaaatgcaggtcactgcgacaacgaatcatctcccatgcttcggcccgccatttgtcagcatcttccacaaagaaatcggaagtaaagcaggtgtagacaaatgttccaggtggtatcttgaattctccgttacgctttttacgcaaaggcaggtcaaagttttttgtccgcaccaccaccgaactgtccacctctcgccgggcatcaccacgataaacataacaatgcttacaacctgcactcaatttatggcaaccatgccataagttccacatcatcgacttcgcaacaataccgttcattcaaacaaaaaacttatcgttaacaccatgttgaaaactatgttagcaacacaaataattagttattaaacaattgatattaagctatatattcagttaataatagaatgaacaattgtttattactacctattcgggttgtacctctcctgccatcggaagctctttccaaccttcaccaaatgcatcataagcatcggtaaccactacaaaagcctttgggtctacttcccttatcttctgcttgatacctaccacttccttgtaactcaccacaagaaacagcatttccttgtctacattggtataaagaccactactcttgatgcaagtggctgtacggtccaaatctttaagaatatagtcgtgcaaagcggtaaggcgcatatcactgatgacaaacagtatcttgtcattcttctccccatttatcacataggccaataccctcgaagtgacaaaaatagctatcagtgaatagaaagacaaatgccacgaaggttgtgtagcatcatccggatttccgataccgaaaccgataaccaataggccgaatcccaccacaataccatctaccagcagtatcgcctttgaaaaacgtatatggcaatatttctgcaatatcatcgccacaatatccgtacctcctgtagtagcccggctacgcactacaataccacagcctataccgataaccaccgcaccaatcacagaagtcagcatcaaatggtcggacatattcagactgccacccagcaactgtgtagggtccaactgatggagcgcttcttcagaaggataggagaggagagacagcacattcatggcaagcggagtgaatagtgccgccacgatagtacgtgctcccaattttgctcccagtaccagcacggaaatgataagcaaaggaatatcaaacatataaccgaaagtacctacctgaatagaagggaacagattatgaagcacaatactggctccatacaccccgccaggaacaagattataaggattgataaagtaaacaaaacctgctgccagaatagtacaacctacaaaaatgcctatccatgaagatattatctttttcatatcgatatgatttatatatattcagcaaatatacaaaaaataagaaaagacaccaactgtacagcaagttttccacatacaaccgatatgtgttgaatacatggttaacaaaaaggataaattaggagataaagcattaatttacaatgaatgaagtggttgattataaaaataaaccactgttcataaaatctctcatcatacctatatagaactagtttattggagctatagatgcaacacgctggatctatagatgcaccgtgttcgatctatagctccaacaaacccgatatattgacagcttattaacagccctgttattatctcagtttcttgaataaatcccaaataacaatacccgccgtaaccgatacattcaacgaatgctttgtgccgtattgaggaatttcaatgcaaccgtgcgaatggtcaatcacttcttgttgaacacccttcacttcatttcccattaccacagcatactttttagtcttgtccagcaccagttcgtccagcatcacactaccttctgcctgctctacagaataaacgatgtatccctcggattttaggttatcaacagcttcaacagagttatcaacatatttccaatctacggtaaattccgctcccaaagctgttttgtgcatctccggatggggtgggatagctgtaatgccacaaagataaatgcactcgatgcggaaagcatccgaagtacggaaaacggaacctatattatggagactgcggatattatccaataccactaccaaaggcagtttttcggcttccttaaattcctctacactaatacgattcagttcagttatcttcagtttacgcatgacaatatacttttaaatctccctgcaaagatacttttttccgtttatatcccggttaataaccgttgaaaaggtgtcaatataatagggaaacaattttaaaaataatccttgcattattcaaaggtctgcatattacagcagtgaaacgaacaaaccaaaaaagttaaggagaattttccaggcttcattcaacatatttttcagcctggtttcatcggtttataactctaaagttattaactttgcatattattaacaacatgttaatgctgtttagcagaagtcttattatcaacggataaacttaaaaaccccggtttataagcataagagtaaaattcagcttgatactaataacttcatgggcaagaaaaatcgtatttatttgtccacactattaacagcctatcatcactatcaaaggatttttaaagaagaaagagaaattaaaaaatataattatggataatcttatagaagctatcaagcagctgaagaaggagaagaacgcaatcattctgggccattactaccagaaaggtgaaatacaggatatagccgattacgtgggcgacagtctggctttggcacaatgggcagcccggacggaagcggacattatcgtgatgtgcggcgttcacttcatgggagaaacggcaaaggtgctttgtcccgacaagaaggtactggtgcccgatatggcggcaggctgttcgttggcagacagttgtccggcagacaaattcagtcagtttgtcaaagagcatcccggatatacggtgatatcctatgtgaacacaacggctgccgtaaaggcggtgaccgatgtggtggtaacttctaccaatgcaaagcagattgtggaaagcttccccaaagatgagaaaataatctttggcccggaccggaacttgggtaattatatcaactccattaccggaagaaatatgttattatgggatggcgcatgccatgtacacgaggaattctcggttgaaaagattgttgaaataaaacggcagcatcccgatgcggtggtactggcacatcccgaatgcaagagtacagtcttgaaactggctgatgtggtaggctctacggcagctttgctgaagtacgcagtggcacatcccgaaaagagctacattgtagctaccgaaagcggtatcctgcacgagatgcagaaacaatgcccgcagacaacatttattccggctcctcccaacgacagcacttgtgcctgcaatgaatgcagttacatgcggctgaatacactggaaaagctttatgattgtttgaaaaacgaatcaccggaaataaaggtggatgctgagattgcagaaaaagcagtgaaaccgattaagaggatgttggaaatatcggctcaactggggttataatgtgctgatatgccaatgtgccaatgacctttcggcgtgacagcgcagccaattagcacattggcatatcagcacattaaaaacattatctcattaagaacttacacaacttgttagtggccaatgcccggtgactgattttattcttcagttcattccccatttctgcaaaagtctgcgtatatccttcgggaatgaatatgggatcgtaaccgaagcctgaagcgccttttctgtttttcgtgatttctcctttcacgatgccttcaaacagatgttcctttccgtcgatgataagtacaaatacggtacggaattgtgccttacggttctcgatgccctccatatctttcagcaacttcttcatgtttgcttccgaattgtgtgcatcgccggcataacgggcggaatatacacccggtgccccaccaagggcctccacttccaaaccggtatcgtcggcaaaacagtccagatgatagttatcgaagatatatcttgctttcagcaaagcatttccttcaagtgtgtctgcagtttccggaatgtcagtatcgcatttgatatccttcatgctgagaagttcgaccttctctcccaaaatggcagtcacttcttccagtttgtgtgaattgttggtggcaaatacaaatttctttctcatattatgttctccttatacttgtggcttatacaagtccctatttcactttcaaccggtcgaaaccttctccgtatacaccgatgacggaactttgggaaatgaaagcgttcgggtctatatctttcaccatccggaatatttctaccgattggcgtttgtaggcaaggacgaccagtaccttcacgttgtgtttactgtaccagccgataccgtcgagtaccgttacaccgcgatgggtttctttggtgatgcggtcggcaatcttttcatattctttggagaaaataaagaattgaacggattgccgggcactgttgactatgtaatccagtacaaatccgatgacaaacaaagttacaaaaccgaatatcacgcgtcgccagtcatggaataccacatagcaggaactgatgataatgaagtcgcaagccataatcatgcgtcccagcgtgacatccttgtatttatggatgatggctgcaatgatgtccgtacctcccgtgctgccgttgcagttgaacacgatacccagtccggcaccgcacattgccgcacctatcaggcaagccatgaagtcttgtccttcgcccagcagttggggagggacgccgtccgaaccgttcaccagcaactgaaaaaaccataagaagaaagtgagtccgaagatggcaaacgtagtcttgatactgaacttcggtccgagtatcttgatggcaaaagtcatcagtacggcattgatgatgaagtatgaccactggatgggaaatccggtggcataatagatgatggcaccgataccggtagtacctccggtcgtaatctgatagggaatgaggaatgccgcccatcccagtgcatagctgatgagtcccagagtgatgaagatataatccttcagctctctcgtcacttccgctttggttggttttgtaatttgcatatctgttatttgacaacgatgttcacaatcttcttcggcactacgattactttgacgatggacttgccttccatccatttttcagaacgttcgtcggccaatacagcagtctggatggcatccgatgccgcatctgccgggaactccatgttgaaccgtgcttttccgttgaaggaaaccgtatagttgaccgtatcttccaccaggtattcttcgttgcataccggccacttggcatcgcatacggagcctgcattgcccagtgtctcccacaactcttcgcatacatgcggagcaaagggagccagaacgatgataaactggttcaggatttccttcttgctgcatttcattccgaacagctcgtttacacaaatcataaaggcactgatacttgtgttgtaagagaattgctcgatgtctcccgtcactttcttaatcagtttatggagggatttcagttcttccttggtggcaggttcatccgttaccagataattgtcgttgcggtcgtagaacagtgaccagaacttcttgatgaagcggtgcacaccgtctattccgtttgtatcccacggctttgattgttctaccgggccgaggaacatttcgtacatgcggagagtgtcggcaccgtatttgtcgacaatcatatcgggattgacaacgttgaacatggatttactcatcttttccacagcccatccgcagatgtacttgccgtcttccagaataaactcggcagtttcgtattctggacgccatgccttgaaggcttcaaggtccagaacatcattggatacgatattcacatccacgtggagtggggtagtgtcgtactggtctttcagattcagggacacgaatgtattggtatctttgatgcgatagacgaagttgctccgtccttgaatcatgccctggttcaccagcttttggaacggttcttcggctacggaaatgccgaggtcgtacaggaacttattccagaaacgggagtatatcaagtgaccggtggcatgttcggtaccgcctacgtaaaggtctacattgtgccagtactcatccgttttcttgtctacaagtgcctggttgttgtgtgggtccatgtagcgcagataataggcgcttgaaccggcaaatccgggcatagtattgagttccagcgggaagacggtgatgttgtctatcttttcgttttctacgacgcatttgtttacggtattccaagcccattttgcggcatgtcccaatggaggttcaccggtttcggtaggcaggaatttggctacttcgggcagttccaagggcagggcgctctcgtcaatcatgtaaggcatgttgtccttgtagtaaaccgggaacggctcgccccaatagcgctggcgtgagaagatggcatcgcgcagacggaagttcacctttacacgtcccaagttatgctctttcacatatttcttggtagcggcaatcgcttccttgatggtcagcccgttcagtgagaggtcgcaatagggagtaacgccttcgcgtggagagttgcatacaatgccttccttggcatcgaagctctcttcgcttacatcgcagccttctaccaacggacgaatttcgagaccgaagtgcttggcaaaagcatagtcacggctgtcgtgcgcaggcacagccatgatggcacccgtaccgtatcctgcaagtacatagtcgcttatccagatgggaactgcctcaccggtaaagggattgatggcatagcttccggagaatacaccggtaacgctacggtcggcaatacgttcgcgttcggtacgtttcttggtgcgttccagataagcgtttacttcatctttctgtgtgtcggtggtaagttgctgtaccagttcgctttcgggagccaataccatgaaggtgacgccgaacatggtatctgcacgggtggtgaagatagtgaattccaaatcgctgtcttttaccttgaattctatttcagcgccttcgctgcgtcctatccagttcttttgggtttctttcagggattcggtccagtcgatggtatcgagtccgtccagcaagcgttgtgcataggcagatacacggagacaccattgacgcatcttcttttgaatgacggggaagccgcctcgttcgcttacgccgtccaccacttcatcgttggcaagtacggttcccagctgagggcaccagtttaccatcgtctcgcccagataggctatacggtagttcatcaggatttcctgttgttccttttcgctcttggcattccactctgcggcggtgaaactcagttcttcgctgcaagccacgtttattccttcggtaccggtttggctgaatgcttcaatcagttcctggatgggacgtgcctgcttttcatcgttgcagtagtagctgttgaacatcttttggaatgcccattgggtccaatggtaatattccggttcgcaggtacggatttcgcggttccagtcgaaagagaaacctatcttatccaactgttcacggtatcggttgatattgttgacggtcgtaattgcagggtgctgtcccgtttgtatggcatattgttctgctggaagtccgtaagcgtcatatcccatgggattcagtacattgaaaccttgcagtcgtttgtagcgggcgtaaatatccgaagcaatatatcccagcggatgacctacatgcaatcccgcaccggaggggtaggggaacatgttcagtacatagaattttttcttcgtttcgtcttccgtcacttggtaggttttgttttccacccaccttttctgccatttcttttcaatttccctgaaattgtattccatagtggtacttattaatattttgttgaaaacattgtttattcaatggttaaaaccggttagtattcggttaatatcggtgcaaagttacgggtttattttcagatttgtagcgaagtaacataaaaaacaatggcaaagacttgataattcactttttattacttacatttgtgatgtgcttttaaaactaattttttgtttgtaatacaaataatagctaaattaattcaataggatatttactaaaagatttttaggatatagcgaaggatgaagtctgggaagatttcatcctttgtgttttttgtctgtgtattcggcagattgttgtttattattctgccgataaatgagagttcgttcaataggcttctaataaggggtttaaagatttactaaaacgggaggaaagatttagtaaatcttccttcgagttttagtaaaccttaattccgcaacactattacaaatataactttttaagtacctgagcaacaaaaagttgctcaggaatttgccatgtcagatttttcacctatcttagtgttgcaaatcaaaatatgtatcaaacccgacagacatggcaaaggtagcaattaaatccgagaaactcactccttttggaggaatattttcaataatggagcaatttgactccagactctcatctgtaatcgactcaaccctcggtatgagatgcaggctgtatggttatcaatacagcgaaatcatccgttcgcttatgagcgtttatttttgtggcggctcatgcatcgaggatgtcaccactcatctgatgtaccacctttcgcttcatccgacacttcgcacatgcagtgccgacacgattcttagagccataaaggaactgacccaggataacatttcctacacatccgacactggcaagacctacgacttcaacacggcagacaagctgaatacactgctcctcaattgcctattgtccacagggcagctgaaagagggcgaggggtatgacgttgacttcgaccaccagttcatagaggctgagaagtttgatgcgaagcctacatacaagaagttccttggttatcgccctggcgtggcggttattggcaacttgattgtcggcattgagaacagcgacggcaacacaaatgtccgtttccaccagaaggacacgctgaagaggttctttgaaaggtttgaacaaaacaagcttattatcaaccgtttcagagctgattgcggctcgtgttctgaagagatagtggaagagattgctaaacactgcaagaccttctatatccgtgctaaccgatgcagttcgctctacaatgacatctttgccctcagaggttggaagaaagtggaattgggcggcattgagtttgagctggcctccattctcatcgagaaatggaaagggaaggcataccgtcttgtgattcaaagacagaagcggatagacggcgaactcgacctgtgggaaggagaatacacctaccgctgcatccttacaaatgactacgagtcttccgagaaagagattgtcgaattctataacctccgtggagggaaggaacgcatcttcgatgatatgaataacggattcggctggaacaggcttccaaaatcctttatgggagaaaacacggtgtttcttctgcttatggcactcatacgcaacttctataaattcatcatggcgaggcttgacgtgaagaggttcggactcaaagcaacaagccgcatcaagacgtttgtctttaagttcatctctgtgccagccaaatgggtcaggacatcaaggaagtatgtgctgaatatctattcatgcaacaatgcttatgccaatgtgttccagaatgactttggataacaccgacaacttatagtcgtgattttgcgtattgcctcaagtcgcatggtggggtaaggggcatttatatgtctttatggtgacattcgatgcactgtgccccctttttactaacgatgcagattcttttcgcttctgtatcatattaggcgcgtagttgcggatttgagggtaaatcctccctgaacattatttatggttggtttcattgtattgaaaaaagaaagtacgtatatttgtgcgacttatcggaagtgtatgaacgcaatgaaaaattatacttatcatcttgtcgccgtccttacggtaggtatttgggggctgacctttatttcaacgaaagtattgattgggcacggtctttctccgcaggaaatattcttgcttcgtttcctgatagcttatatgggcatttggcttatttctccccgaaaactgtttgccgacaattggaaagatgaattttggatgtttttaggaggcatgacaggcggttcattctacttttttacagaaaatacagctttggagattacattggcgacgaatgtgtcgtttattgtctgtacggctccgttgctcaccaccattctttctttgtggatttataaaaaggaaaaggctacccgtggattgatggctggttctttgctggcgttggttggtgtggcattggtggtttataatggtagttttgtattggagatttctcctttaggtgatttccttactttgcttgctgctttttcctgggcattctatagcttgataatgagaaaaatgtccaattgttatggtataactttcattacccgtaagatatttttttatggagtattgactattcttcctgcatttctgattcatccctggaatttcgacattgcccgtcttctcgagccggctattctgttcaatttacttttcctgggtgtattggcttccttgatttgttttgtagtctggaacgtagtattaaaacagctgggaacgataagagcttccaactatatttatctgaatcctctcttcactctggtaggttctgcttttctgcttggcgaacagcttactatagttgctttgatgggggcgatactgatattggggggagtttattgggcaggaaaaaaataaatacaagataaatggggttgtgtctgcaaagacacagccccattattaatgtgatttagcaaaattctttttatggattacatttgagttcagcagacattaaataagtattatatggtagccacatagacataatgaaataaagtatatttcctttgagtgatatggggtgaatataagaaccatacaattgtgaatattgccagccatcgactagtttttgtggtttactccattcccctataatatgatctgctgttcggaatgagatatcatagcgtgtactattgaaatagagcaatatccattttttaaattctggatgataagcgatggaaagttctccagatatatcattgaataatggagtggctgcagtttcatttcctttaatccatccacttccattccaaaattcgtattctgtttgattttcaatattttcttctaaaaaacgagcaagatgaggcttattgtcacgtccagtaattgtacccaccatataaatatatccgtcttttttgaaatagcttacttgaccaaaattacttgttgaaccaaattttacattttggcaacgtgtccaagtaattccattgtctgaagatttgtaaagacttgaaaagttagttatccatcctgcccaattacgaatattcatgtaatgaacataatctatgccattggcacgaatggctgctgtgggaatagaagtccaatctccattaccacttccatctttacctccataacatatttcacgagcatttttaccactttcatccatagtagcaccattaatggtgagcccatcagaaagatcttgatcgtcagagaaaagcaaaacattacttctccagttactcccattgggtcctggatttacaaaatttggataaaagtcactaccgaatgtatcgccgaaaaaaagtccataatgtccgggttgtaattcccaaacaatacctaaatctgtaccacctacattgtataattcattagtacgattatttacttcaaattctacaataggtaatccgtttgtgccatttatttcagcaccagtaatacgggatacacattttaaatttgaaaattttaattctctagaataattgacgatacctttattgactatcaatttggaaatttctgatgactgattattattatctactgcaataaattcaaaataaaatgtagaagaatcatccttttttataatatattcaaatatatattctggtgataaatttgattttatatatttctcagaaatattattagtatcgttaattttatttattactaaataagctagttgatcgaattcttttattgatactttgatagatattataccattaatcgcagtaatttcattttgagaaaggttaacttctaaattataactatttactttatctgtatccgaattttcacaacttgtaagcccccatatagaaaggaggcttgcaagtaataatacatgtattcgtatcatgattttttataattttgtaatatgtaatagcgctcctccatcccttgccagattcagttcaatgatatccttccttgtaactttccgcaccagtctgttcagattgtttggattccggtccacatcctccgcatcggtatagatcgttgcttggtagtccccctcactaaggaagtccaatttcaatttcagattcttttccgtaccgttgttcagcgagcctacccaccagtccgaaccgctcctgcgggccaccgtgacatgctcattcatttttgccagcggaactcttatctcatcccacgttcccggcacggtacggagcacctcgaaccccggttgaccttcataagcctttggcgtatcgcacaacgaggtgagatggttttccaaaaccacatacatggccaacatatggcagcgtgtgctcattacatgaggatttacatactgtatcttgaactccgagcgcggcagtgccctgaaccctcccaggtgatagtccgtcgctcccgccagcatcctggtgaagggtatcgcaatgtcatggtccgcattcaccagcgtgtcccacttgcatacctcgtagttgagcgtcccctccctcgtgaactcattcggataggtcctcaccagccctgagggcttgctcgatccgtggaactgtatgaagagcctgtgccttgccgcacattccagtatctcctcctggatacggatcatttcctggtcattgcggtccatgaagtccaccatgagtcccctgaccccccatttctcatacagcgtgaatgcctcctccagcttgtcatagagcgatctccagtgtacccacagatgtatgcccacccccttgctccttgcatattccacaattcttggcatgttcaggcatggtatcggttttgtgatgtccgcattgggtcccgcccatccgaaattgaagttgtcatcatagtaccaaggagtttccgcatatccgtagattccatgtacatccaagccattgcgcgcagcaaaatcaatgtagtacttgttcgtgtcgaaattgttccctggagagaacgtgctgtccggcacgacattcccgttccaccatgtgaacgtggtccggtaaggcttaatccatgaagtgtcttcaatcctgcatggttcgttcagacttgttagtatgttcgtctccagtaatcctcctacccggtctgcaacggatatcacgcgccacggggtacggtgtgggaaactgtctatttcaacctttattttttcctgcccgagttttggcgagagctttcccaccagtccactcttctccttcaccaggtacattcccgcgtagtcccttattgccgcctctgttattgccagggccaccccattgtcgaattcgaatgtggcgggcatctctatcagcctcttccttgcgaccttgtcatatcttacatgactgtataccccttcgtgtgtatttacatacccgggcaggtacatgagcaacgccatcgggtttccttgtaagttgaactgtgtcctttcatcgtacatcacgtatgaattccatgctttctgcttgggaaattcgtatctgaatgctatcccatcattgaatgcccttacagccaggttcaccgttctctccttcccgttcttctccaccagggggactatcatctcattgcagtggtttcttgccttactgacctttcctactaccagctcgtatgtctcgtctatcttcctcctttgtacctttcccgccttgagtcctgccccgaactccccgctgtcgaactcgaatcccagccttgagtcctccagcaactgctgtttcccgtatttcacgctgtaggccactttctcaggtgctatgtccagcacaagcttcagcttcccgtcgggagatgccacagagaacttctgctgggctgaagcggtaccaaggcagaataggagggcacatataataaaaagttttctcatttttataataatatatttagttagaaaatacaagcggaatttacatttttcaaattccgcttgaaatatgatagtattatttagggttttgtactaaattagaattacgttgtagctgatcaaatggtattagcatgagattacgttttgtatcattagtaggctggtgttcccaccaagtaccttttgtgaaattattatcaaaacgaataagttgacttcgacgtaagccttctaatgcaaattctacaccaagttcttgaagaaaacgaccatattttactggaactccattataaattgtggtagcttctaattctgaaccggttaattcattggttgtatcgaagtttcttctacgtacttcatttactaattcggcagcttcttgtgagctacctcctgtacggagtatacattcagctttcatcattaatacttcggcatatctcataatgacataatcattatcaggagtacctgttgcacctattttgatttcatatttgccaaaacgatacccttgatacatggtagcatctccactaatattagtaacatctttggtataactgagcagcatttgtgggtctccgcaccaaccatttgtccataatggagtaccatcaagtgcatattgttgtcccatgcgccatgttttttctaaacgcttatcaccttctatatagttatcaaagaaagtaggaactccgacgcacccaccatcaagccaagtggcttggaggttgaaagtttgcatttgagaatagtgtaaagttttgcgtgcccacatataaatttgaccacctgatttggtttcatcgaatggaattacaaacattgtttcattactcaattcgttatttgtagaaaatgggagtgaataatctccgtctagtctatatttattagtagcaataatttcattgcataaattttcacattcattatacatgggagttcctatccatgcttcagcattcaaatatagacgtgccaaaagcatttttgcgttccatttattaaaacgtccataggtgtttaagacatcttcacttaagttattgatattattttttaattccgactcaacgaattcaaaaactttagaccgtggctctgttgctggtaaataaccatcaggaacatcaaatcgatcaataatgggaacattaccaaaagcttctagtagtaagtaataataaaatgcgcgagctacttttaattctgcaatataattttctttaccattcatttctattgttgaattttcaaattggtaaagaactctattagcacttgagacacctgaatataatgcattccatatattgtttagatgtgcatcttcttccatccaagaatgttggtgtaagcgaatataaatacctccatcataccataagccatgatttttaactggagtaacacaaacatcggtagtttcttctaaatcccaccagtttgaatgttctgttaaggtacgcatactggaatatatgggaaccatggctgccaagaattcagattcagttttataaaagtctttttcagggatgctactaaaaatttcttcatccaaattggtacaagaactgaataaagagataacagctaaaaatgcaccagtaatatattgttttttgaacattgctgtaattttttaaggttaaaataaaagatttaagccaacagtgaactgacgtgtagtaggatataattcgcctgcaccagatccttcaacaccaggagcaagtcctttaatactaacttctggatctagtcctttataaccagtcattgtgagtaaattattgcctgctacatatagacgaagacgttgaatgactttttgttttttaagattaaatgtatagccaacatttatattatccaattttacataatcaccatcttctacataataactttgcatagcaggagcaccttttacatatgaattactaccaaatggtttttccaatactgagcgaggtagattgccttctccaatacgtgaggttgtttcccaatgcatacgttggcggttcaagacttgaaaattgaatgcaccgcggaacataacagatacgtcgaaacctttatagcttaatgctaaatttagacttccataagttgttggaataccattaccaataacttttttgtcgccatcatcagcatcagtcaataatttgggttgaccatcagtaccatataccatccataaaccatcagatgtaagactatgagtctggaaaccatggaaattaccaacgggatcaccttctcttactatgtgagtatgggtttgaattggtgaaccggtagctccttcataccaataatctttttgataaagtccatttgataaagaaatgattttatttttgttataggaaaatgttcctgtaatgtcaaaacgtaaatcgcgtgttttaataggagtaccacttaataacaattcgatgccttgatttctaatttttccaacatttgccatcatacttgatacaatgtaaggtggagttggtacttcataggtagaaagtagatctgaagtttcacggtgataaatatcaatagaaccagaaagtctattttttaggaatgaaaaatcaagtcccaaatttaactcactcttcgtttcccattttaaatcgggattaggattttggtatggacctgcaccttgtgtccattttccattaatatatgcatatccaccataatttaacaaatacatggatagtaaattagatgtgacttcattacctgtaacgccataacctatgcgaacttttaagtcatctaaccattggatatcttgcataaaattctctttgctaatgcgccatcctgctgatatagcaggaaaccaaccccatttatggttatctccaaagcgtgatgaaccttcacggcgtaaactggccataaacatatacttttcattgtaattataagtcaatcgaccaaaaaatgaaattagtttatgagtatttctataactggtcatagctgccttattatccttcatatcattcatagaaccaatattccaaggtccaaacatatctgttggaaaatcttttgcccattgatatatacctttagcatcatcatcttggtaactataacctatcatggcacctagattgtgtaaacctaatgatttggtataatcacctaccaattctaaattcttttgcattgtattatcagcccaattccaaacattaccataatctccgtttaccacagtagtcatatgtttaaatgtattgcttttattctccatgcgatcaaaacgttgcatagctcccatcacacttagattaagaccttcaattggtgataaagttattttcccgctcatcattaattgattgtatccttctacatcatattcttcattaatcatggcaaccggattataaggtttaagatttactttatattccgtataatttccattttcatcatagatagggcgggtaggattttctaataaagcatttaaataggctgcataccatgcacgttgttgggtgacataactatcattgatattgaattgaaagcgtaatttattattgaacatattatgatttagacctattttagctgtaatagattcacgatctgtatgacgaatgacaccttcacgtttgcgataatctatggaagctacgtaattggattcagcgctaccacctttcaaagaaagaaaatgattgtggctgatagctgtacgactaatagcgtccacccaatcagtggtagttccctcatcttgaatacctggaaaatcaggatcatctgttaatctacgataatcattggctgttaacatatcagcatgttttgcaaatgtttcaaatgagatagatccattatactccatggaaagtttagtcgctttagcacgattggtagtaattacaatgacaccatttgtaccacgagtaccataaatagcagctgcagaaccatcttttagcacatctatagattctatgtcttcacttgaaatagctgttaaactaccacctggaattccgtcaataacgatcaatggactagtattaccagataatgaattaacacctcgaatagtcatttcgagtcctaatacaggatcaccagtataatttgaaagttgaagacctgctacttttccttgaaggagttgttcgggactttttaccatcccggcaagaaaatcgtctttttttactgatgtaatagcactggttacttcaccttttttcatggaaccataacctaccactaccacatcatcaagctgaaatacatcttcttcaagaatgatgtttaaaaaagtagttttatcgttagttggaatggtgcgagtaatgtatccaatataacttactgttaatgtactgccaggtcttaattttatctcaaatattccgtcaatatttgttgaaactccattactggtgccagtttccaatattgtaactcctggtaatgtgttgccttttgcatcttttacgacaccttggaagtttttggtttgtgcaatagctaattgacatatgcataacatatataatattgtcattagtcgaattgtattggacaaagtccttttttgataaaaatttagcatagattcaaagtgataaaatgtttagataaataattatatatttctcagagtattttaaaaaggtcgtacaatttctagatcgtctactgaaggtaatgttggaaatttagcatgtggttcagtttgataccaaaatacaacagaagaaatgtctgatttctgatcgagatatcggccgtcgttacgccatccaagatcttgaattgtaacttttaaatccttttcaaaacggattggatcaagtatgtgccaacgatacatgccaaaacgttgttgtgaacgataaactccatctgggcgaataatctgatgtaatcctgcataaggagtagtgaattcttcatattgatgcgtcgttttattttcaaagttgtaagatccgcaaaagtaatcttctgtaccagtaccgcagattgtcggaaatttcttatcaccatccatgaagaatttaatttcaccttcaccccaccaaccgttattattcacttgccaagcaatatatgtaccaacgtattgtcctttacctttaataccatcaaccaatacatggtcagaatttatattaggatttgagcgacggaattgtgcatgaaaataagctgcatcctcaggaacttctgttaaagtgtagtttatttggtaataaactctcatttcattattggggtcaatgttttccattgtaattttacattttttgcggaaaggcatttgccaataacaattgaacgcactaccagggtttacacaaactgctaatgaacttaatggagaatatagtccccaaccactgcagaaaaaatcacctatagggcactctacagaaggttctttttcatcatcccaataaaagcgaataattgtttttctccattcacctgttggtgtcatccaaatttgttgtatagaaccagggccttcgatttctgctaaagtaaaagtttcgttagggccaatgtttacataaggattgactttccagccttgccctaaagttttagctgcatgatgtgcattagcttgatttattttttctttatctgtaattggatcagccataccacctttacctttctcacctgtaaagttttcagggctgatggaacgtgtcttggcattggataagcgatataaattacccatattcatgtcaagtccattaaaattttgagcgtaaatgcttatagttgccatacataaggctgctaagataaaaaatttgattttcatggtttaaataaattaattggtttatatacttagttaatggtttcagcaagttttgccagttcaagatatttcttgtatagtttttcgtagatgagggctcttttctcatccggccggtattcagcctcgatgtccgactccatgtgccttgtcgcctcgttgatatccttgtacacccctgcggcaactgccgcgaacattgccgctcccaaggcacaggtctgttccgagcggaccacacggataggcatgtccagcacgtctgccagcgtctgcatcacgaagggcgccttcttgctgatacctccgatggcattgaccgaatcaatgcgcagcccctggcccttcatatgctccacaatacggcgggaaccgaaggcggtggcttccaccagcgcacggaatatttccggggcgctggtacccagcgtgagtcccgcaacggcacccttcacgttctggtccgcatcgggggtacggcggccgttcatccagtccagggcaacaacaccatcctcggagggttccatgtcctgggcctcacgggtgagttccaccagcatgccgtccagaactttctgcctggcctcccctccggggatatctttcagtgtccatgccagcatcttcctgaaccaggcgtagatgtctccgaaagccgactgtccggcttcgaaaccgatgaatcccggaagcaccgaaccgtccacctggccgcagattcccttgatacagcgtccgcctacctcgtctttgccggcaaccatgatgtcgcaggtggatgttcccatgatacgtgtcagtatccccgggacgacggatgcgcctacggctcccatatgggcgtccaacgcccccacggccacggcgattccttggggaagtccaagcctgtctgcccactcgggtgtcagttcccctgccttggtgtcgctagtgtgggtttctgtgaacagatgggggagcatttccttcaaggccggattaagttcttcgagaacttcgccggaaggaagaccccaacaatagttaagaagtatctcttaagttgactttaaaagattgttttgagattttatactatgaaaagttgtatatatataaaaaatgagaacagtagaaatagagtatctattttctgctgttctcattagagtaataagctatttagtaagttttgtaatttatccttttcttatttttatccaccttttatccttttctgttctataaattaagaacaaaagaggggataaataaggaggaaaagaagttctacccaaaaagtagtccgttcttatttcataatgtggtttattaattcttccgatgaaagaggtgtgataccaaaaatatagctttgaccagactgaaatggttcagtcagttcaaagttctcataagcgataccaccaggtatcggagatttacttgcccaataagtataacgaccattcacaactccttctaactcattacttggattggaacaataccaatattgcgttgcttttttaccagtatatttccaatgtgtatgtgtatcttcagcatatacagcttttgtagggtctttctcatcaggtgacgctataaaccatacacctccatttttatcttttatcatttctgccactggagtatggttatgttctgtgaaattagaatctttatagctcggccataattggccggcttctttcgttttaccatctgcgagatgtaatgtcctaagtcttgctttgtttcccatagtagctgtgagtataaaacgatttagctcatctgactcttccgtggtatacgtagttaattcaaactcataaggctttccttctgtgaatttagtccggacatagatatccgcaccattatcaaaagtttcacaaaagaaatacacagtaagtgtttcaactccattttcctttgctattactccgtgagctggataatattgatttgggaatgagggagcttcaggagtattcccactccaaaaacgttttccacgaacattatcaagttgactccattccaattctgagagccccctattattttttgctttatcaattggttcaaaagcaatgaaattggtaacaacaaattcatcatgttctaaataaggtgtatagatacgaattagcccacgtggacctcctaatggagcaattcctattcggataccatttgcaaatccccaaatgggttgtgcttttgtattttgagcaggttgtaaccatattccatttttttccggagttgctaaagtttccggagctatttgtaggttagtctgtccataaaggtagtgtattctgcatgcaaagaataaaagtgtaaatagaatcttggttttcatgattttaaaagtttaaaattaatttttatgtgtcgtttatggtagttcatatcgtttttagcatgatttggtactgcaaatataaaaatgttataacgaattagcaaaataatttgcagatttaatttttatgtttatatttgcatcgtgagaatacgataagtgctactgattcaagaggtaacctaaaagtataatactattatatagcaaaaacgttacacaaatatatgtcgtcactaaaaaaaatatcgctgaaggatattgctgaagctgcaggcgtttcaacagcattggtttcgttcgttttgaatgggaaaaagaaagagtatcgcgtgggagaagaaactgcccaacgcatattgaaaattgccaatgaaatgaactaccagcctaatcttgcggccaaaagtcttcgtagtggcaaaacaaaaacaataggattagtggtttctgatatttccaacccatttttttctcaattagcgcgtgtattggaagatgaggcaaccaaacggggatataccgtactttttggaagttcagatgaggataaggataagatgacccgtgttgttagtaaccttattaataaaggggtagatggactcatcattgttccttgtgacaattctgagaaatccatcgcttcacttgtgaacaataatatccctattgttttgttcgaccgctattttccggaaatcaatgtcagctatgtggcgttgaataacttcaatgcttcctatatatcaaccaaacatcttttgaatgcaggctataacgctccttgtatggtggcttatgatgtcaaccttatccatatgaaagagcgtatccgtggttataaaaaggctatggatgaagccggtaagagaaacttggctaacgtggtctttttgaggcaggatgctcccagaaagtccgcagaccgtttgttgcctaaaatgattgatggcggtgtagacgcttttctttttgccaccaacatgatttcattggcttgtttatatacaataaaggacatgggagagggaattattggtaaaataggtttagtgggttttgacggtaatccggtatttgacttttttgatgcccctatatcctatattcagcagcctatagatgttttagtacagaaagcacttgaaatactgatagatatcattattaacggtaatacagtgcagtctgtgcttgccgagggagaatttattgaaatggctccttaggagagctgttttttttatatgatagcttaatcgatttagttaatttttatattaatctcaataaaatcagttgaaccatgagaaattcaagattaatcggtggaaagccgaaaattggtattagacctattattgacggtcgtcgtggaggtatccgtgagtcattggaggatatgactatggccatggcccataaagtggccgagctttattcttctgtcttacgtcatagtgacggtacttccgtagagtgcgtcattgcagatacaactattggtggagtggctgaagctgccatggcggctgaaaaattccgtaatagtggagtcggtgttgtactttctgtaactccttgctggtgttatggattcgaaactattgatatggacggagaaatgccaaaagccatctggggctttaatggtacagaacgtccgggtgcggtttacctggcttcagcattggcaagccatacacagaagggattgcctacttttggcatttacggacgtgatgtacaggaggtgaccaatatggagataccggaagatgtacaggaaaaattgttgcgctttgcccgtgcaggtatagctgtggctacaatgaaggggaaatcctatctttcaatcggcagtgtatccatgggcattgcaggctctattcccaatcctgatttcttccaagagtatttgggcatgcgtaatgagtatgtggatgccagtgagatagaacgtcgtgtccagttgggcatttatgaccatgaagagttcgcacgtgccatggcatggacagaaaagtattgcaagagtaatgaagggacagactttaatccggaacatctggtatattcccgtgaagagaaagatgcccgttgggaatacgtggtaaaaatgactcttattttccgtgatatgatgattggcaatcccaaattggctgaaatggggttcaaggaagagtcaatgggacacaatgcgattgctgcgggtttccagggacagcgccagtggacggattataagcctgacggtgatttttcagaagctatactgaatacttctttcgattggaacggtatccgtgaagcatttactttcgctacggaaaatgatacgttgaattgtacttcaatgctcttcaatcatctattgaccaatactgcacagatatttgcggatgtgcgtacttattggagtccgaatgccatagaacgggtaacgggtaagaaattggaaggtaaggcggcaaacggtttcattcacctgatcaactccggctcttgtacgcttgatggaacaggctgtcagacacgtgacaataaaccggtaatgaagcctttctgggaaattacggaagaggaagtagaagcttgtctttctgtaaccaagtggcatccggccagtcgcgaatatatgcgtggcggtggttattcttcccagttcctgactcgtggtgaaatgccggtaacaatgtgccgtttgaatctcgtaaaaggtcaaggtccggtattgcagattgccgaaggctggacagtaaatttggataaggatgttttcaaggctatcaatgaacgtactgaccgtacatggccttccactttcttcgctccacgtctgacaggtaaggggtatttccgtgatgtatatactgttatgaataactggggggctaatcatggcgctatcagttatggtcatatcggtgctgacttgattactctggcttccatgcttcgtatcccggtatgcatgcacaatgtttctgaggaaaatattttccgtcccagtgcatggaccgcttttggcgaggatatggaaggcagtgactatagagcttgcaagaattatggacctctctataaataaaggaaacaggcgttatgttgaaatcaaccaaactgaaaaacactctgctggtaggtgcaactgcaatacttgtatcatgcggcggacaaaaagaaatcaagatgggaagttatgcttatgatgcccagttcttaaaggaccacggcattgaatatactgaattggtatctgctgatgggaattctaaagtgatggttattcctgcatggcaaggccgtgtaatgactacttctgcttccggcgatgaaggtgatagttacggctggattaattatcgtttcataaatgaaggcaaagtcagttctcaatttaatccggtaggaggtgaggaacgcttctggcttggtccggaaggtggtccgttctcactttattttaaggaaggacaagagcaggtttatgataattggatagttcctccggtacttgatactgaagcttttgacataaagtcgcaagacaacagtagtatccgttttgtgaaagatactcgtttgacaaatgcttccggtactacttttgatatgaatattgaccgtactgtatcgttgatggatgctggtgaagtggctgccgattttaatatccagcttacaaatgatatgaaaattgtagcttacaagagtgagaataagattaccaatacaggtgacaaggcatggacaaaagagggtggtcttgtatctgtgtggatgctcggctgttttaatcctacaccgaccactactgtattcattccttataagcaagatgcggaaggaacaattgtgaatgatgaatatttcggtaagataccggcggataggctgataaaggaaaatggtattatctatttcaagattgacgggctctatcgttccaagctgggattgccggcttcacgggcaacggatatttgcggaagttatgattcatcgaaaggcgtactcacaatcctgtggtgtagtcttcccgaaactccttcagtctacgtaaatggccaatggggacctcaggaagatccgtttgccggcgatgtaatcaactcttataatgacggtccggtagaagacggttctataatgggacctttctatgaaattgaaacgtcttctcctggtgcggagctggctcccggtgcctcattggtccatacgcaaaaggtgattcatgtacaaggtaaggatgaacaattggttcctatcgtgcaagatttatttggagcagatttgaatgtaataaaaacaaagtttcaatagggtaactatataatggagaattcgtatggaatcaaataaaataataccgaaaggaatcctcttcccattcattctgctcactactcttttctttgcctgggctgtgccgaataatctgacagatactatgcttgcagctttcaagcgcatcatgagtatgagtgattcaaaaacagcttggatacaggtagtgtgctatttgttgggatatggatgttgtgctgttcccggtgccttgtttatcaagaaatacacttataaatcaggcgtgatgctggggcttggtctatatgcatttggggctttactgttctatcctgccatgcttagctcgggagtgaatgttgatttcagcttctttatgtatctgctggcaatctttgttctctttgccggactttcagttctggagacgtctactaattcttatgtattggcaatcggtcctgaaagtaccgcgacacgccgtttgaatctgtctcaggccttcaatccgttcggagcgattacgggagtggtgatcagtcagattttcatcctctcacaactgaatggaatgacagcgacagagcgtgcccaacttccggctgaggagctggccgccatccaggggcaggaattgaatgctgttactactgcttatgtggtacttggtctggtgatgttggtgctcttacttgctattcggcttaccaaaatgcctaatcttagtgaaaaaggtgaaaaaatagagtttggtgccactcttcgtcgtcttataaagaataagaattatgtatggggtgtaatagcacaatttttcaatattggtgcacagatagccgtatggtcattcgtgatccgttatgctatggtacagctgaattttgacggtgtattggcttctttaggagattctgcttctgcagatgctgttgtaaatgcattacggggagtggaaccggtagctgccgcattctataattgttgtgaatggcttggattgaatgatttgctgccacgtacagcagaacaggctgcagctacttactatatcatgtcacttattctctttgtagtaatgagattcgtatgtactgccatgatgaaatatgtgaaagcttataaactcttgataggacttgcgcttcttgctgtaatgtgttgtttgggtgctatgttcggcaagggcagtttcggcgtttattgcctgatgggcatttctggttgtatgtcattgatgttcccgaccatttatggttttggtcttacgggtttgggggatgacactaagattggaggttcattcatggtaatggctattgccggtgctgccgttctgacccaaattcagggtattgtctccgaccagacgggtagtattatggctgcatatgttgtaccggccgttgcttttgcagtgattgcctattatgggcttttcattgcaagaaaacaagagttaacaaccaaataatgctttagagtatggaatcaaacaagaaatacgttattggtcttgattttggtacggattcttgtcgtgcactggtagtggatacatatactggccgtgaaatggctacgggggtaagtttttacccccgttggaaagcggggctttactgcgatgcacacaacaatcgttatcgccaacatccattggattatattgaatccatgatagaggctgtacatatagccttatcagatttgaaggaagaagagattgcttctatttgtggattatgttttgacacaactggtagtactcctgctttaaccgataaggcaggaatgccattagctttatgtcccgagtttgcagaagaaccggatgctatgtttattctttggaaagatcatacagctgttcgagaagctgagcaaatcaatgcactgatcaataaacgtaaccttgattatttactttatgaaggtggtacttattcatcagaatgggtatggtcaaaggttttacatattatcaacacaaacgtcgctataaaggatgctgcttatgcttgggtagaacattgtgattggatgaccggattagtaactggtaacactattccggaacagatctttcgtagccgttgtgctgctggacataaagcaatgtggcatgccagttggggtcttccttccggcgaagttctcgaagaacttaatccggccttgaaggaaatgctcccccatctgttcacagaaacccacaccagcgacaccaaggcaggggaactgacacccgagtgggcagacaggcttggacttccccaaggaatcgccgtggctgtgggggcgctggacgcccatatgggagccgtaggcgcatccgtcgccccggggatactgacacgtatcatgggaacatccacctgcgacatcatggttgccggcaaagacgaggtaggcagacgctgtatcaagggaatctgcggccaggtggacggttcggtgcttccgggattcatcggtttcgaagccggacagtcggctttcggagacatctacgcctggttcaggaagatgctggcatggacactgaaagatatccccggaggggaggccaggcagaaagttctggacggcatgctggtggaactcacccgtgaggcccaggacatggaaccctccgaggacggtgttgtcgccctggactggatgaacggccgccgtacccccgatgcggaccagaacgtgaagggtgccgttgcgggactcacgctgggtaccagcgccccggaaatattccgtgcgctggtggaagccaccgccttcggttcccgccgtattgtggagcatatgaagggccaggggctgcgcattgattcggtcaatgccatcggaggtatcagcaagaaggcgcccttcgtgatgcagacgctggcggacgtgctggacatgcccatccgtgtggtccgctcggaacagacctgtgccttgggagcggcaatgttcgcggcagttgccgcaggggtgtacaaggatatcaatgaggcgacaaggcacatggggtcggacatcgaggctgaataccggccggatgagaaaagagccctcatctacgaaaaactatacaagaaatatcttgaactggcaaaacttgctgaaaccattaactaagtatacaaaccattaatctatttaaaacatgagaatcaaatcattaattttggcggccttatgcatggtcaccgtgggtgtttacgcccaaagcaactacccgttcaacggtctggacatgaacatgggtaacctgtcaagactgtccgatgccaagacacgttccatcagccctgagaactttacaggcgagaagggcaagggcggcatggccgatccggtcagggacaaggaccagcgcaatgtggccaacgcccaccatgcggccaaggacctgggcaagggttggaaggtaaaccccttcatcatcgtgaaaccgggagagacaatcacgattgcggaaatcgagggtccgggagccatccagcagatctggatgacaccgaccgggaactggcgcttctccgtcctgagaatgtactgggacgatgagaaggagccttccgtcgaatgtccggtgggtgacttcttctgcagcgcatacaatgaatatgcacagctctcctcactggccgtttgcgtgaatccgggcagcgccttcaactgctactggaagatgcctttccgcaagaaagcccgtatcacgctggagaacatcaacaccgccgaggagatgcgcctgtactaccaaatcaactacaccttgacagaagttcctgaggacgaggcctacttccacgcgcagttccgccgctccaacccgacccaggggtcgctgcacacgctgattgacggtgtgaagggcaagggacagtacgtgggtacctacctggcatggcgtgtaaacgacaactgctggtggggtgaaggggaaatcaagttctacatggacggtgacaaggaatacccgactatctgcgggaccgggactgaggactacttctgcggctcgtacaatttcgagaaccagaagacgcgccagtaccaggagttcaccaccccctatgccggcatgcaccaggtaatccgtcccgacgggctgtaccgtgcggtgaccgctttcgggctgtaccgctggcatatccttgacccggtacgcttcgacaaggacctgaaggtcacgatacaggatttgggatggcgtcatgacggacgctacaacaaccagaagtcggatatctcgtcgaccactttctggtaccaggccgagccgcatgccaaattcccggctttgccgagcaaggacgatttggaaattccaagatggtaaaattgggtatacccgatatttaaaattacgttgtttttttattaactattaaatcaaagtattatgaggatttcttttaaaaggaatggtttcatagcattggcatcaatgctatcatttgcagtgtatgcaggggataatttgccccttgcaaccgctgcatcggggacaaatggatctattcaagtatctgagcatggcgtagatacttctaatgagattcaacaagcgagagtaatacaaggaacagttctggaagaagggactaatgaacctcttattggggtaaatgttgtcgttaaaggaactactataggtacaactactgatgtggagggaaaatattcgataagaataccttctgataatgctgtgttagtcttttcttatattggtcaaaaaacagaagaatattctgttaaaggcttgaaatctttggatgttattatgaaaagtgatgctacgatgttgtctgaagtcgttgtatacactggttatatgactcagaaaaaagctgacttaaccggatcggttgcattggcggattcaaaagacatcaagaagacttccgctaacgttatgaaagctatgcagggtaagatggccggtgtgaaaattagcaacaatggcggtaatcctgcagaagatataggcattcaaattcgtggtctttcttctttgtctggagctgttactccattaattgtattggatggtatgccagctgaaggtctgaatctacgtgacataaattcaggagatattgaatctattcaggtattgaaagatgctgcttctgcctcaatttatggtgcacgtgcttctggtggtgtgattttagtccaaactaaaaaaggtaaagctggtaagactaccattgactataatggtagtgtttctgtaagttctataataaatagaccggaaatgatgaacgccacagaatggggtactgctgccttccgcgctgctgcttatgatgagtgggcttatggttcaggcctattattacccaatggctttgagtatgagtatcatagaggtgataatggaatgctggtattggataatatgaaaatgaaagaatatttggataataatcaattggtaaaagcaactgatacaaattggatggatgagattttccgtacagcagtttctacaaatcatcagttgactatttctaatggttcggataaagctaaaagtttgttttcattagggtatactaacaaccaaggtacacaaattcattcttttttcaaacaatattctgtacgtgctaacacggaatatagtttgattaaagatcgtttgaaagtaggagaaaatttagctatttcttatttgcagtataaaagtcaatgggaaacctttttggctatgattatgccacctatggttcctgtttatgatgtaaatggtaactgggcaggacctgcaggacttgatgattttgataatccggtacgtaaaatgactatgggtaaagataatatcaataattatgtgaaaattattggtaatgtttttgcagacctgaatatttggaatggtatatctgctagaactcagtttggtataaattatggtaactcttatagtagaacagtagatggggcttatgtagagactggttttagaggcaatgataaaaattatgtaagaaataaccagtcccatccgttaaattatgtatggactaatactttgtcctataataaaagttttggaaaacaccatattgatgctgtatttggtagtgagtttacccgttatgtacaagaaggtttttatgcaagtagagaaggactttatttggaagatcgtgattttgccggtcttagtgttgctaccggtgatgaaattgatgtaagtagttctgctgatgaatatacttatttctctctttttgctaaggccaattattcatatgctggtaaatatttgttgtctgcaactgtacgtcgtgatggttcttctttgtttggtgtcaataatcgttatggtgtatttcctgcattttctgctggttggagaattaaggatgaagcttttatggaagatgcggactggttgtctgatctgaaaattcgtttcagttggggtacgaatggtagtgtacaaggattacctcgtggttacacaactactccatttactactaattattttgatactgcatatcctattaagggacaagcaaccggcgctttgcagtctggctatagaagaacttggattggtaaccctgatttgaaatgggaaacaaccaaacaaacagacttcggcgttgactttggatttttcaatcaacgtttgactggttcttttgactattactataagaaaacaaatgatatcttggtccagactccatatatcgcagcaatgggtgaaggtggtgaaccttgggttaatggtgctagtatgaataaccaaggtgtagaatttacagtatctttcaagagtgacccctccagtgaattccagtgggctgttagtgccaatattggtacatacaaaactgaattgactgaccttccttccaatgtaatcaataagtatgctggtgatggtgtacacgatttgattttaggacgttctccaaattctgcttatggtttggtagctgatggtattttcaaaactcaagaggaagttgatgctcatgcagaccagccaggtaaagcagttggacgtattcgctacaaggacttagatggtgatggtgtaatcaatgaaacatatgatagaacttggataggttgctatgacccggatttctttggaggtcttaattttgatttcgcttataagggttttgatttgaacttgttttttgagggtatgttcggtaatgatgtaaatagcgactggaagaaagagagtgatatttggcttttcaccaatcctgcatggaaaaatcatgcaactcgtatgttgggcggttggtcacctgacaatccgaattctgatattccggctatctcgaataatactgccaatcaagaacaaagattctcttcttggttcatagaagatggttcatacattaagttgagaaatattgaattgggttatacatttccgactaagcttatcaaaaaaatgcatatgagtaatctgcgtttgtatgctgctgcatataatgtatttactttgaagaagttttggggagatgacaaatatacaagtttcgatccagaaagaccttcttatcattatctgacaccatttactttcaatttcggtatcaatgtttctttttaaacttaattaataaattattatgaaagcaaatatataactttatcaattgctctatgctctatattgggagtcagcagttgtgattcatatttggatatcaatcctaaacaagttctggaccaaaatatacttaacaaacctagcgatatagaaggttttgtcacagcagcctatgcccgtatgtgtgagatggggtcattggattcctctccttatatgtattggtggagtggttctatgcgttcggatgactgctacaaaggtggtggtggtgttgctgatgctgtaggttcttttggtaacatatcactttttacttatgtaaatcctaataccggtgcattggatggtacttggtataattcttatcaagttatccaaagatgtaatacagcaattcaaagaatggcaaattttacggaagaagagttacctaataagaatagttttatgggtgagatgctctttatccgttcatttacgttgtatcgtttgaaaaaactttggaaatatgtaccctatattgatgagaatgtagtaggtatgtcagatgcttttgaagcagtacctaaccgtgaattggataaggggaatgatctttacttatggcaacgtattcttgatgattttaaaaaggccgaggaattattgcctttggatcagatggataaaggtcgtgtaagccgtaatgctgctactgctatggttgctaggacaatattaaatatggcttacgaacaggatgaccgtcatcaggtgataaatatcaataaggaattacttgcagaagctttgccttatattgataaaattattgatcaagaaggtggtcgtgtaggtttggaatctgattttggtaataactttttggtagagtatgataatgctactaaagaatccatttgggaattacaatttgctcttgataataattttcatacagcaggtcgatttaatcgcgctgaaggtttgaatcatccatggatgtggcccgaaacacaacctggtaattttgtatttaagtgttgtgactttaaccatgctagctatacgttgactaatgcgtttaagacagatgaaaacggtttacctcgtttcgaggattataatgaggatgattatggtcaatatattaaaaattcagatggttcttataatttggatatcgttaattctggcgctaagccttactttgataagtatacatgggatccccgatttagccatactatcgtagctcctggacagccttggaagtatgatcctgatttattattccattcaactgctactcgtgatccgattacttatagtttcttgaaacccatcaaagatatgccacatcctgattgtggttgtattgcttatgatggatggcaatttaattctatgaataagaagatgattcgttacgatgacgtgttgctgtggaaagctgagattttgattcaattggatagagaaatggaagccctgccatatattaaccagattcgtactcgtgctgccaatagtttggttcgtttgactcaagctgacggttcatatacaatgaattatcatattgctacttatcagccgggtattaactgtaattggactaaggactttgcatggaaagccttaatgtgggaaaatcgtcttgaatttgcttgcgaaggtcatcgtttctttgatttgcagcgttggggattgttggaaaagacaatgaacgaatattttgctattgaaagaactcgcttcgattggttcaatgatgctcgttttactgccggtcgtgatgagtactttccgatttcccaaccacaaatgaattattcaaagggtaactatacgcagaatccgggatattaatgtttaactattaagaagaaaattatgaaaaagatagtaaccatttttacaatgttgttggtagtgttatcactgtccagctgctatgacagagatgtgcttgatgacaagggcttgaattatttcatgcctacgcctgagaatgtgcagtatattcaagataatgctactacagtgacattgacttggagtattccttcagtaattccagaagacttcagacgtcctatttcagtacagattcaaatagtggaaaataatatttatagagatagaataaccttggtaaatgaggaaacctctcatactttcactattgatcctgctaagaagtatcgctatatcgttaaattggtaggtacttttactgaggaaaatcaagaaacagggcgtacatctactgttacttctgagggtgtaatagttaatgtcgaatagtttcgagaaggatttttgtagttaatgatagagagtgggcttttactggtatttttctgagtcagctcactctctattttaatatttgatataaggcgaatgggttatctggttacgataaattgaaaaatgaatcaatagacatgaaaaacatattatttatagcattctcttcgtttatatttttatttgtttcttgtacttctgaacaagaaactgaaacttatattcctattgatgaaattatacctttggatactcatttgattccaaataaggatacaaaaattgtatcaacaacattgaattttaaggatattgatgccatagattatttgctggttagaaagagtgtaggtgacagctattcagctaagataagtcaaagcgaacttacgtctgattatattttcaattataccatccaaaaaacagatccacagaattttcggctagtattggctgccttttacaaagatggtaatatgtcgaaagaactctctttgaatgtggataaccgttggggtttttttattcgtaatgttactcgtatagctcgtgttacagggagtataataaatggagaaaactttccaagtcctaataatactgcgacaaaatggaatgtaggaggaacagatcttggcattatttgggagatgcagcccggaaaatatggaattttctttggtgatacttttgggtatgactttaagcctaatccagctaatcctggacctaacggagggagttggcgtagtaatgtgctggctttctcggaggataataatttagaagatggattgtcattcagcaatatggctactgatgataaagggtatgcccgcgagatagtatatgggggaaaagattcgtcaggtaatggtgattggacttctatcccaacagctgctattcgtgctaatggaatagattatgtgcattattttaatatgagaaattggacgggatggattacaaattattcgggaatatataagtcggctgataatggtttgacatgggctaaatgtaaagatataactttctcatcttatagtttttttggtcaggtagggtactttaagaaagatggatatgtttatatgataggtactcaaacggggagggatagcaatgctaaattagcacgatttcatgaaacagatattgagaataagacagcttatgaatattggaatgcttctactaatcaatggataaaaggcaatgaaaatgaggcaacagtattaatagaagataaggttggtgaactttcttttatatataatgaaacacataagaaatggataattgcttatttcaatgcagatagatataatataactatgcgtacggcagaagacataactggcccatggagtgaaccctatgagcttgctaatggtagggagtatgcccaattgtatggttcttacattcatccgttgtcggtaactggtgataatttatattttacgatgtcaatgtggatgccttataatgtttttttgatgaaggctgaattggctgatatgggagagttttaattatattgataaatataatatcatgaacacacgcacatttattataacttttgtttggatgataatgtccaacataggcatctgtgctcaagagcattgggatgtacaagagaaaattgagttgaataaggatgtttttccgaaaaattttagtaaagctattgatgctatacagtatgatttattaggaattgagagaggaaaaagccatgtgaagatgatagataataacactttgtacataaacctttctttttcgcttaaaaactctgttcaacaaggtgattggcgtatagcggtaaagccggattttttaccttcattccattgggcgccacatcttactcctactgatagaaatgtcatcgatcaacatgtattccgttctcctgcccttattgtagcagacgatcatcaaactcttattcttattcccgatttggatattatgcagaaggggactcctgtacgatggtatatggatatggacgcatcctctaatacacttattctcggaatgtgtaataaccatgtatccgaacacgttctgtttgagcgtgatcaagaaactacttacccaaaaggagatattgaaataggcttttatttgatgtattctgatagcaaggaagtattgcggaatccttttaagaagccgttagaatttatgtggagtcgatgggggcatgctgcatatgagaaaggtaatccggtgaaggaaaacctagaaacgtatgtgaaacatacttataattgggcttttaattcatggtcagaaaatgtgtggcagcaatttgagttagatgggaaaaaagtgggtgctcccgtatttattgtgaatgttactcaaagtcctaattatccgggagagattaatgaacgtgaatttcgttctatctggaatcaggcatggttcagttcattgcgttctgcaagtggattatatcgatatgcaagaagaaccggtaatagggagcttcttgcaaaagcaaatttgacaaaagaactggctctgtcatttccgcagaggaatggttttttctatggacttatcggtacggaaatgcatgaagtagagattgatggtaaaaagtataatcggagcaaggggtggaatacctattattggggaaattccaacagaaacccttatacctggaatccgaaagaatctccgtatcatattcttgatatgagttggacagcattgttgatgcttcggtggtatgatgaattagaaaaagatgcccgtcttttggcttatgcagaagattatgcgatggctttacttggaatacagtatgaaaatggttttttccctggctggcttgacttaaagacaatgcagccgatgaaccatttgaatgcttctcctgaaacatctttatcagttacttttttacttaaactgtatgagcttacacataaggaagagtataaacgggcagcatttagagctatgaatgcagttatccatgaaattatcccggttgggaagtgggaagactttgaaacctattggtcttgttctcgttacggttcggataacttggtaggtaaaaaagttttgcggaacaatatgcataaacagaataatttttcaatgttctggacagctgaagccttactggagtgctatcgtcttacctcaaataaagaatatcttgattatggacagcgtacacttgatgaattgctgatgacccaagcatcgtggcagccgccatacatgtatgtaaatgtattgggtggttttggtgtgttgaatgccgatggtgaatggaatgattcacgcgaaagtcttttttccgaactcatcattcaatatggaaaacttcttggtaagccagagtatatagaacggggatatgctgcacttaaggcatcttttgtaatgatgtattgtactgaaaatcctcaaaccaaacagcaatgggaaaaagttcatccgttctttgcttcagaggattatggattcatgatggaaaattacgggcatggcggccgtacaaatccggtaggtgaaggtatgggtgagtttacaatctatgattggggaaatggagcagcggctgaagcgtacaaccgcatccttgataaatttggaaaaatagaataatgattcgttaacattaataattcaactatggtaagatcaactttaactttattggccctatttaatgtggctatactgtttccgggtaaagcaatgtcccagaacagtgaagggcgggagtttaacggtaagtatcaaaaggaatatctggataagattgcatttcctatagggggaatcggcgccggaatgttctgtttggagggaaccggtgccatttcgcatgtgtctctcagacaccatcctgatgtgatgaatgagccgtatacctttgctgcgatttatgtaaagggggttgagaacggagcaaaggtattggaagggcaggttccgacttggaagttatttggtcctgcacagagtggtttaggtaggggagacaagacgtacggtcttccacgttttgaagaggcggtattccaggcacgtttcccttttgcaactgtagatttgaaagacaaggatatgcctttggctgcaaagattacgggttggagtcctttcattccgacggatgcggacaattccagtttgccggttggagtactggaatatcaatttacaaatacttccggtaaggctatcgagacggtattttcttataataccaaaaatttcattgatggtcagggtactattcaaggagtaaagaacgggtttgttttagaatccgatcagaacaacagcggactggccatttatgtggacaatgatgctgctgtcgtagaccattgttggttccgtggtgcctggttcgatccgcagactgtggtttgggataatattcgctatgggcggatcgctgataagcaaccggttaaaggtgctgctccgggagcgtctgtttatgttccgttagcgttgcagccgggagagacgaaaacagtcagggtaaacttctgctggtatctgcccgattcaaacctttctatcggtggtgccagaaaggtaggacaggcatttacgggaatgccctgcaagggaacggcttccggtcagcaacctgtgagcggctttgtcggcaagcagttgctgaactcgttcgataagggtggagatggactgacgggtattattcagtctcctgagttcaatattgggaaaagatatctgaagtttctggtaggtggaggcagtcaggctgaccgtacttctgtaaatcttgtagtagacggaaagattgtagagacggcggtcggaaatcagacggagactctgagtgaaaccgtatgggatttgaaaccttatcaaggaaagaaggcttttgtgaaagtcattgatttggatgtttacccgtggggacatattctggccgaccagtttgtgttgacagacaataggaatgaagatatttacaacttgtcttctacatccaccttacttgccgattttgaaagtaacagttggggagactggcaggttgtggattcttctgaagaagaaaaacaattcctggcagatgaaggagatgtcgaagctacctacagaccttggtactcggagcgcttcaagagtttgaatgaggttatcggctattgggatgcaaaccaggcgatgctggaaaagaacagccggctgttcagtgatgcattctatagttcctctttgccggcagaagtattggaggctgttgctgctaatttaactatattgaaatctcctacggtattacgtcaatgggatggaagattttgggcttgggaaggatgtcaggattcttttggctcttgtcacggaagttgtacgcatgtgtggaactatgcacaggctttgccccatttgttcccgtctttggaaagaaccttgcgtgaaacggaattcagggtaagccagaatacggaaggacaccagaattttagagtcaacttgcctatttcggcaccgcctcacaacttccatgctgctgccgacggacagttgggcgggattatgaaagtttaccgtgaatggcgtatcagcggggatacacagtggatgaaagaccttttcccggcagtgaaaaagagtcttgactattgcatccgtacatgggaccccttgcataagggctatcttgaagagccgcaccacaatacttatgacatcgagttctggggaccggacggcatgtgtacaagtttctatttgggagctttgactgcgtttatagagatgggcaaggagctgaagcaacccgttaaggaatatacggccctgctgtcaaaaggcaagaaatacatggaaactgcactcttcgatggagaatatttcatacagaaaattcagtgggaagggcttcaggctcccaatccggttgatgtaatgtctttcgggggaagttattccgaagaggccctgaaattgctgaaggaagaagggccaaaataccaatacggtaccggttgtctgtccgatggaattttagggatgtggatggcttccgtatgcggactggatgaagtgctggacaatgaaaaggtcaggagccatctggtggccgtacacaaatacaatctgaaacatgacttgatagaccatttcaatcctcaaagaccggtgtatgcttgtggtaaggatggcggattattgctttgcacatggccaaagggtggtatgctgtcactgccttttgtatacagcaatgaagtctggaccggtatcgaatatcaggttgccagtcatttgatgatgaaaggtgaggtggaaaagggcttggatattgtccgtgaatgccgtgagagatatgatggaagagtaagaaacccattcaatgagatagagtgcgggcattggtatgcacgtgccatggcaagctatggaatgttgcaggggcttacaggagtgcggtatgatgctgttgacaaaaccatgtacatcaattctaagattggtgatttcaaaagtttcatcagtactgataccggtttcggaactattgaatggaaagcaggaaagcctgtgttgaacgtggtttatggcaacattgatgtgaaacgctataatgtttcaggcaagattgtggattgaggtcaattaggatagggatgtacaatcaaagacagattaagatgacagagaagaagaaacttcttgttttgtgtgttgcactattttgttttatagctgtttctgcacagcagagaatgtctgtatcgtctcctgacggaaaacttagattttctctgaaagtaacgccggagagtgtttcatatgacatcgactataggaagcagtctcttatagcaaattctttgcttggtttcagctttgatagcggagagttcggaaggaatcttaaagcaggaaaggtgcagcgtaaaaagattgatgagacatacaagctcattgtcggcaagacaagtagtgtacgtagccgttgcaatgaaatgaccgttcccatgcaggaacggtcagattccggccgtctgataaacctggttgtaagggcattcgatgacgggatagcattcagatatgaatttccggaacagaaagcatgggattcatacgtgatgtatgatgaaaggacacagttcaacttgcaaggaaacccgatggcgttgctcatgtacctgcccgggtatgtgaatacacacgaaggggtatacagtcatgtaagatatgacaaggtggcaaggaaaaggctgatagagatgccggcgacattcgagttcgacaacggggtggcagtggttataactgaagcggccataagggactatgcgggaatgtacctggtgaaggagaagggtggactggtgggaaagctctcgccaaaactggggcaagagaagataaaggtcgagacagacagtttcccgcaccgtaccccgtggcgcgtaatctccgttgcagaccgggtgggaggattgctggagacgaatatactaacaagcctgaacgagccctgcaggattgaagacacttcatggattaagccttgcaggaccacgttcacatggtggaacgggaatgtcgtgccggacagcacgttctctccgggaaacaacttcgatacaaacaagtactacatcgattttgcagcacgcaatggcttggatgcacatggaatctacggatatgcggagactccttggtactatgatgacaacttcaatttcggatgggcgggacccaatgcggacgttacaaaaccgataccgtgcctgaacatgccgagaattgtggaatatgcaaggagcaagggggttggcatacatctgtgggtacactggagaccgttgtacgacaaactcgaagaagcctttgcgctctatgagggatggggagtaaaaggactcatggtggacttcatggaccgtaatgaccaagagatgatacgcatccaagaagagatactggaatgtgcggcaagacacaggctcttcatacagttccatgggtcgagcaagccttccggactggtaaggacgtatccgaatgaattcacacgggaggggacactcaactatgaagtatgcaaatgggacacgctggtgaatgcggaccatgacattgcgatacccttcaccaggatgctggcgggagcgacggactatcacctgggagggttcagggcactgccgcgctcggagttcaagatacagtatgtaaatcctcatgtaatgagcacgcgctgccatatgttggccatgtatgtggttttggaaaaccatcttacctcgttgtgcgatacgccaaaggcttatgaaggtcaaccggggttcgaggtgctccgtaccgtgccgggaacgtgggatgagataagagttccgctggcaaggatgaatgagcatgtcacggtggcccgcaggagcggttcggactggtgggtaggctcgctgaacaacggtacggaaagggatctgaaattggaattggacttccttagtgagggggactaccaggcaacgatctataccgatgcggaggatgtggaccggaatccaaacaatctggacagacaggtacggaaagttacaaggaaggatatcattgaactgaatctggcaaaggatggaggagcgctattacatatcagaaggttataagggtgatgtttatcagttgaaattgtatttcaatcagttgttagtttgttaggataagaagattgttccaggataatatttttagtcaatggatttataacatgaacagaagaaattttataaagagagtgggccttttgggggcaggatatgcgctgaataaaaacttgatgtttgcgaattcaggcgtagcttcgacagctacctctttttcgtcgtttccaacagtaaggaagcctatatcggaaaggaacttcaaaagtcctgccattgaaaaggccattgctacttttaaacagaaggtcaagaatgaagaactggtctggctgtttgggaattgttttccgaatacgttggacacaaccgttttttattcagaaaaggatggccgaccggatacatatgtgattaccggtgatattgatgccatgtggttaagggatagttctgcccaagtatatccgtatttggatttcatgtctgaagataagaacctgcaaagactgataattggcgttatcaataagcagacctcctttatattgaaggatccgtatgccaatgccttttatgatgatgatacgaagtatacaagatggaacagcgaccatacggagatgaaaccgggtattcatgagcgtaaatacgagttggattcgctttgctatcccattcgcctggcatatggatactggaaaaagacaaatgatgcttctcctttcgatgcgcaatggaagaaggcgatagaaaccgttttaagggtctgcaaggaacagcagagaaaagatggtaacgggccttatagctttcgcagaacttcggaatgggctatagatgctgttcctatgggtggagtgggctataaagtaaatccggtcggattgatttgctctactttcaggcctagtgatgatgccactatctttccttttctcgtcccgtccaatttctttgcggtggccagtttgaggcaggcttccgaaatggttcaaaagataaccaaagacaatgtactggctgatgaactgttggcgttgagtaaagaagtttataatgctttgcagacttatgccgtggtgaatcatccgaagttcggtaaaatctatgcttttgaaatagatggctttggatcggcttatcttagtgatgatgccaacgtccctaatctgctggcgttaccctatctgggtggtgttgatagtgatgatgcaatttatgccaataccagaagattcgtgtggtcggaatacaatccttatttctttaaaggttcttattttgaagggataggaggacatcatattggtacggacatgatatggccgatgagcctgataatgaaagccctgactgctcaagacgataaagagttacagcaatgtatccagatgctccagaaaacgcatgccggtaccgggttcatgcacgagtcattccacaaggatgaccccaagaaattcacaaggagctggtttgcatgggccaatacattgtttggagaattgctgtggaaaacattcaatgagaaaccatatttattggaatattaatcatctaattaatcaatgtaaacaaaaatttatgagaagaattacaaaattcagtttgttactctcccttgttctgggattgtactttcctactgtttttgcacagtcgaacatgacgaacgaaatgtttgacttggcaaagttgaagtcgggtgtaaaaaacaaaagaatctccagtacagatcctaccggaggtaacagagatcacttggagcccttcaaaccaggtgagaaacgcatcattgcagacatcaagggaacgggagtcatcaaccacatttgggtgacgattgcgcctccacctcccactttgagcagaaacgacattatcattcgcatgtattgggacggcaacgattatccttcggtagagtctcccatcggccctttcttcggacaaggctgggatgagagatacaactacgcatccttgcctctttcggccggtcctgaaaacggtaccggtctgtcgtgctatttcgctatgcctttcgagaagggcgcacgcattgaaattgagaaccagagcgaccgcaacatagatgctttctacttctacgtggattatctggagatggcgaagcttcccaaggacatgggccgctttcatgcctggtataaccacaacctgactgaagcacttcccgaaggcgagacggagtggggagttaccggtgcccagaagccgaacaccaccggcgaacgcaactatgtgttcatggaaacccaaggcaagggacactttgtaggtatcaattactatgtgcattgtcccactcccatgtggtatggcgaaggtgacgacatgtggttcattgatggagaaaaggttccctcgctgataggtacaggtacggaagacttcttcaatacggcctggtgtcctaaagaagccttctcgcatccttacttcggttatccccgtgtgaacaatgatataggctggctgggtcgtacccacgtttaccgattcttcattgaagatcccattttctttgaaaagagcctgaagggaaccatcgaacatggctccaacaacaacttgacgttggatttgtctaccgtggcttattggtaccaagattcggctgtggctcttcccgaagctcctacaaaggcacagcgtgctccgaaacctttcatcaaccatgttgatatacatcgttggcgggatgcctggcgtaagtccaagggtaacaaagccactctgtggggcaacgagtaaacttttgtaacgctctttttttatacgttcataggctgatatttatatccggggttttgccattatattggcaaaactgtgtctctatattggcaaaactgtgccactatattggcacgactatggaaaaatagttctacggagcagcaaattcaataaatcattaataaaggtacgaaatgaagaatattcccaaaaagcaatttgcgggctggatgctgatgctactgttgtgcatcagtatctcggcatttgcccagtcgcctaagaaggtgaccggacgtgtgatggatgcacaaggtgagttactcatcggtgtgaatgtgacggaggcggcagacccttctaatggtgtggtgacggacatcaacggtacgtatacgattacgttgaaaggtaataagccgtcattaaaattctcttatattggctttaaggataaagtggtagcggtaggctccaaaggagtgcttgatgtagctttggaagaagatgtggcagcccttgacgaagtggtggtagtgggcttcggaacgcagaagaaagcttctgtggtcggctccattaccaatatagagccggccaaacttgccgcggctcccagccgttcgcttagtaacaacttggcgggtatggttcccggtgtgattgcggttcagcgtagcggtgacccttggttcaataactccgacttctggattcgtggtatcagtagctttactggcaataccaatccgctggtattggtggacggcgtcgagcgttcgctccacgacatcgaccctgaagaaatcgcctccttttccgtgttgaaggatgctgccgccagtgccgtctacggtgtgcgcggtgccaatggtgtagtgatgattgagaccaagcgcggcaagattggaaagccgcaggtgaacgtccgcttcgaacactcctttacgcaacccatcaagatacccgactacatcggcagtgtgaagtatctggaactgattaacgaaatgtatgccgagcagggtagaaacccgtttgtaagcgaagccaccctgctgaactacaagaaccagaccgacccggaactctatcccgatgtgaattggtgggatgttatctccaaagaccatgcagacaacacaaaggcgaacgttagtgtcaacggtggtacggacattcttcgttatgcgttggtggcaggatattacaatgagaacggtatcattgaacgcgacaaaaaccaggagtgggactcttccctgaaggtgagccgatatacggtgcgttccaatgtagatgtgaatgtgactcccaccactttgttccgcgccaatgtgggcgtattcctgcaaactcgtaacgctcctccgggagacacggaaaccaaccagggcattttctatcaagccatgcgtgtacctccctacgtgcatccggctatctatgccgatgggcgcattccacgtgtgatgtacaaggagaacccttgggcgtgggccacgcagcgtggatacgaaaaactaaatcataataagattgaatccttagtatcgttggaacaagatttgaagttcgttacaccgggattgaagttcaaaggaaccttctctttcgacaagttctcggcaacttccgtaacacgttccaagaacccctattactacaatcccgccaccgcacgcgatgcagagggcaacatcatcactgatgtgcagaccaccggacaagagttcctgggctatgcaaaaggagctgaatggggcgaccagtccatctatctggaaggaatgttctcgtacaaccgcattttcggcaaagtgcacgatgtgaacgccatgttcctctacaaccagaaggagtatgacaatggtgatgcgcttccctatcgtacccaaggcatagccggaagattctcttatacttacgacagccgctatgttgccgagctgaacttcggttacaacggctccgagaactttgccaaaggcaagcgcttcggcttcttccccgccgtggcgttgggatggattgtatcttccgagaaattcatggagccggtttccgatgtcatctccaacttgaagctgagagctacttggggtaaggccggtaacagtaacattggtggtaacagacgtttcgcctatatttctaccattgtcaataccggttcgtacagatggggtacagatgcggaaatctatcgccttggacgttcggaaggcgaaatcggtgtgaacaacttgacatgggaaaccgtgaccaagatgaatgccggtatcgacttaggtctatggaatggtagcgtgaacctcgtagtggatgtgttcaaggaaaagcgcgatgacatcttcatgcagcgtaagaatgtgcctggttctgccggattcaaccgccctgtttgggccaattatggcaaggtcgataatcagggatttgatgtgtctttgaatgtcaaccacaagttcaatagcgattgggccatttccgctatggcaaactatacctacgcacacaataaggttgtggaaatagacgaacctgccgccatcttgggtacataccgttcgcaaaccggtaagcctatagggcaattgtttggcttgatagcggaaaggctctttacggaagatgatttcgatgaaaacggtatgcttaaggaaggaattccggcacagaagttcagtgatatgagtaacctacgtcccggtgacattaaatacaaagatttgaacggggatggtgaagtgaccgcagtagataaaacagccattggtggtacacgtattcccgagattgtctatggttttggagctacagtaagctataagtcgttcgatttgggagtattcttccaaggaacaggtaaaacctaccaactcttgggcggagagacctggttgccgggttcttccttaggtgctggtaacatctattcgaacattgacgaccgttggacacctgaaaatccgaggcaagatgtattctggccccgtatgggagacaaggctgtggcaaacaatgaacaagcttccacatggtggttgcgtgacatgagtttcctgcgcttgaagaatctggaacttggatatacccttccgcaacgttggactaccaaaattggcatccgcggctgccgtttgtttgcaagaggaaccaatctgctgacgttctccaacttcaagctttgggaccccgaactggaaactaccgatggattgagatacccacagatgaaatctgtatcagtgggttttagcatcaatttcaacaattaattaagatacgaagaaaatgaaaaaatataaatctatagcaaaagctgtcttattgtcgtgcaccctggcattgacaacgagttgcaacgatttcttggacaaggctcccgacgaccagcttaccatggagatgattttcacggacaagataaggactgaggactggttggcaggtgtttattcatccattcccagccccatgtgggggtatttcaaggcacaaggttataacattatgggcgatgatatcactattccccaagattggtcgccgtatggatggagcaatgtgtatgcctacaccaccggaaactggagtcctatctcaacatgggacccctattattgggtagaattacacaagcgcatacgttccggccttatcttcttgcaagaggcaaaagtacttccggaaaaagacctgaaggaatcttatgtcaaccagatgaagtacgaagtccgtttcctgatagcctactattactctttgatgattgagttgtatggtgccataccgtttactcccggtgtgcttgtttccgtcgatgcgcccgaatcggagatgatgactccccaaagaccctatgccgaagtggtagattggattgacaaagagctgctggaagtgtcagagcatttgcccgctgtctatcccaataataccgattggggcagggctacctctatcatggctttggcaatacgtgccaaaacactgttatttgccgcaagtccattgttcaacggcaatccggatctcaaggactggaagaattcggaaggagaattcctctttgatgccgaagccaagccggaaagatgggaaaaggctgccaaagctcatctcgacttgataaaggcagccgaagcggccggacataagctgtactatgagtataatgtggatggaagtatcgaccccttcatgtcttactacaacatgtcgttgaaacgcttctcagaaggcaacaaggagattcttttcggacgccccgaaaatgtggacctgaactactggcaggctcatcatctgccgaaaggtatcggtggaaatgccgctatgggtgttactcaggaactggtggacgctttttatatgaagaacggtgaaatgcctatattgggatataacgaggatggttcgcccattatcaacccggaatcggggtatgtggaaaacggattctctaccaatacagagtatagaaccacgaagtggccgggcggtggaccttcgaaccttgccaataaagaaaccggtgtaagcccggtaacagaagaaggtacctacaacatgtattgcaaccgggagcctcgcttctatgtttccgtcatctataatggcgcatggctgggagttgataaccgtcgtgtgaacttccttcaaggaggccgtgatacggatatgactttcgactctccgcagaacggttataatgtccgtaagcgaatctctttggatgtacttcccagagatggaaagtatgtatatcagccgggtatcttatacagaatggctgaagcgtatttgggctatgcggaagcattgaacgagtcttcgccagctcccactcccgatgtatataagtatgtgaacttgattcgtgaacgtgccggaattcccgctttgaaggaagggctgagtaaggaagaaatgcgtgccgccattcagcaagaacgtcgggtagagttcaattgtgaaggtatccgtttccatgacctccgtcgttggaagattgccgacaaatacctgggcggcaagctttatggtatgaatcatgacggttctgagaagagcgatgatgtgaacaatccgaaggctttttataagagaacttactacaagagccgtaccttcaacaaaagaatgtatttatggcccgttccgcaggctcagatggacatcaaccccaatttgagacaagctcccggatattaataaataattagagaacaagtatgaaatcaataaaattcatttttagtgcgatgacattggcatttgctgcattgacatcctgttcggatgataacagtgtggacttgtccaatcgtaagtttgtacgtattgaccaatcatcggtttatttggagattgacgaaactgccacagttaccgcttctgttgatgacctggcaggcgattcctatcagttgaagtggagtgtcctcaactccgatgtggctaccattgaaggtgtggaaaataatgcagctgtaattacacctgttgctgttggaaaaacggtcatcaaggtagaaacggctgatggcaagttgtgctactttagcgacttgactgttaccaagactcctaagacgtgttacattgactttggtgtcattgattctccggctccgtttaacaactataggaatcccagagaccccggattggtaaatatgctcgaccatagaggtcgtcctactactttcggcatcgaggtggacaaaccgttttccggagaattggctcgcggtttgaataataatttgggtcttccaaaaacagcttctgaggatatgtttttcagcgacggtattgctattccgctcagtggatttaaggtgacaggtctctctcaaggaacaaaatatacgttcagtttctatggtcacatcaatgaccgtggaactgaaaccgagttccatgtaatcggaaagaacgatggcgttgcttatttggttaatgacgataatttcgatagaacggtagagattaagggtattgagcctaatgacgaaggtgttgtttatatcgaaatgaaaccgggcccgaacaatgtacaatgggccaaattctttggcgtaaataccatggtactttcagaagagtagaattgatgtggttttatagaccataatcctttctattgaaataatactgtcagtgaggagagataccgtttaaacaggcattctctccttgcctttttaaaaaacatatagtaaaatagtttatgaaaattaatttgaaagaagtttctgttttcttgtctgccattctattggcaggctcgtatgccgtggctcagaatccatacagatggacggatgagctggagttattgaaaagagtggataaattgccggagtatcgcactggctcttatgtggagcagttctcgagttacgaccgtaccggaggcaatgatgatggttttgcgggtacttattctttccttcgtaaggaaggtgataagttggtgattgctgagatggaaggccccggagtcatcaaccgaatctggactcctacaccgacggacaatatgctctatttctattttgatggacagaaagagcccggtctgaaaataaagttctcggatttgttttccggtaaggtttatccgtttacaaagcccgtttgtggtaatgaaattggtggtttttattgttatctgcccattacgtacaaaaagtcctgcaaaattgttttcgatggacctaaattggaattcattcagatacaataccgtaacttgccggaaaagaaggtggaaacctataccggtgaattctcacagcaggataaggatttgttggctgaggtgaatagaatatgggctgacttgtctcctgctgtaacgaattatacctttggaaaatcagctggtgtacagacggaagaaaaggtatttacactgagtccgggagaagaagtttctttctttgagatggcagaaccgggacgtattgtaggtatgtcgattgatggcggaacatctttcgaaggtttatacaaagatgtgattctttcagctaaatgggataatgagaaggtggaggctatttatgcccccgttgctgatttttttggatatgcctatggaaaaggagcaatgcggagtatcttaatgggtaagcaaggtacttccaactactgctatctgccaatgccttttgacaagtcagcttctatgaagatgatttataaaaagagagaaggtattcagcaatctcctatttctgtaaacgttaaagtgtactataacagtaataagcgtaatgtgaaggaagagggtaagttctattctgtatggcgtagagagaaaactcctctcggcattttccataagtttgctgcacaaaaaggaaaaggacattatgtaggaaccatccatcaggcacaaggcctgcgtccgggaatgaccttgttcttcgaaggggacgacagcacttacgtagataataaaatgcgtctgcacggcaccggttccgaagactattacaacggtggctggtatgctttattggatcgttgggacagaggaaacagcctccccctccatggttgcctggattattcgcttccgatggccagaaccggtggataccgtttcttcttggccgacaaaatgtcctatgagaaggaaatctatcatggaatggaacatggtgaagtaaaaaataattttccggtagattatacatctgttggattcttctatgcagcccagccattgcaaggcagagaagagcctactgctgaattacgcactgtatatcagccgacagaacatatctatttccctcaactgatgcagctgagtcttggtggaggtgtccaggtaacaaatgagcgtggaatccgtatgaccacccagcatggaggagtagtgcgcatcatgctgaacgatgtgcccgaaggaaaatataaagtgctgataaactattttgagaaaccgaatggtgccgacttccaggtttggcaacgccagaagcaactgtccggatggatctctactaagaaggacaaagaagtgtctaaagacagagtacatgtaggagacatcaatttgacggaacaaaccaattcagtcactttccatgtgagaaataataacggtggggaccagtttgaactgggactgattatcctggaaagaataaaggaatagatgtgggaatgtgtacttgtatatggaattgataagaatgagaactaaacaaattttactgttcgggcttgttacctgtagtttgacgggcaatatggcttgtaaggatgctgatagtgaaaaaacgctgtgtattgataatgtacgtatgatatcccgtgtcacgggtgatcctttgccgggagatacattgctgaatcccaataataccggacctgactttgatgtatatggaacggatttggggttaatgtggcatatggatggaaaccgtgtgggcatgtttttcggagataccagtggagaaggttttgtcgtgaataaaaatggtggcaatggttccaactggcgttccaacgtactggctttttcatcggatacagagcttacagacggtcttaaaatagattcaatgctgcttgatgccgatggtaaggcgcttgaggtatgtgcgggcggtaagacgaatccggaggtataccagacttccatccctacgagtgctattcgggccggtaaaacggattgtgtccatattatgaacatctatgattggggagcgcctcatggacgctggcttaccaatttttcttctgtctatacttccaatgatgacggtcggacatgggagcggcgtgaagaggtgactttttctcccgacagtcatttttcgcaagtggcttatgccaaatgtgacggatggatttatatgctcggcacacaggccggacgtggtgatgctgcgtatctggcgcgtttccttgagaaagatcttctggatatgaaggcctatgaatactggaacggtgaaagtaaagagtggatacgtggaaatgaggctgccgctactccggtattgagaggtcccgtaggagaagcgtcgctgatatggcacaagaagtttgagcgttggattctgacttataattatgatccgaatcatgacgagactcctttgaccaaaaggcatgccattctttattgtacatcgaaggatctcgtccagtggagcgagccgaaagtattggcggaagcggacagatatccagctttgtattgcgcttacatacatccgttgaaagacaatgatgaccagctttggttcatcatgtccatgtgggggccatacaatgctttcctgatgtgtgccgatatgaagctggaataataatcacttgacttgaattggatatgaagcttaggaatttatttttattaatagctctctcgttaccggtttgcttgtctgcacagacaagcaaacaaatctatctgcaacgagccgattctttgcttcagcagatacttactctctataaagtggagaagtatggcctgctgacggaaacttatccaagaaacccggagcagagaattacatatacggccaataccggcgctgttgttaaccagcaggaggtctctttcttgtggccttattcagccttggtatccggttgtgtttctttgtataaggtttccgggcaaaagaagtacagaaaactgatggaccggcagataaagccgggactggacctttattgggactctacccggattccccattgttaccagtcgtatccggcttttgcaggtcataatgatcgttattacgatgacaatgactgggtggccattgatttctgtgattactatgaacggactggtgacaaggagtatctggaaaaagccatccagctgcatgactatatttattccggatggtccgaagagttggggggaggaatctattggtgcgaacagaagaaagaatcaaaaaacacttgttcgaatgctccggctactgttctctgtatgaggctgtttaagttgactaaggatgcaaaataccttgagcaagctaagaagacctatcaatggacccgtgacaatctttgtgacccttctgactttgtatattgggacaacaagaatttgcagggaaaagtggatccggccaaatatacttataacagcgggcagatgattcaggccggtgtacttctctatcaggtaactggagagaagcgttacctgaaggaagcgcagcagacagccgagggtgcctgccgtttctttctgaaggtacagcctatcgcaacaggagagatgaaattctttccggcaactccttggtttaatgtaatcttgttcagaggtttgaaggcgctatatctggttgataggaatgaggcgtacataaagaccatgattgcgaatgcggattatgcttggaactatgcgcgtgatgagaatggcttgtttagtaatgattggtcgggaaacagaaaagagcagttcaagagtctactggagaatgcctgtatgattgagcttttcgccgagatcagcgaactgcaataaataaaacctttaaacacaataaataaacagaaaatgaaaaaacagattgcagtattggtatctgccttgctattgggtggcggtgcctatgctcaaaatagtgtgcaggcgcaaaagccgaaagcctacatggtgtctgatgcacatttggacacacagtggaactgggatatccagaccacaatcaaggattatgtgtggaatacgatcagccagaatctgtttctgctgaagcagtatccggaatatatttttaattttgaaggaggtgtgaaatatgcttggatgaaggaatattatccggcgcaatacgaagagatgaagaaattcatagagagcggccgttggcatatcagcggagccagctgggatgccactgatacactggttccttccatagagtctgcgattcgtaacatcatgcttggtcagaattattatcggaaggaatttggtgtggaaagcactgacatctttttgccggattgtttcggttttggctggacacttcctgccattgcgtcccattgcggactgatcggcttctcctcccagaagttgcagtggcgcaacaaaccgttctacggcaacgacaaatatcctttcactgtcggcttatggcaaggtatagacggctctaccatcatgatgactcatggatatgattataaccaacgttttgaggacggggacctgtcggaaaacaaggacttgttggaattgaccggccactctccgcttcacatggtctaccgctattacggtacgggagacataggtggttcacctacattggagtctgtacgtgccgtagagaaaggcctgcaaggcaatggtccgttgcagattgtcagtgccacgagtgaccggatatataaagacttccagccttacgcaagccatccggaactgcccaagttcaacggtgaactgttgatggatgttcgcggtaccggatgttatacttcccaggctgccatgaagctgtacaaccgtcagaatgagcttttgggggatgcagcggaacgctcctccgttgtagccgaatggctgaaccaagcttcctatcccggagctgcattgactgagaactggcagcgtttcattttccatcagttccatgatgaccttacgggaacaagtataccgcgggcttatgaattctcatggaatgacgagttgatttccctcaagcagttctccggtattcttacttcctccattgacgctgtggcaagaaagatggataccagggtgaaagggataccggtggtgctttacaatgcgcttggattccaggttgccgatatggcagaggtggaacttgccttgccaaagaaaccgaaagggattaccgtatatgatatgaatggccggaaagtggccgcccaattgctgtcctatgctgacggtaaagccagactcttgatagaggctattgtgcccgctaccggttatgcggtatatgatgtccgtacttctggtccgtcggctgacacccgggtatctgtggattccaatgcattggagaattccatttataagataacgctggatacaaagggtgatatcgtttcgttgtttgacaagaagaacggcaaggagctggtgaaacccggtaaatccattcgtctggcactcttcacgcagaacaagtcctacatgtggcctgcttgggagatcttgaaggagactatagaccgggaaccggtttccatcacagaggatgtgaagatgacactggtggaggatggtgagctgcgcaagtcactctgcatcgagaaacgttatggagagtcactcttcaagcagtacatccgtttgtatgagggtagccgtgccgaccgcatagacttttacaatgaggtggactggcagttgtccaatgctttattgaaggccgaatttcctttgaacatggcaaatacggaagccacctacgatttgggacttggaagtgtgaggcggggcaacaatacggagactgcctacgaagtctatgcacagtattgggccgatttgactgaccgtagtggaaactatggcatatctgtcttgaatgacagcaaatacggctgggacaagccggacgacaacaccctccgcctgaccctgctgcatacccccgaaacagacaaggattatgcttaccagaaccgccaggacttcgggcatcattgctttacatacagtctggtgggtcatgccggtggacttgacaaggctgtcaccatagagaaggcggagatattgaaccagaagctgaaagctttccgtaccgataaacataggggtacattgggtaaggagttctctttcgtctcttccaataaccgcaatgtcattatcaaggcattgaagaaagccgagaactcggatgagtatgtagtgcgtgtctatgagataggcggtgagaaggtgcaggatgcggtactttcttttgcaggcgaaattgccagtgcctacgaagcggatggcactgaaaagagtatcggttcggccgaattcagtggaaacgggctgtctgtaagtataaagccttattctataaagacattcaaggtacgtttgaagtcatcgggcgaggacgcttatcaattgcagtatgcctctttaccgttgtcctataactgtaaatgttcctcattcaacgagttccgcggtgaagctgattttgagtcgggttattcgtttgcggcagaactgttgcccgaatccctgactgtaaacgggattcctttccagctcggcgagaaagatgccgccaacggaatgacgtgcaatggtgatactattgttctaccggaaggtaaaaagtataataaactgtattttctggctgccgctacggacggggactatgccgccactttccggtgcggagggaacaagagtgaggtcattgtaccttcctataccggatttgtcggacagtggggacattcgggacataccaaaggttatctgaaggatgccgaagtggcttatgtgggaactcaccgccactctcctacagccgatgaggcctatgagtttacctatatgttcaagttcggtgttgatattccggcaggtgctgccagccttatacttccgaagaatgaaaaggttgttctttttgctgccacattggtggaggaaactctgaaacccgtccaggttgccactagcttgttccatacagccatccgtgacaatgagatggagttgaacagtgtggaggtggaaaaagaaaatctgttgaagggcgcgaagattatcgcctattccggctattttaatgataatgagaagcccgaacgcatcgttgacggggatgtcgataccaaatggtgtgaagtgggaagtgcgttgaactatgtggattttgatttgggtgaggcgaaaactgtgagcggttggaaactggtgaatgcaggccgtgaggacaaagggtacattacttccgcttgcttcctgcaaggcagaaacagccagactgaagaatggaagacacttgacaatatagatggaaaccggcagaatgtcgtatcacgtatgattgacactccggcgcaggtacgctatgtacgcttgatgataacccgtcctatgcagcatgcaggaggaagggtgttacgcatcaatgaggtggagctttattgattatatgctgtaggaggtattatagcttcctacagtaattttattgacatatagatatttatgagttattcaagtagatgttgtttcctattcattgtgctggttcccgttctgttattatcatgtactgataaaaagacagaggaagctatacagttggaaaaagctttaatatttgccggtgataatcgtgtagaactggaaaaagttttatatcattataaccaatgtgttgcagatagtttgaagtataaggcagctcattttcttataagaaatatgccggattattattcgtattattctccggaaaatgattccataaaggatttgtaccaagctgttgctcaaaagaaaatgagtgaagatgtagctattgaagtagctcaaaaaaagtttgttccatttttggagcgaaatcaaaaggttatatacgactcgcacgtaatcacagcttcttatctgatccggaatattgatcatgcttttggtatgtgggaaaaacaaccatgggggaaatatattaaatttgaagatttctgtgaatatatactgccttaccgtgtggcttttgaaccactttcagagtggagagagacttatgccgaggcggcagagcagatattggattctttgtttatcggaagtgacgtattacaagcgtacaagctgataaacgaaaatattataatgaaacctgactggttttttaccatacgtacatcaagtgtgggattgtttgatatgagtgctgaatatatgtggaacaaccgtattgggaactgctggaacagaacttattttactacttatcttcttcgttctataggtattccttgtggcgttgactatctgaagcaagcacctaaaagtgcaaccaaccattgttggagttttatcgtagataccacggggttgacatgtgattttgaaggaggagatcatagaatgcctattagagaccgttttgttacattttatgagctgaaaggaaagatttatcggaaaatgtttgcttcccaaaagctccagttggaagaggttaatcaagaaaagggtattccgttttctctttctgataaacatgaaaaggatgtatcaggtgaatatttccccaatgaaaggattgcagttcgatgcgaaaatatacccaaaaggaccaatattgcttatttgtgtctatttaataatagtgagtggattccggtagattgggcagaaataaaggatgacactgcaagatttgaacatatggactggaggaacatagtctatttagttgggtattataaggagggtagaattatacccgctgctcctcctatccttacgactgaaatggctaaacatactatatcagcacgtccaaatatgcaaaagaaaaacaagatgaggcttgaacgtaaatatacagaagctcccattattatttttcttagggatttgttgcttgatgggcggtttcaaggttctaactcgcctgatttcaaaaacacgattgatatgcatgtcattacccaaaggcctccaggctcttatcttacagtgaagcttgatactgtgtataaatttcggtatgtccgttttttggcgagagatggcattcggtcagatataagcgaagtggaattttattctccttctgattcagtaaatccgttgaaaggtattcctatgggaaatccgccggtcgatggtgataatagccatcggatggaaatggcatttgatggtgatccattaacatgctatgcgtccgcaaatctaaacaatgcgtgggttggccttgattttgggaaaaaaacagaaataaataaaattcgttttgctcctcgtggagatgacaattcagtccgtgaaggtgatgaatatgaactgaaatatttatcaatggacggatgggtttctttgggaagacaaactgcgcgaacatattttttagagttttctggtgggccggataaagccttgtatctcttgagtaatttgacacgaggaagagaagaaagaccttttacatatgaaaatgacacccaggtatggtggtgatattagttgtatgcaaatattgaaatgttttgatgctattgctgcaatattaaagaaaggaggtagataaaaatgttttaagaaagtaagaatttgaagttttaataggagtgtatttatataatagaatttctttaagaataggggatggttttcaatgccctaagacgttatttgatatgttgttttaataatgtatcttgttgtttaaccaaatttcaatataataatggtaaaaattaaatcaatgataagaaaatcagtaaattgtttagtgacattaagtcttatgttttttgtatttctttttgtttacgcttgtagttctgatgcagattattctgcaaaaatagaagatattgatagaaatctattaataaagtctgttgcagaatcggatgtgtttttagattttatattagaacataaattggtaatggaacagtttatggtatatacaagaagattgtcagatacggaattaagtgaatttaagtataatgtaaatgatgacgagtacatacaaaagattgtagaggtaacaaacctatcaagtttactacagagtttggaaataaagaaaaactgtttattagcggatgctggatatggtaaattgaatcaagaagagagaaaaatactttttatgaattatttcgaaaagccaatgtatacagcagtgaaaaccagaggtgaaattttgaatctaaaatgttatgagcaatatactgctgaatgtaatcgtgcagaacgccaatgttctatagcagttttggcatgtgcatgtgttggttcttgtgcatgtgttctagctgcttatcttaaactaaatgatgatttggcaaatgctaaacgtgattttgaaaattgtcaaaatggtaaatgaataatttatgaggaaataccgtaaattatacataatcattgttgttgcatatgcagccttattggtagtaagccgaatttattctgtaagttcatttttagtagatattgtatatctttttagttggattgtcctattattccttgagattaggaaacaatatcatgttaaaaaaaatgataaaaaggaagaaatagactattttcctataattctaattttcctgatgatggttatttgcattataaacatgtgtaattatcaatcaggttagaatatagtgaaatgcatttgtatattaatgtagattgagactattagattgtcaatcaagaataaaatgatgtttcatactatgtagttacatcattttatcatattctcaataaattattaggcccattcaagaaagtgtattttcttatttgtaataacagaaggatgactatttttttatggagtgattgataatgttgaatatttatagtttcatttttgtgactaagtttggtgataattactgttaatttaattatatgagaaaaataattttgttgttactgttgcagtgtagtttagctgcagtgggacaagagaaacctaagatttttttttcaaataaaacgatcgatctgggaattataccatcagaaaagacgccttgtgtcagtgttaattttatcttttccaataagggaaagactcctttagtgatttatgatgtaaaagcgtcttgtggttgtacggttccaacatggcctaaagcccctataaaacctgatggtaagagtttgataaaagtggattttgaaacaaagaaacaaaagggcgtatttacaaaaactatttttgtagaatccaatgcaaacgaagatgtgatattacttaaattaaaaggaaaagttgaataaaaatttaaagtagaatttattatgaaaaaattattttttattgttggactattaagtctcttgacatttttctcttgccagaatgaagagaatgtgtactatagttgtgatgaagcagaggatgcttgggtaaaggaaaacttatcttctattcggaagatggaaacgacagagtggttttcgattagtgaaaaattgaaactcccagtttatagagcattttcattggaacaaaaacaatcagtttggatggaaaagttagaagatgtgatgatgaataacgaatggaaaactgaagagatagagcatttacaacaactttatgatgctttaagtatgcattcggaatggctcattccaaatactgaaaaagcagaagaagactttgatgcatttaaaatatttacgtataaatggcttgcatttgctcaaaaagaattgggatggtctaatgatttgctttctgctattgttgggactgcaaatagaattaaaattatgaatggaatagcgttgatagaattcagtaatgggctaaatggagtaaaaaatagatccgaatttacttgtaattgtaatagttcaaatgtaatatggacaacgtgttcaacatcaaattgtattactcgttcttgtagtacaacaaatgggggatgtggatttttgggaagtgatggatgtgatggtttatgtagcaaatagtagaaagaacaatgcgaacaaaaatattcatttttatttgtggaatatctttggtgctgttatttggtgttgctttctgtcgttcaggttatatcaacttattaaatttagtcggctttcccttaagttcattagtcggtttcttactatatggctttctgacggttatttgtttatataagtttagggtaaaattgccacctaaatacattcttcttgctatatggatgggagtaggattgttagaaactatttatcgttgttatagctttaagagtagtattatttctattcctagttctttgttatggtggctggggattttatgtggctatttatattggaaggtatctcgaagttggctaaaagtaattgttgttttgctgcctttcctctttaccttatggatgagttactatgggtattctatgtggattcataaactgaattttgggagtttcactgggaaaatagaaaaagtagtaacttctgattactctttatttgatgagatgcataaagagattaaactgtcgcaactaaaagggaaatatgtggtattggacttttggcataaatactgtggagtttgctattcaaaaatgcctatggtagaaaatttatataaacgctatagggaaaagaatgatattcttgtcgctggagtatttgcttataaacaaggggaagaacatcaagaaggtacttctattttgagaaatgaaggctatacttattctactttctcgacaagctttgacagtagtgtactcaaaggatttggaataaaatgttttcctgcagtggtcgtattaaatcctgatgggaatatgatttatttcggtgacattgaaggagccgcaaagttggttgatttcatattcaagtaaatccttattgggactagttgggggtattagtatcctttatctggtcctattttttcttgcgaaacttaagaaattttatttctgagtgctaattttgagtctgtagttttactactattgtaaaatatttgaggaggtattaagttgagtgtattttttatgataaagaaactgagtaagattgagtatatactgttttctttattatgcatcgtaagtgtttttgctttttccaatagtatgactgatacttacattgtgccaaaatggtgttatactattttggtttttgtgttgtacttgattgttatttcaatcaagagtttgtataataagattttaaactttaatgttttgacgatgtcatatattatagttgttgtatgtacttttcaagctttatatgggatatctcaatggttacagttggttcgttttgataataaatatgggataactggtagctttgataatccagcaggttttgcagttagtctgtgtattggcttgccttttatattattgtgtataaaatcaatctcttcaaggttttggatatttgtaatgcagttgttggctttactatttatttttgcaatagttatatctgaatctaggtcgggcatgataggggggatggctattatttgtgtagaattatacaaacgtcttccaataaggataaatttcaaagtcattataacttgctgtctatttatctcattattatttggcagttattttttgaaaaaagattctgccgatggacgattgctgatttggaactgttcttggagaatgataatagattctcctatgtatggacatggatttgatgcttttagggctcattatatggactatcaggcaaactatttgagtcaataccctaataatgaatatgcgatgcttgctgacaatgtaatatctccatttaatgaatatttgaatgtggcattaagttgtggttttttgggtgtactgatattggtctttggcgtcttatttcttatcgtttgttattataaagactataagtatgaaaaaagggtagcactactttctcttttgggaatagctgtattttccatgttctcttatccattaaaatatccgtttgtttggattgtaatgtattttgatgtttatgtgatattacgtggtagctttatatgggtaatcccttctttggtcaagaggatattatgtgtggttgctattattgcagggatggtggttttttataaactatgtatgcggatagatgctgaatacaaatggaatgctatagcttatttcccgaccaatgagaatgtgagagcttataaagatttaatgccgattttgggtgatgatccatattttttatacaattatgcagttgctctttatggcaagggttgtttggaagagagtttgaatgttgctctacaatgtagaacttattgggctgactatgatttggaactattgttaggcgatatttatttagataaaaatgaacatatcgaggctgagagtcactatagaaaagcttcatttatgtgtccttccaggtttactccattatataaaatctattctttgtatagaagaataggagatggaaaggaagcaacagcaatggcacaattaattcttgagaaacctattaaaattcaatctaataccattgatttcataaaagcacaagttaggcgggatttggaattgaagtaaggatattgttagataactaaaatttaatacctcgtaaatatctatgaataagtaggtttgggaggttcagaacttcgttaacaaatggaatcttcattgtagctgtttttagcagttccctatgatatattaatagtgtttttatgtaaatgttaatggtgttaacaatcaatttcttagggaaatacatatcacttataatctattataaataaggtgggagactttagttagacagaattaagaatagcaagaagtttaatggcatttgtttttgattaatttaaataagagttttattatgaagagattaatttttgtaattcaattgatgattgtctgtaatggtttggctatggccgacccggttatttctcttaagacattgttgcatgagatgacagaccgctccgcgctggcgcgttggcccgaaaatacctatacgtgtaagcagttcagcagctacgaccgtagttcgcataacatgacggataagcgtgcctggtttggtaatttcgaccaaggacagtttatccgccaggaagagaacggagggaggacggaatatgtgatgatggatgccgaaggccccggtgccatagttcgtttctggatgactttctccggcataaatcggggacaagggactctgcgtatctacatagacaatgaggaaaaaccggtaattgaaggcaatgtacgtgatatattgagcggacaagtcctttgtggagaacctctttcaacttcagtacccgatgaggctccgatggaagaaagagggcataatttatatttgccaataccttatgccaagcggtgcaaggtgactatcgaatcgccggacttgaagattactccggaggggaaaattgagagtaagaccattgtatactatgctatcaattaccgcacttatacttctccggtcaaggtgatttctttctcggccaaagagttgaagaagaatgcccggctgatagctgctgtcaataagaagctgtcggaaggaacacctggtattgatactccgcttgcgggaagagaaagtacgctcaatctggcggcttctctggctccgggtgaaagccgtagttttacgattgacggctctcgtgccattcgtcgtctttcgatgcggattgatgccgatgaccgtcgccaagcacttcgctctacggtcttgtccattgcctttgatggggaactaactgtctgggctccggtcggtgagtttttcggggtaggctattatcccgttgcaactggtacgtggtatacgcgggccgtgcaggatgatgtgatgagtgcatggtgggtgatgcctttcgagcggaactgtacgattaccttgaccaattatggggaacagccggtggagatatccaaggctgctgcagttagtggaaagtggcagtgggatgagcgctccatgcactttggtaccacatggcagcagtttacgcatatccatgcccggggcgatgagtttgcccaggaccttacgtttgccgatcttaaaggtaggggcgtgtatgtgggagatgcggttactgtctataaccccaacttgggttggtggggagaaggagatgaaaaggtgtatgtggacggtgaaacctttccgtcacactttggaacgggtacagaagattattatggctatgcctgggggcgctatgaaccgtggataaaccatccttttgttgcccaacccataggagatggttgttatgctcacataggtttggcgcagaatacccgtgttcgtagtttggatgcgattccgtttacccggagcctgcgctttgacatggagttattcgattggtcgaatatacaccttaattatgctccgataaccttctggtatatgcttcccggaggcgaaatacagccaaaaccctttgtgagcgatgtacgcgaacgggttgccaaccaaccgtcagatattttcggttcagggatgagtctggttgtggagggcgaagtcatgcagcctcgtccggggcatatgggttccgttgaattgcagaccaacttccaccccttgtggagtgagggtatgcagctctactggaaagagtttaaaccgggagataagctgtcattagtttttgacagtgaagtggaaggaacttattatgcgaaaatacagttcactgtggcgcctgattatggtacatttgcccttcgtgtaaatgataaggtgattactccggaagtcagtctgaccaatggagaagtgtctctgcttttggtgaatcttgggcgggtcaatttgaaaaaaggaaagaatgagttgcagattgagtcgattgcactggctccgggacatgataccggtttctttgggattgataagttgactcttcgcaaataattctgtagacgtctctatcgcagggattgtacttgtatggatagctttggataaataaaagtccaaggctatcttttttgtatcagttctttttctatgataaaatgctatctttgtcctcaaaataataggtaagatgaaacttcgttcactctatatcctttctattgtagggctgctactggtaattgtggtgcagattggtggtatgatgtatgcttacgacaataccaagaaagaggcggaacgcgcactgaacgaatgttttcgtctggcttttatcgaaacggtggacaacgagattaataatttaccgtttcctgacatgactatccctttttactcgtatctatccaaagacagtatcaggtctttcgaagatgagatgtttttaaactatcagcaggcagcttcctttctcgaagatgtatatcatgtcgccattccattagatgtgatggcgaggttggtagagaagaaactgaaatggaaaaatatagaccggactgtaaatatccgtcctgcgacggacagaagcaagcgttcggtatatgtacggttcaagtctgttctttcggaaaaagcctggttgaatgagaagaaaggagaggccattgaagctgtcatgttttctccttttataccgcttgtcaaggatatagtctttttgttccttcctacgcttctcttggttgtttttctggtgtacagttgggccaggcaaatggattccatacttaaacaaggtaatgatattgagaagcagcggtctgctttttatgtgctggcagagaagatgaggttgccgataggtgaggtacgtagtcagatatcggagagccggtgggcagatatagaagcctcggggcaacatttgctggacatgacagaacatacgcttacgggagctaagcaaagcgaacggcagcggcaggtgcgcaagcaatattcttttaaagtcttttcgattgtcgggttgattgccggctgtctgctgatggtagtctggtttgtctatctgtaccgtgcttctttcaaagaaactgcctatcaggtaaatgattgttttgaagcagctttttatgacgaggtcttgaaacgccgcctttctttgctctacgaacagactgatagggatggaaaggatgaatgggaagagagtgttgaatcgccttttgcaaaggagcaaagggaatttctggagaaagagcagtcgaagtataaggtgaaccgctttggagtggtacatatgtacaatccggtcgatttgaattatcgactacgctctgctttgattatgcagcgcagcatcaatgaaagcggaatggaacttcctctctccgtgcagtacctcgattctgcttttgcttccaggttggaagccttgggaatgacctataagagtggtatccgccagtactacgctccctccgatagtacagtggtggaagcaggatatgcctcggcaaaatatcaggatatttcttcccggtttataccgttgaaggaggacagcatcctttgtatacaaggtgtggtgaagaatccgtatcgctacgtcataagttccgtatggtatctgtttctgcctctttgggtgatgtttttggtggtgttggactgtattctcggccaggtgaaagttttgcgtacacagcggcatttggagcaattccagaaggattttacttatgctatgatacacgacatgaagtctcctctgagttccatcctgatgggagctcatattctgaatagcggcaaattgtccggtaagcccggaaaagaagagaaataccggcaggcgatgatggaagagtgtgagcatctgcttaccctttccaatcgtgtactggtacttaccaagctggatgagggacatttggaactccatcaggaagaggtgcctttgcggcctttacttgatgatatgattgccaaaatttctctgaaaaccagcaaaagggtagaatttacgaccgtttatcatcgttgtgaaatggtgtatgccgatgccttctgtttgcgtgaagtgttgggcaatctgctggacaatgccattaaatattcccatgaagaggtaaagatagatattatttgcgaatcggagaaaggcttctgcaagataaaggtgtgtgacaacggattgggtattcccttaaaagaccagtctcttatcttcaaccgttttgaacgttctgcagcagtcgggcgaagtggaaggggcggtgctgcaggttttggtctgggcctgaattatgtacagcaggtgatgctggcacatggcggcagggtagaagtggaaagtgaagaggggtgcttcagtgaatttacactctactttcctattgagactgtataaatttaccacacgtggaaattcaatccttctgatttgtcagtaatataggagcctccaccgaatgagcgtaattgccagaggatgtaaaggtcatcgaaactcatgacagccagtaatattccaaatcgtgtgacatcataattgccacttgtcataccatatataaggggcaatatacccagtagcaggaagggcagcaggcatgtggtgcgatattgccacatgcgtatcggcgaaaacaatctgaacaacagtttatgtaggaatagatttaccaggacagctgccaatatacacatgaagaatctgaccagcgatagatggctggttgtttctccatgtatcgactgaaacagaatcagcattggtactgcaaatactatggcagctatgatgccgtatttattaatcctcttgcccgaaactactatctctgtcccttttcggctttttgttattgaaatatctgctttcatagtgtggattttttgtattgatgttgcaaaggtagagtggggcacatgcttcataagttatcgctacgttaatattaggttaagaggcgttgttttcctcgtttattttatagcaatatgactgttgcattcattcttttccttatttttgcaatatataataaacgcattatgataaagttattgttggtagaagacgatgcaagcttgagatatatagttcagggcgggttggaagatatgataggcggttatgaagtgattgctgccgccaatggcgaggagggcttgaaacagtggaaagaacaacatcctgatgtgatagtatctgatatagaaatgcccgttatgaacggttacgagatggtgaagcgtatccgcgagacagatggggaaactccgattctgttctcctctgccctgatatctcctaaagatgtggtaaaaggttatgaaatcggtgccaataactatataaagaaaccgttcattcccgaagaactggatgcacatgtccacgccttattgaagctttccaaaggcaaaaaatcgaaagacacgagtcaatgctacaagataggcaaggaatatgtgttggatgccacacatgccactttgaaacatgcttcgggtgtaaacaagactttgactgtgcgcgagacaggtttgttgcagatgctttgtgagaagcggggagacgttatccgccgggaagctatcttggataaattctggaatacggaagatgattactttgcttcccgcagcctggatgtatttgtgacgaaacttcggaaatttctttcggaagacgagtcggtaaccattaaaacagtgaaaggagtaggattgatactgatagaaaattaataatgtatccttctatattgcaataatttagcagtacatgtactgttcttctggtttattttcgttatttttgtatagcagtattatatgaatataaagaaggaaggtatatgcgtataaaacggaaagtcagtatctcttgtcttggtggccgtttgggaatctgcctgctgttggcttttgtgccgcaattgctttttgcgcaggaagacagtgtacgtttcattcgtgacagtatacagatacagccggaattcaatgaatctctattctctccttttgagcttccttctgaaaactctgccccttcttccatgtttcatccggagcactcctattccctgcccgatttttcactgaaagagtctcttcgtctgccttatcagaccaatccttccctgctatttcggggagattacagtacaagcggtgtattaagacagtttcctcacggtatgttattcggttccggtgggcagaccagcgtaccgggtatcggacgtttcaacaatgcttccctgggatatcagcatgcctttaaccaaaggctgacgctccagcttggcgtagatgccatgaagataaatatgattcattccaccgggcaggctttcagtacttcgggagctttgcggtatcaggcttcggaccgtgtagcttttaaggttttcggttcgtatgccataggaaatacttacgggatggatacccaccgctacggtgccaccatgtctctggatatgtccgaacgttttggtatggaagttggagtacaacgttattacgatgcttatcgcggtcgttgggagacggttcccgttgtgattccctattataatttcgacaagtttaaattaagtctggatgtaggtggaatcttgtatgagattctgcgtaacaccgtctttgataatagagggggcagtggcggagcgactattgccccaccacgttttcagatgccgccattgagataagataagtataaatcagctttttgtagggacaatcatcaaacagtttactactgttacataatattattgctaatgtagaaatactttcatgatatttcgtttattttttgttttgctgttcgtttttgtgcggacagttgtccgaaaatggacattactataaaatagttattctttgataatcagtgacttaattctttggtgcgcagattgactatatataggcgagggcggttacgaaacaacaacctcctcagagaaagaagtaataacaataaaaaataacgattatgaaagcaacagtattttcaaaagcagtggtaatgatggcagtggtaatggcaagtgtaatgaacttttctgcaagtgcggcaactcctgccgattatgtgaaaaacgaggagatgaccggcgaactgatgaccgccaagactatcttccgcaatgaggacggacaccttttccgtcacctccgctacacttacacttatgacagtgagaaccgtgtgacgagcaaggaagctttcaagtgggatagcgtaaaggaagcctgggtgccttatttcaagctggatgttgaatacactgacagtgaagttgagttgaactatgtccgttggaacagtagaactaatggttacgacagctatacgcaaactaccgtttacgaactgaatgacagcaatgcggctttgatgttggcaagtaccaaataaaggataatatatcaaatacaaaagagccaagtatcgtgaggtgacacacctttgatacttggctctttttcgttgaggaaatgtattattgtttctctgttatcagtccgacagcataattcagcactgtatcttcatccttcatgaaatctgctacggtttgggatacttgatgatggggcggtatgcctataccttccatggggaaacctttagaagagacgtccggctggcgggtaggaatacggaaataggtccgctgtttggtacagaaaggacgggggccattgccggtatcccctccggtagcttcgccgatgagggtgacatttccgctttccttcatgtcgagtgtgaagctttcggcagcagagagcgtataagtgtcggtcagcagatagattttacccttataggcgtcggcttcgggttgcatgatgtagctcttgctgacgcagtgtggttgtgtttcgcggatgaagtacttgcagatgtttactccattcatgctgtttcctccgccgtttctacgtacgtctataatgaggtatggtaaatccttgactttgggatagaccgccttgaaatcttccatgacggggttcatcatggttttgatggtaaggtaaccaatgctgtcttgtaatatcctgctctccacagtttgttcttcgttatccggaaaatagtccctttgtttcaagggaagggtgacggtcagagtatcgccccctctcagcagtgtatagtttcttagggtgtctgcataactacggaacgcatcataggctgtacggagccgtctgtgggggacggtagatgcttcggtatatttttcgttctgttcaatccattgtttataggggagtccgttgatagctataatccggtctttgtcctggaagccgtattctgtcagatagtcactgggtttgtcaacgaacaaggaatcctctataaaggctacgcgctgattggctgtgtacctcttgtagcaggtaatggcgtgggcgcattgtaaggcagagatgtattcctgcactatcagtccgtagtctgtggtggtctgcgcctggcgaacgcgggcgtcacaagcttgatacaatgaatccatattcagatgcttggcttggtataatgaataattctccatgacaatctggtgtatttctttgaaatcttcttcaaactgcgagggggttaacggtagttccgcgatgtagaagttttctacatcaatctgcttgtcattatagaaatagttggcataaacatacaaaccacaccaaatggttgccagtacagccattacgatgactattacttttgaaatttttttcagaatcttcatgttttatagagtttagtcgatatttgctttttcggcaaaaatagtaataatttttgttaatcttatttttctaactccttatttgccaataatggtaacatggaggtaactaactgagcttcaagtgcattcttgtacgatgtctggtagttggctaactttgcagccgtaaatcaaaacatactaaggagaagtgattatgaagaactatcaaaaagtaaatgtgcccgcaggcgaggcacgtgtcgagttgcacgattcattgaatctgactggtgcagaagtatctatcagcaatttgccggctggtgcaggagtaccttttgtgcattcgcacaagcaaaatgaagaaatttatgccgtcctctccggacgcggcaccatggtggttgacggagaaaccgtagaactgcaggcgggtgactggcttcgcgtggctccggcaggagaacgccaattgtcggctgcggcagacagcgccatcagtgtgatttgtattcaggtgaaagccggctctctggaaggctttacgatgacggacggtgtggtgaagtaagaggaagtcacacaagtaaaattaaggtgataggggatggtctgtggtgcaggctattccctattgtcatatgatgtgcagtgatttattgactgcgatttgttttaagtcaaaataatcatatattttgtactatacctaagaaaacagactatgtcaactgatgcaataaaacagaaattatgattaaattgaagaaagagcattgtttctgtcacataacgaggacccaatcaaagagcttaaaactaagaattgaaaacataatatcatgccccagcataatgccatcaagcttttcgaagcgaagaaagtccgaaccgtttgggacgacatagaagaaagatggtacttctcaatagtagatgtggtgacagtctgctgtatgcctatccagttacgtctccgatagattggaaaaggaaagatataagaggaaacgtgttttcattttgttcttgttttgggcgcaaaagtaataaatatctccgttaacctaacattaacgtaacgataacctaaaagctttttaccacctcctatctttgcaatgtcgaaagggaacaactcccccaaagacaagaacttgaaacaaaatgtataacttaaaaaatagaaccattatgaagactttagtaatttcagcaatcatcgcaatgacctctttagtaaacgtagtaagcgcagcagccgttaaccgtacagacaactttgcctataataccgaaaccaacgacggccgtgtggaaacacaaaccgtattcaaagtggagaatcagaaattcctgcaccgccacctgaagtacaattatatttacgacaactccggtcgcatctcccaaaaagaagtgctgaaatggaacgaatccacgcaaagctttgagaagcaccacagtcttaacttcttctatacggacgacgtcactgtggaatacgccctctggaacgagcaaagcaatgcctacaccgacatcaagcagaaagccgtctatcggcagaccgacagcagtgtcttgcgctacctcagttacgaatgggacgaaaagaacaatgactggagcttgacagcagaccatcacatgacggatgaatctgtgcagctattggcagagaaataagaacagatttgaataagctgattttctgtaattatataggcaatgcgttttttttgttttccggcaccagggaaggcagagttccccggtgtcggagagggtgttcctcggtgccggagaaatacccatttaaaaggcgtttggagtggcattacgcattgcaacattgaaacgctaaaattgtcaataagaaaaaggatgataccatgcttttcaaacattaatttttgatacttaccgactttttttaaccctatttcgactttttatttgtacttttgcaccggatttcttaatcaatagtgctcgaaattcggttctcatcttttttatattccctgatgaggccgtttgtagcgcattgtggcagatgttgtactgtccggactcttatggttcattattagtatttccgagggaatgaacagaggttaacggcttatagttaacggttagaggaaaaaataatgaacaacaatacatctatttttatttcatgaacaaacttatggtttattctgctctggctgtcgctctgatggccggagagccttgtcttgtgcctatatatgcacaagacaaggctgtgcaggcgatgacactcacggcactttacaatcttgctgaccaacagagtcagaaggtgagggtgagtgaggtggctttgcaggcagccagcgaaggggtggcagcagccaaatcggctttgctgccgagtgtggatttgagccttcaaggcagttatacgggcaatgccttcatgctgtcgcgaggtttttcgaccgatggaacgaccgattacatcgtgccgggtatgggagctattcccgtggcaaacggtaagcaggacaccccccattggggaaatagtttcacggctcaggtgtcgcaggttgtgtatgccggtggcgctatccgttcgggcatccgcatggcagaattgggcgaaaaaatggcagaactcgatgtggagaagaaccgccaggaggtgcgcttcttgttgacgggttactatcttgacctctacaagttaggcaatcagatagaagtggtgcgtcagaatatcgcacttacgcagaaggagattgaccaaatgaaagcccgccgtgagcagggtactgttttgcagaacgacatcactcgctatgaattccagttgcagagtcttgaactcacactgacaaagctcaccgatgtttctaccatcatcaaccatcaactggttacaacgcttcatttaccggagcagacggttatagttcccgataagaatgagctcaacacagaaatagacgcactctcggcaatcgctgttcaagacacatggcagcagacggcaacggacaacaatcttggtatccgccaggcaacggttgccacaaatctggcagagcagaaggtgaagcaggcaaaggcggagtcattgccttcggtggctgtcgtggcagagaatcatctctttggtccttatacacaagacctcatcccgaaggattgcaatgtaaacgtgtggtttgtcgggataggcgtaaagtttaatcttggcagtctttggaagaacaaacaccatatccgcaaggcacgtacagagtatcggcagtcgagggaagcgctcgccttggctcgtgagggtgtggagaatgctgtacaggcaaactacaccaacctccttacgtcctacaccgaggtgaagacacagcagaagcaggtggaacttgccaatcagaactactccgtggtgcagaaccgttatcagaacgaccttgcactccttaccgacatggtcgatgcctccaacatgaaactctccgccgaaatggcactggtcaatgcccgcatcagcatgctttataatttctatacactcaaatacgtaacaaatactttataataatggaaaagaacaagatacacatctatttatacaatgcgctcatcgtgctttgcctcttgggtggagccgtttatgtggtgagccagtttatgcatttcggcggtggagaatttaccgacaatgcccgtgtacgccagaacgtcgtgcctcagagcagccgtgtgcaaggcttcatccgtgaggtacggttcgcggatttccagcaagtaaagaaaggcgatacgcttgccatcatcgaggatgccgaatttcgcttgcgactggcccaagccgagaccgaccttatccgtgccgaacacggttcgcagggaacggcaagcagcatcgttaccaccaagacaagcatgaccgttaccgaagccggcatcgaatccgtacgtgtacagatggagaatgccatgcgtgaggatactcgtttcaagaagctcctcagtcaggatgctgttacccgacaacaatatgataaagtacatacgggctatctgagtgccaaggcagcctacgagcaggcggttcgttcacgtcagatgcagtcggctgttgtggccgaacaggggcatcacctttccgtttcggagcagggcatcgaactggctcgtcgtgccgtcgacctcgcccgtctcaacctctcctattgctacatcattgccacttgtaacggtaccgttggcacgaaggatattcacgtaggtcagcttgtcaatccgggccaggtactggtgagtattgttgacaatggtgaacgttgggttgaggcaaactacaaggaaagccagttgcctcacatcaaggtgggtggtaaagctgagattacagccgatgccgttcccggtatacaatatacgggtacggtggaacgtatctctgatgctaccggcagtgccttctcacttattcccatcgacaatgccacgggtaattttgtgaaggtcgaacagcgcgtcaccgtacgcatcaagctcgatgagaatgctgatgttgccaggctcaagggcggttataatgtggaatgtatcgttgaggagtaatgggacaattgactgaattctttatgaagagcgccggtggccctccacccggcatgggcttttccatgcctatgatgaagggatgggtacctcgccggatacagccgtggctgtacgtgctgaccgccttttgcttccagttcggcggtggcatctaccttggtgcactggatggcattcgtggcaccaccgacttcatgattgaggacgtgctctttctgctttatgccaccctcgcgggcatggctgtctattttcctatgcttttccgcatgaagttccgcttcaccaacaagcagttgctctgcggttctgccatcgttcttgccgtatgcaatgtgctgacgatgcattgccagtcgatgcctgtgctcatgatagtgtgcttcatagccggaatggctaagatacagggcacgttcgagtgcatgagcaacatccagctttggattaccccccgacgcgattttgccgttttcttccccgtgcttcacatcatcctgctcaccgccatcgagggtagcggatggcttgccgcctggttcggtcatcatttcacatggcagatgatgcacgtcttcaccatcggcactatgtcgttcgtattgctcatgcaggccatcttctgccgtccgttttgtcccatgccccagcgtctgtcgctcaaaggtatcgactttcagggagcattgctcatctgcggactgatgctcgtggtgtcgtacattgtagtgtacggcgactatttcatgtggttcgataccctccgcatacgccttctgttcggtgctgccattgtgctttccggcattgtgctctaccgcctgcgctactaccgttacccctacatcgagcttggtctttttacacgtcgcaacgttgtttccatcctcctcgtcaccttctttgccgaacttgctttcggtgctgaacacacgatggaagagatactctacagcgaagtcatccggctggaggagctgaccaaagagtcgcagtatatgtgggcacttcccggcatgtacctcggtatcctgctcgatctctattggctgaaagtcaagaagtggaaggtgtggaaactcttcggcattgccttcatcggtatcgcactctatggcatgctgatgtacttcacgcttgacataaacgtcaatatcgagcagtaccgttttgccatcttcttgcgaggatttgcgtatgccatccttgtcccgacattgatgtgggctttagacgaatcagtgccaagtcttgagcagttcttcatgggcttgttcgtgttcaacatcctccacatgtatctggcaggagcggcaggttatggcatttataccactatcttctcgcactttatgaacgacaacatgatgagctacggacagcaactcactctcacgcatttggatatggcgcacttcaacctcggcgaatacgttggccgcgacttcctgcactccatgatgatggtggcaatgaagcaggtctatggctatgttatctggttcgctttaggccttgccgccctcttcctgctgtgcgacattcctgctgtccgtacaaatatccgcaaagttccccgctggccggtttatgccatcgagtatcttgcgagaaggaagtaaaggcgccggcaaagcagaagatttcatcggcagtgatattacagctctgcgcatctgtttctgggtaaacagtgacatccgtatcacggcatccggcactacccgtaccgagggacttgcgctgaagggaggctttcttttctccaaaaatgaccggtattgattcgggacagacgggcatcatcgtcaatctggccggtagtgagcgtggagtggatgatggagaaggaggtggaggcattactgaaggagcgtctcagtacccgtggctttacgtttaccaacatacagtcgtccgtgaaacccaacgatgtgctgcaagctgccattgtctaccggtggaaatacgttaccattcttgaagttgcaatgacaagctcatgagaactcattggcaacttgattctttggggaaggtactgattgtgtacgcgggtactcacaaataaatcaagcggtaagccatctatctttttctttgctaagatttattcgtccgatacttgttgaattatcgtccgacagctgttgcagattcgtccgacaactgtcggacgataattcaacggctgtcggacgaataagttttagtaagcaagaatttaaaatgcagtattgcaggaattgttgcttaaatagggaatgtagtaaatgggagactggcaatatagactaccgattgggagctcgcaggcgaaggctgtcgggggtcattgaagctatgaggtcactgttgaaaaggagaacactttctttgccggcacggcttcctgtattttttacgtccacagtgaagataagctcgtcatcggctgtgaagtctgccttgtttactttcagattgctatagctgaagcaggtatagcttagtccgtatccaaaagcccattgcacggatacaaccgcgtcatagtcgtaggccccttccattttttccacttcctcgctcaccttgtagttgtagttgatgagtgagttgatttctttcggataggtgaagggcagctttccactgaagttttcatcaccgctgagcaggttggcaagggtgtctcctccgtagtttcccggcagaatgatgtctactacggcctttgccatcggctctatttcattgatgaggcggggacggccttcattcagtataaggatgacgggttttcccgtagcagacagtgcttttactaaatcgagctgattgcgcgagagggtcaggtcagtcaggttgccgggagtttcacaataagaattttcaccgatgcaggcgatgatgtaatcgacttctgtggctgctttcacggctttttcgatttccggcttgttttcggcccaataagcccctttttcattgtaggtgacgccgggtggcgtcattaatgcggcttatgggtacttcgccttcgtgtacaagttctttcagcagtgtacagaaatcccattcataaggttccatggccatgtcgatacctgcgttgatggcgattttgatggcttctttcttgtcggctgccactttttcgcggcgccagaggttgttgatgtcagcccagtccgtgacaagtactccatcccagttcagttcttctttcagccattaggtcaagagtttgtaattggcgtgtacgggcaatccgttgacttgccatgacggataatgctcctgcttttacacaagccaggaaaggagcaaagtgtttctcacgaaggtcttgagccgagatgtataccggtgtacggtcttttccggtgaaggggacgctgtagcccatataatgctttagcgatacggcaatattttgtttgccgatatggttcgggtcttctccttggaagccgagtacggcagcccgccccatttctgcattgacgtagcagtcttcgccataattctcccatatgcgtggccagcggggatcgcgtcccaggtcgatggtgggagaataagtccacgggcagctgccggctttggtttcataggcagtaatacgtgcggcttcacgggccaggttgcggttgaaggaagcagccacattgatgttttgaggaaagagcgttccacccattgtgtaggttgtcccgtgattttggtccagtccatagatgcagggtatgccaatttctctcatggcctattttctcttcaagggtcatttttttcagtagggcttccactttctgctctatttttttgtcttgtggaatggctggggcagttgcttgctgcgccgttgttggcaggagaaacatgcttgccaacaagaaagattttattctattcatggtagtgtgtatttgggttcaacaatcatttggatgttttggtattcttcttcatcaaccagtgttgtttcagccactcgcgtaccggttcgtcatacagtttgaggcaagcgtatgcaatggcaatggagagtacaaagacggatacggcaatgaacaagtgcattcctgccggtgcgtcggggttattccgtgcccaggctatctgcatgtatatcagcgggaagtgtgtgatgtacagcggataggatagttcgcccaggaatttgcagagggctacggaacgcttgcccgtgacgttgctgcctgctcccatagccactatcagcggaaagagggcgagcacgcttacggcttcgtagacgccgttcatccattggctggtctcgcctccgatgcgcggcatcacgaggataacagtcaccagcagggaacaccagtagaatcctctcttcaccttcaccagcttgcctatgcgagacaacagaagacccatgaagaagggatagagcaggcgtgaaatgcctatatagagctggccgggtgtcaggctccagccgccgatgagggtgtaggcggcttctccccgcgatgaaagaagcccaaaggtatctatgttgagcgtgacgtcgagcgtaaggcaggcagagagtccgacgaatatgcccagtgccagtttggagaagcggcggatgaatagggcatagagcacattggcaatatattcccacatcagcgaccaggtggggccgttcaacgcgtttgtttcccaccagccccggatgtcccatgaagtgggggtggggaacataaggcagcccaggagtgtcatcagcagcacgttccaccacggtgtctgcatcaccatcgggaaggcggagcaggcactgaagtagaatagggaggcgccgaggagtgtacccataatcaccatggggtgcaggcgtaccaagcgtcgcttgaagaagtcccacgttgtcatacggtcccagcggtcgtcgtaggcataaccgatgacgaagccggagagtacgaagaagaagtccacggccaagtagccgtggttcaaaatctggtgggcaggccctgcggaataggtttcaaaaagatggaaagctaccacgattattgcggctacgccgcgaagcccgtccagtatttcgtaacgcggcttggatgctaaataagttgttgtcttcattggaattatgtttgttgttagattaatattcttctaaaatgcggacgtgtcatgaccaccacagattacacagattattttaggagctctgataatcaagaacttttatcggtgttaatctgtgtaatctgtggtgagtgtgtattttgacatatcctcagacaatccggattcccggcataactttatttcgcgggcaaagttagtctgcaatttctccgggcatttctcttattgtttattaggattgtcttatatttgcatttactccccttcagggagatattttacccaaattatgaatgataatgcagtgcctcggccggaaaacacttcttttaccttcgacgatgtatgcctggctcccggcgagcagataggtctgcatgagcaggcaacgtgggagttgtcgtatatcatcgtaggctccggcatgcggctgataggtgaccgtactgaacctttcgggagtggggaagtagtgatagttcctccggagataccgcattgctggtatttcgagaatgatgtgacagatgcgcaggggcgtattgccaatatcacgataactttcggccgggaatttcttgacaactgctgtgttgctttccctgagctgctggaatgtacggagaagctgaaacggaaaagggatgccgtgaagttcgggaaggaaaagtcggcggctattgcttccgtcctcgaggagatgcgtcctttggggagggctgaacgcatcccgctgatgataaaactgctgcttattcttgccgggagcaaggaagagagtgtggtggggcggtatcagaagatggacccggaacgggagcgaatgaataggatacaagtctacgtcgtttgtaacgccaagcgggatattacgctggatgacgttgcccgccacgtggggatgaaccgcacttctttctgtatctttttcaagaaagtctcggggaagactttcgtcacttatctcaatgaataccgcattgagcttgcctgccggctgctgaaacaacaaaaggtatccgtagcagaaatctgctatcaggtgggattcaacaatgttccttatttcaaccgggttttcaagaagatgaagggcgtttcgccgagtgaatatgtctttttgtaagggaaaaggggaagatacgaaaggtgtgggcataaaaaaaggagtaccgctgtactccaacctttgttaaccttaaatctaatactatgaaaaacacattgcaaaggtacggactttttgcttatctccaaataaagcaaataaaaaaggctgttttataacatgttttaggaaaatacgtctctttgttaaggcttgctaaggttttgaagcctctacgcagctgttttctaaaaaagaattatctttgtcacattaagttttgggccttacttgacgattttctgctctcttggctcaaaatcctggaaattaaaaattaaagacttgtatgcacgaagatattgtccttaccccgatgatgaaacagttcctcgacttgaaggcaaagcatcccgatgctgtcatgctgtttcgttgtggtgacttctatgaaacctattccaccgatgccgtcgtcgcgtccgaaatcctcggtattaccttgaccaaacgtgccaacggcaaggggaaaaccatcgaaatggcgggctttccgcatcatgcactcgacacctatctgcccaagctgatacgtgccggcaagcgcgtggccatctgcgaccagttggaggacccgaagttgacaaagaaactcgtaaagcggggcatcacggagctggtgacgccgggagtctccatcaacgacaatgtgctgaactaccgggagaacaactttctggctgccgtacacttcggcaagggtgcctgcggtgtggctttcctggacatatctacgggcgaatttctgacggcggaaggccctttcgactatgtggacaagttgctgaacaactttgcccccaaagaggtgcttttcgagcgtggcaagcggttgatgttcgaagggaacttcggcagcaagttcttcactttcgagctggacgactgggtgtttaccgagacttccgcccgcgagaagctgctgaagcatttcgaggtgaagaacctgaaaggtttcggtgtggagcatctcaagaacggtatcatcgcttcgggagctatcctgcaatacctcatcatgacgcagcatacgcagatagggcatgtcacttcgctggcacgcatcgaggaggataagtacgtccgtctggataagttcacagtgcgcagcctggagctgatggggtcgatgaacgacggcggtagcagtctgctgaatgtgatagacaagaccatcagcccgatgggtgcccgcctgctgaaacgctggctggtattcccgttgaaggacgtgcagccgattaacgaacggctgaatgtagtggaatacttcttccgccagcccgatttcaaggagttgatagaggagcaactgcatttgataggtgacttggagcgcatcatctccaaagtggcggtaggccgtgtctctccgcgtgaggtagtggcgctgaaggtggctttgcaggcgatagaacccatcaaagcggcttgcatggatgccgataatgccagcttgaatcatataggcgagcagttgaacatctgccagtccatccgcgaccgcatagaccgggagatagacaatgacccgccgttgctgattaataagggcggtgtcatcaagtccggtgttagtgccgagttggacgagttgcgccagatagcctactccggtaaggattatctgttgcagatacagcagcgcgagagtgagctgacggagattcccagcttgaagataggctacaacaatgtcttcggttattacatcgaagtgcgcaacacgcataaggacaaagtgccggcagagtggatacgcaagcagacccttgccaatgccgaacgctacattacccaggaattgaaggagtacgaggagaagattctcggtgcggaggacaagatactggtactggaaacacaactctatgcagaattggtgcaatcattgagcgagttcatccccgccattcaaatcaatgcgaaccagatagcgcgtctggactgcctgctctcctttgccacggcagcgcgcgagaacaactatatacgccccgtcattgccgacgacgatgtgctggaaatctgccagggacgccacccggtgattgagaagcagctccccatcggcgagaagtatattgccaatgatgtgatgctggatagccagacgcagcagattatcatcattacgggtcccaacatggcgggtaagtctgctttgctgaggcagacggcgctgattacgctgctggctcaaatcggcagttttgtgcctgcggagagtgcccatatcgggttggtggataagatattcacccgtgtgggtgccagcgataatatttccgtgggcgagtctacctttatggtggagatgaacgaggcggcggatatcctgaacaacctttctccccgcagcctggtgctgttcgacgagctggggcgcggtacttctacatatgatggtatttccatcgcctgggcgattgtggagcatatacacgagcatcccaaggcaaaagcccgaaccttgtttgccacgcactaccatgagctgaatgagatggagaagagcttcaagcgtataaagaactacaacgtttcggtgaaggagatagataacaaagtcatcttcttgcgcaaattggagcgcggcggtagcgaacactctttcggtattcatgtagccaaaatggcaggtatgcccaaaagcatcgtgaagcgtgccaacgacatactgagacaattggaaacggacaatcgccagcagggaatctccaacaagccgatggcagaagtaggagagacgcgcggcggcatgcagctcagcttctttcagctcgacgacccggtgctgtgccagatacgcgatgagatactgaatctggatgtgaataacctgacaccgctggaggcactgaacaagctgaatgatataaagaggatagtgaaagggaaataaccggataggggtgtgtcaaaattcaccacagattacacggattaacacagaatgagcttaatctactgataatcaaagatgcttatctgtgtaatcggtggtgaataccagttttgacacatcctcattcggattgtttcaaaacacggctggtttcttatagtttgacttttccctccaaccgtatatcttccgatgaagcccctatcagcagcttcaccgttccgggttctacaacgaacatctgctttccttcgttccaatagccgagctcctctttgggcacggtaagcgtcactttccgggtttcgccggccttgatggggatacgcttgaaggcgcgcaactgcttggaaggacgttccactttggagtccggatagctggcatagagctgtacgacttcttctccgtcgcgtccgctggtattcttcactgataccgtcacgcggatgttcttcttgtcttgcttgacggattcaatcttctcgtacgtaaagtcggaatagctcagaccatagccgaaaggatagagcacagggccctggtggtacatatacgtacgtccgttgcggatgtcgtagtccatcatgtcgggcaggtcggtgatgtctttcacccacgtctgtacggtacgtccggctggattcaccttgccaaagagtacgtcggccagtccgttgccctgctcctggctgcagtgggtgatgtggacgatggcaggcacgtgctcctggctccagttgatggtgtaggggaaactgctgacgagcaccagtatggtattgggattggctttgagcaccagcttcaccaagtcttcatcgggcagcatcagcgatttgcggtccacggcttcgcggccgtcactggggacgggagagaacttccagtccgcacgtgtgccgtaaggatggtttcctacacatacaatggcgatgtcggcggctgcggcagccttttccgcctggcccatgcggttgtcttcggcgtggatgatttcggttccttctttcacagcattgcgtatgccactcagaatcgttgtttcgtaaggcggggtaccactataccaatcttgcacgattttgtccgaatacgggcctataacggctattttacgcagctttccggcatcgagtggcaggagttttttgtttttcaataacaccacggacttggcggtgacttcccgtgccagcctgcgggcttctgctgtcatgaaaggcggtgtctccgtactgttctttccgatagagagataagggttacgggagttgtccccgtccagcaagccgagcttgagggcgacgaagatgttcccgcggatagccttgtcgatgtcgacttcggtcagtaatcccttttccagagcttccttgacgtaaggaacgtatgcgtcgagaaattgtcctgtggtggcttttactacggcagcggcaccctccgcaaagctcggaaaactcttgtgcgcttcaatcagcagtttcagggcaccgccgtccgtacagatgataccgttgttgccccactgcttgcgggtaatctcttcgaggcagggatggatggacatggggatgccgttccaactgttgtaggcggccatgaaggcacggctgcctccctcagtgatacctttatagaaaggataagcgtagtattcatggaacagccgcgtgtcgaagtcggaggaagtgctgtcccgtccgtcctcgttactattagcaaggaagtgtttcatcagagaggcagttttccagtagcggggatgattgccttgcaggccgcgtacgctggcaatggtgagttgggcggtgaggaaagcatcttctccgaaactctcctcggtacgtccccagcgcgggtcgcgggcaaggtcggcattcggagcgcgcatcacgagggcatgacgcttgttgccggtggtctgcatgtagtagcgggcttcttcagcggcttgttccgctactttctgcaccaaatcggtgtcccatgtggagcccagaccgtaggattgggggaatatggtggtggggcagtctgtggggactactttcccgtcttccgttctttggcgtccgccccacatggcaggcccgccgagggtcagcccgtgcagtccttcgtagtgtccgcaacggggaatgttgaggcgggggacaccgaggtcggtggaaagaaggtttatcttttcatccaatgtcaggatggaaagaagatggtccacgcgctgttcgtcggtgagcgtggtatcttggaaggcttgtgtttgttgtgcgcttgtctgcaggcaaagcagcagagagaaaatgaggagtagtgacttgtttctcatggttcattagggtttaatggattcaatgtagtgggttgtcatagcaaacattcttggttgttatctcaatctataccttttgtctgcacgagatgtgcatctcatgatgtacgagatgtatatttcatgcaacttgagatgcgcatctcgtacatgaaaggataggggattatgggatggacattcgttgcaaccgtccgtcctgcggcaggcagagcaacccttcggctttcttttcgtctgccagatacttcttccacgtaatcttgtcccacttcatctggtctgtgcattgtgccacggggatatgggggatggccgaaccgtcctttacaagaatgatgatgggcagggtgccgcactcgatatggttccatcccggagcatacacctttccggtctggtagtctatccatttctgccgtccggggaggtagacatcccgtccgctgccctcttcgagcatgggggccacgaggagattggagccgaacatgtactcgtcctctaccagccatgcacccgggtcgtcgggatactccagcagcagggcgcggagcatcggccagccgttctcggtgcactctttggattgtgcgtatacatagggcatcagtttgtacttcagctcggcgcaacggcggaaatagtctgtgaactctttcccgtagtaccacggctcagtgggaggtgctccgtgcacgcggctgtggctggtgaggaagccgaagggcagccagcggcggtagaggctttcggggctttgggtcacgaagccgcctatgtcattgctccagaagcagaacccgctcaatccgatggagagaccgctgcggacggttccctcgaaaccggtttcggtggtggcggcatcaccgccccagtgcagcggatagcgttgtgagcctgcccatgcagagcgtgcccagatgatgttttcgccgtgcagcttcttgatgatgtcggccacggttttgttgtagcgcagcgggtagaggttgtgttcgtacagtccgctacggccgttggcatagatggcatccagcggggcaccttcgccgaagtctactttgatggcgcttacacccatttcaatcagattgccgagtttttcctgataccacttcacggtttcggggttggtgaagtccagcaccacgtcctcgtaggggagctgccccttaccgttgcgtacgtacagaccgcgttccaccagctcggggaagaacttgtttttcggagtgaagtaggggagttgccagaggcaggtgcggaagccttgtgaccttaggtcggtgagcatctgccggggattgtcgaagcggtcggcggcaaaggcgtagtcgcactgccagtccacgccgaaccaaccggtatcgaagtggatgacgtcgctcggtatcttgttctcacgcagtttccgggctacatcgcggccctctgcttcgctgaagtaggtgatgcggctcatccaggtgccgaagctccacaaagggggcatttcgggccgtcctaccagtgcggtgtattcgctcagcatctccttcggcgaacccaggaagatgaagatgtccatcgcttcgtctgccataaagagtttggtggctccgatgtaggagcagccgaagtcgcaggtcacgggggcggaagtgtgcataaacatgccatagccgcggttactgaaaaagaaggggataggcttgtacatgtccggggtttcggggccctgcgggtcggtgacaaagaggttgaccttctgcccggccttgttcagtgcggtggcggactcgccgcaaccgtagattttctcgtttggcgcgaggctgaatacgggattgatgctgcgtgagttgtccgagccgcgcttgatgaagctgaatggaggtaccttgacctgtgtggagtcgttgtcgctccagcaacgagtctgtgtcagcaggcgtccgtcggcatctttcagcaccaggcgccaggggtaattctcgatgagcaggctgccgtatcgggaggtgtacagggtacctttatccgtcttctcggctttccagaaggagcgtccgtcggcaggctttcctatgagcatggggtcatcggcatcttctttcggtacgatgggcgaggtaagcatatggatgcggagggtacgttcgctgaccggttcgacggtgaacgtcagttgtggattgttgtcgtaggccgtctccgggaagtccagcgactggaggggctggtgcaggtaggtgtttgcattgaatgcctggcggggcatcagttgctggcgtttccactggacagtccccttgccggtggaggtgtcgaacgataccaggctgtcggcaaagaaataggtgttgctgaggtccagaaaatcctggctcatgtctttcgactgggaaagcaggtattgcacgccggcatttgttttcagttgggcatgtgcgggcgggatggcagttgctgctagcagcataaaagctgcccctttcatcagttgtttctctttcatgataaatatatgatttacggttactgtttcgatgccgtaaaagtagagaaatccacacagatgaaaggggtgggtatgttgcttatgtagggctgaaatgtttatttggaagctttcttcccgtagaaacacatgaaatataccccgataatcacaaacgggatactgagccactggcccatgttcagcgtcatgctgtcctcaaagttcacctggttttctttcaggaactcgatgaagaaacggaaggtgaaaatctccgtcaggcagagtccgaagaagaaaccgcggtgatagggcagggaggcttcggcctgcacggtggttgatttccgcttggtggtgctgaaatctgtttcgagcttggtctcttgtttcttctgtccgcgtttgtatagccagaccatccccaggaagaagatgaagtaggcgatggcttcgtagagctgtgccggatggcggggcagcatgtcttcgcgctcgaagatgaatgcccagggcacgtcggtcggtttgccgatgatttcggagttcatcaggttggcaaggcggatgcagcaggcggtgatgggagtggcaacggctatcatgtcgagcacgtccatgtagtgcatcttcgtcttgcggcagtacatccagagggcgataatcaggcccagcgtgccgccgtggctggcaaggccggtgtaacccgtcattttccatcctgcggcggtctgcttgatggggagaatcatttcaacgaagtggtcttggtagtatgcccagtcgtaaaatatgcagtggcccagtcgtgcgcctatcagtatgccgaagaagcaatagaagaaaagaggttcgaatttcttttcgtctattttgcggtcgcggtactggtgttgcacgataaggtaggcaaaagcgaggccgataatccataacaaaccgtagtagcggatggatatgccgaagaagttgaatagttcggggtcggggttccagttgatggtgagtagtgataacatatttatgaagaattaaattactgaattacggggttgttcgggacaaaggtatgaaattatctcgtttggcagttcatcgtggcagtttatttgaatttctccgccaccatcctatacgtcggcacctcaatcccttgttcctctgcagccgtaatcatgtcgaacaacaagccttgtacttcgctctgatgtcctttggccatatctttctgcatggaggcggtactttcaggggcgagtttgtctattactttgaggttatactgcacgatgtcttccttgaattctatacccaacttcctgcccaaagctgcactctcttgtgacagtccgataaaggtgtcgcgcactttgcccggtttctggacttcgcccataggtacgtcgtaataggctccggtgacggccatagcagaaatgaaggaccacttgacgaatgtgtcccggttgatgtcgtcggagatttcggctttgatgccgctttcctgcaaatcgcgttgcacggcttccaatgtttcacgggaaacaatcgtgctgcggtgtgctccgtagacgagccggaaaatctttcccatctgcgtgatttctccccgtccggatacgaatcctacgatgtagatgcagccgtcgagcaccgtgacgccggggaccaaccgctggatacggggaccggttccgtaaacattcaggatggggattaccactgtacgctcgtgtgaggcacgtttgatgagttccgtaatggagtctacggaataacctttgacgcagacgaagataacatccgctttgccttggaattcttctgcggtaaatgccgccactttcagacaatgttcacctttcaaatcggagtgcagttgcagaccgttcccgcgtatggcggcaaggtgttcgccacgtgcaatgcaagtgacgtctttgccggataatgaaagaaaggcggcaatgcttccgcctacgccgccggtacctgctatgaggtatttcagattactgtttgccatttgttgtgtatggtttattgaacgtagttttccttttccatatagtaaagcccttcgccccggtcaccgttttccatgtcttccagctctactttgaagatacggtagggaaggtcttttttgggatgcttgggcatgtctactgtcaatagataggcgttgccatattcgttgctgtcgaaatattcttttatttcctgcttcatcagcacggggactttctcgccgtctatccagacggtgactttcagttgcccggggcggggagccatctggcattctctggcttctttgttttgttcttgttgctcaatgtcactcaggttttcaccgtgtaccaatgactcgggctttgtttctttcatccattggtaggtacgtgtcaagctcatgggacggacgtatatctgataagtaggcatggctccggggatgcagaaagcacgcaggccataagcttccatacgatgataacgtatgtcgagtgtagtgtcgcggtcggcgatgaaatcccaggcccagaactccaggcggtgttcagtctcgggcagcccgcttttcatggcaatgtgcgcataggagggcagataaatagaggctgcactttgatatttccctttgggtatacgggccgtgtaatgcccgtctttgtcggttatggcttctatgatgtcattgaactgcgggttttgccaccagacgctggcactgtctatcggctgtccgttgtaatcagtcacccgtccgtgaatggttaccgagtcttgctgttgtgcataaacggcagtacaggacaataagaataaaaggaagataatctgtttcacagtattgttattgtatggagtttattagaaaatggcaatgtactttctttgtacattgccatctggaatgaatatcattacacattgaacctgaagtgcatgatgtccccatcctgcaccacatactccttgccttccacacccaactttccggcttcgcgcacggctgcttcgctgccatacttgatataatcctcatacttgatgacctctgcccggatgaatcccttttcaaaatccgtatggataacgccggcgcattgtggagccttccagcccttgcgataggtccatgcttttacttccatctctccggcagtgatgaaggtttcgaggttcagcaggctgtagatagctttaatcaaacggttgcagccgctttctttcagtcccaggtcttcgaggaacatctgcttttcttcgtatgtctccagttcggcgatgtcggcctcggtctgggcggagatgatgatgagttccgcatcctcacccttgatggcttcacgcacctgctctacgtactggttgccgctggcggcactgacgtcatccacgttgcagacgtagagcacgggtttggtggtgagcaggaacatctgcttggcacattgttcctcgtcgtcgttctgtgggatgacggtgcgggcgctttgtccttgttccagggcatccttgtagcggagcaggagttcgtactctatctttgccgccttgtcgccacccactttggcaatcttctctacacgcttgatgcggttttccaccgtgtcgaggtccttcagttgcagctctgtgtcgatgatttccttgtcgcgcacggggttcaccgaaccgtccacgtggacgatgttgccgttgtcgaagcagcgcagcacgtgaatgatggcgtcgcactcgcggatgttgcccaagaactggttgccgagtccttcacctttgctggcgcccttcaccagtccggcaatgtctacgatgtcgcacacggcaggtacgatacgccccgggtgaaccagctcggcgagcttcgtcagtcgttcgtcgggtacggacacttgtcccatttgggcgtcgattgtacagaacgggaagtttgccgcttgtgcctttgcgctgctcaagcagttgaaaagagtggattttcctacgttgggaaggcccacgataccagcttttaatgccatagtgttatcttgtttttttagttattgttcagttaattggatgcaaagatagtgcaaaccgaatgcagaataaaatgaactcgttcattttttatgctgaggtgcagcctatcttcgctttttttagcaaagatagtgcaaaccggacaaacttactgaaaaatagctgatttttgcatacaccaacgaagaaaggaggagatgggagagccgccggaacggtatttagaaattcgtattgaacgtgttaatttgcattaaaagcatgacgatgaaacgataaattgatagttttgtcgcaattataatttaagtatcattctataaatcaatgcgattatgaaaaacaaagtaagaaaaattctgatgattttatcatgtctcatcagcttgtcttttacattatctgcacagaatccttatctgccgctttgggaatttattcctgatggtgagccctatgtgtttgaggatcctgactgtcccggcaagtaccgtgtctatatttatggttcgcacgacaatctcaagtggatgtattgcggacgtgaccaagtggtgtggtcggcacccatagaggacctgacccgttggagatatgacggcgtgatatttaaagtcaatgagtcgcccgagctatataaactgaatgctgatggaaccgacgacgtgctttttgcccctgacgtgacagtaactaccgatgccgatggtaagaaaacttattacctctttccgaataatcaaggtagtggacgcaattccatgattgccaaaagcgaccgtcccgatggtccgtttacagtatgcaattggaacaaggaacgtcctcgtgagactttcggctgtttgggattcgaccccgcagtgtttgttgatgatgatggacgcgtgtatggttattggggatttggcatttcgcatggcgcggagttggaccctgctaccatgtgcacggtaaagcccggtaccgaagtggtggagaatatgatttcaggctatcggcaggaaggtatattccgcttctttgaggcatcttctatccgcaagattgaggataaatatgtgtttatctatagccgtactaccgctgagggtgaagatggcctgcccaacgccagcaactatacgttggcttatgcctacagcgagcatcccttgggcccgtggacctatggtgggacaatcatcgatgcgcgggcgcgcgaatatgatgaaaaaggcaatgtgatagcttcggccatgcccggtggaaatacgcatggcagtatctgcaagataggtgagcaatggtacgtgttctatcatcgccagataggtaccgattgctatgcacgccaagctatggtgtcggccattgatgtaaaggtggaaaaaggaaaaggcgggaaagtcgtgatttcacgcggagagttcaactctgaaggcttccttcttgaagggctcaatcctatgcagcgcatctctgccgggctggcttgttggcacaccaatcccggaggaatcaaagaggtctatccccattatgtgtatacggggtcttatatccggcctgtgtaccgggataataatccctatgccggcgataacaaccacaaaatcccgttcgctccggtggtgaataacacaagtgggtcgattgtaggatataaatacttgaatatgaatgccgttccgcgagataagtctttgcagatgcagttaaggttgaaggctgaagataccgacgggcgcatccgcatcatgctgggtagcccttggacaacaaaaggcggtgtagagataggacttgtgaatgtgaaggctggcagcacttgcagggagttctatgcttcgctctctattccggcaaagctgcataagggaaagcagccgctcttctttgtcttcgaatcagagaccgaaggccagtccatctgtgagttttatgatttcctcatgttggcacgcccataagtctttatacttatggaggcggatacttgtcttgtgaggccttctaaatagagctattgtattagttcacagcactgaacactttgttacatcccgtcggaacagattgtttctcttgtgtgaaacgacttgtttcgacgggataaaacgatttgttccgttataggaaacactttgtttccttatagagaacactctgttccattataggaaacaaaccgtttccatagtcggaaatgaaatggggcatatgcttcattgataccgctattacttttcctcctcgaatattcggttgaaaacttgccgcagctgtccttcgtctgcgataatggcttggagcttcttcagctgttccgcattcttgccctcgggaaaccagagcttcagataaccgccgggtgcatattttgccatgagatgctgatggaaccgctggtagtgccactccttgtcggcggcaggattctgtttcaatccgtactgcacggtgcggcgcagggtgatgtccgggtcgatgatacggtccgcttcggcaacaatcttgccgtagatgctacgaggttcgtggtctgtagaggcccggtggtcctctacggcttctttcatgaggaggatttccgtgtcggagaaccattgccgcagggtggagtccgccatcagtatctcgccggagacaaggtggtgggtggcgcggtcgcggcacagtcccgtgtcatggtaggcggcaatgacgtatgccaggcgttcgtccgcttcgggatattgccgggcgagggcaaggctttcttcgatgacggtgcggacgtgtgagaggttgtgtgccttgtcaaactccttgtaacgggggatgattgctgtctcgatgtaggtaatgaggggcttgggtatcatgtggcattcctttttaggaggcgaagatataataaaagagccggaatgtgcgaatcattccggctcttttatgaaaggtttcggttattgttgttaggaataagatttcttactttaagagagagtttgtcaattacatgttagggttgtccatgattactgtcatctcgggaaccagtatgtattcgcttttcttgttgttccatttatagtacgtggtagtcatcgtcttgccttggtatgcatagcggatgcacatgtccttgccccatgtattcttggtgctgttccatttcagggcttcgctttccgtcatgcggttctggtcgtcgtacttataattgtacttcatatagttggcaagcgtgtttccgtccatcttgtatacggtctctgccaccttcatgccgtttacttcttccgaattgtaaatgaggttgctcttattgtcggctgaggcatttaatccgcaaactaagagaagtgctgaaacaatcactgtttttaaagatacttttgctttcatggttttatgtcttttttagtttaactttctattttctatcaatatgtcattgatttcgctgcaaaggtacgtattaaattgacataaatataaatatcagattaaattttatcaatatgtcagtagtgagggtttcggtatgctttccttttggcaagattggtgaataaaaaatatccggcagcgaggttgccggatattctgatgagcaaactgtatttggaaaggattgcttctgttgctttctgattgtaagttaaataaagttattgggctgtttagtgtgcctgcaaccagttgtttccccacccacaatcggctttcaggggtacgtgcatgcgatatgcctgctccatctcttcgattacgattttctgtacaagctctttttctgcctctggaacgctgaaatttagttcgtcatggacctgtaaaatcatctttgctttcagattgtaagcttggaagcgctgatagatgtgtgccatggctacttttatgatgtcggcggcacttccctggatgggagcgttgatggcattccgttcggcatagccccgtaccaccccgtttcttgagttgatgtccggcaggaagcgcttgcggtggaagatggtttccacatagccgttctcgcgtgccacctggatgcttttgtccatatactccttcacttgtgggtaggtttcaaagtagccgtctatcagctctttggcttcctggcgagaaacgcccatgcgttcggcaagcccgaagacggagatgccgtagatgatgccgaagtttgccgtttttgccttgcggcgcatgtcggcggttacgtcgtttatatctattttatatatcttggcagcggtggcggcgtggatgtcgtgtccgctgaggaaggcgtctatcatgttcttatcttcgctgaggtgtgccatgatgcgcagctctatctgcgagtagtcggcagagaagaactcgcagccggtgtcggggatgaacgccttgcggatttcctttccgtcttcgtcgcggatggggatgttctgcaggttgggattgctggagctgaggcgtccggtagcggttaccgcctggttgaaggaggtgtgtatgcggcccgtacgtgggttgatgagctggggcagggcatctatataggtgctcagcagtttcttcagtccgcggtattccagtatcttcccgatgatgtcgtgcttgctgcggtagctttgcagcacctcttcggaggtgacgtattgtccggtcttggtctttttcgctttctccacgattttcagcttgtcgaagagcacttcgcctacctgcttggcggagctgatattgaatgtctcgccagccatctcgtagatttccttctcaatctcctgcagacggacggtgaagtgttgggacgattgcttcaaggcttccgtgtcgagcagcactccgttgctctctatattgacaagtacggggacgagcggcatctctatttcgtagaacagatgttcggcaccttgcttcttcagttccttttccagcacgtttttcagtttgagggtgacgtccgcatcctcgcaggcataacggtagacatcttcgggtgaaaggtcgcgcatgttcttttggtttttgccccgcgctccaattagctcatcgatgtggatggtctggtagtgcaggtagatttccgccagatagtccatgttgtgtcgcagttcgggttgaagcacgtagtgggcaagcatggtgtcgaaaagtttgcccttcacctggacgccgtaattttggaggataatcatatcgtacttgatattttgtcccaccttcatggatttctcgttttcgaagagggagcggaattcgtttacaatttttaagacttcctctcgttcggcgggaacgggtacgtagtatgcacggttttcggcatcactgaagctcattcctacaagttcggcgtccattggctcggttccggtagtctcggtatctattgagagaatttcgcttgtaagtaacttttgaataatttctgctcttttatcttctgtatcaatgagttggtagtctatatcgagcatttctaaccgcgtcaggtttgaattttcagaaacgcccgtcccctcgcccgcaaaatttgcaaacaaatcgccttgaatcggggcgctgttttcgggagtggaggtttgcggctgggcaaacagagtcccggcaaagaggtcgggtaccggagaggttggagtaggggaggacgaattgccgcttccctttttgagtacccgatcgatgagtgtgcggaattccaactcctcgaaaatcttgcggagttcctcttcgttcggttcttcgcggacgagcgaatccatgtcgagctgaatgggaacatctgttttgatggtggcaaggaatttggagaaggttatcatctcgcggttggtttccactttcgttttcagtgcgcctttcagctggtcggtatgttccagcaggttttcgatactgccgaattcggcaatcagtttctgtgcggtcttctcgcccacgcccggacagccggggatgttgtcggaagcatcgcccatcagtcccagcatgtcgatgacctgctcggtggattgtatgctgaacttcgtctttacctcttccgtgcccataacctcgaatccgccggtatgcttggggcggtacatgaagacgcggtctgataccagttggccgtagtccttgtcgggagtcatcatataggtggtgatgccctgccgtccggcttcggtggcgagcgtgcctatcacgtcgtcggcttcgtagccggatacttcgaggatgggaatgcggtaggcgcggatgatgtcctttataataggtacggaaaggcggatggcctcgggtgtctcctcgcgctgtgccttgtattgctcgtaggcctcgtggcggaaggtggggcccgacgggtcgaaggctactcctatgtgtgtgggattctcttttttgagcacttcttccagggtgtttacaaagcccagaatggccgaagtgttgaatccttttgaattgattctcgggttcttgatgaacgcgtaataggctcgatatatcagtgcataggcatcgagcaaaaacagtttatcgattgaattcatacatttaatcctttttttcatggtaaaagtacaaaaaaataccgtattaaccgttttattactatttttgtaggcaaatagcgatgcatggacaactcatcattgataaaatctccgatttctgaggaattggaggacttcaagaagctttttgaaagtactctctccagttccaaccttttgctgaacagcgtaattgcgcatatccggcagaagaacgggaagatgatgcgccccattctggtgcttctggctgcgaagctttttggcaaggtatgtcctgcaaccctgcatgctgcggttgcgttggaacttcttcataatgccagccttgtgcacgatgatgtagtggacgaaagtactgaacgccgtggacaactctccgttaatgccattttcaataataaagtagccgtactggcaggcgattatctgcttgcaacagcgttggtgcaagtgggcatgacccgtaaccatgacattatcgacatcgtctcctgcctggggcaggatttggcagatggtgaacttctgcagctttccaacgtcagcaatctccatttctccgaggaagtctatttcgacgttatccgcaagaagacggccgtgctctttgcagcttgtacgaaggcgggcgctctctcggtgggagccagcgatgaaaaggcggaatctgcgcgtctgttcggtgaatatatcgggctttgttttcagataaaggatgatattttcgattactccgagagcaaggaaataggcaaacctaccggaaatgatatggtggaggggaagttgactctacctgcgcttcatgtgctcaataccgtgaaggataaaacagcggaagaaattgccgtaaagataaagaatggggaggcaacgcctggcgaaatagcccatttaatcgaatttaccaagcagaatggtggtatagagtatgcttcgcaagtgatgtatgactataaggaaaaggctctttctttgctggcttctttgcccgatacggaggtaaaagtagcgctagccgggtatctggattatgtggtagagcgggaaaaatgacggaactgtttccggttgataatatgagaaagcctgatggaacccactccatcaggctttatttataggtaaatacagctttctcttagaagaatttcatctcttcacccttgatttccgaaagcagcaggttggcaagacgactggttcccagacggaacagctcgttgttcagccattcttcgccgagcacttccttgacgatggtgtaataaatcagtgcatcgttcacgcagttgattcctcctgcgggcttaaagcctaccttgatacccgtcagctcgtgatattccttgatggcctggcacataaccagggcggcctccggcgtggcggcaggctgctgcttgccggtggaagtcttgatgaaatcggcacccgaatacatggaaaggatggatgcttttttgatgttcgaagccgtcttcaaagctccggtttcgaggattaccttcatgtggtgctctttgcaggttgctttgagttcttgtatctcctcgcacatgccttcatagtctcccgccaggaacttgcccaccgaaataacgatgtctatttcatcggcgccttccatcagtgccatggcagtttctgccactttcacttcaatgaaagtctgggaggaggggaaacctgctgatacacaagctatttttacatcttccacttccagcgtgtcttttacgacttctgcaaaattggggtatacacagatggctgccacattcttcaggtcggggaactcttcgtcgaatttattcactttctgggtgaatttcatgacgctttcatcgctgtcttcactcttcagggtggtaaggtcaatgcagttgaacaggaatttctttacctccggtgtattgtttgccggtactttctctgcaatgattctggcagcttgtgcagctatttctgcatcatccagttgggtgttgtactttgccagggcggcgtcatacttactctgggtaggctcattcttctccatggtttttcaatttaggattattgatatgtcttgtctggtcacgtctggttttcttctcgaagttgcggcagaaggcgtctgtcaggttcactccggtctggttcgcaaggcagagaagtacccaaagaacatctgccatctcatcgtcgagattgtctttttctcctttcttgaaggattggtcgccatacttgcgtgccatgacgcgggcgagttcgcccacttcttcggtcagtatcgccatattggtgagttcgctgaaatagcgcactccgtattcctttatccaggaatccacttgtttctgtgcttcttctaacgtcattattccttgttttttgtatctatacagatggtcacgggaccatcgttcatcagttctactttcatatcggcaccaaattcgccggtacctatttctttacctaatgctaaactcagttcccggcagaattgttcgtacagcgggacggatatttccggccgtgctgcccgtatgtaggagggacggttgcctttcttggtggaggcgtggagggtgaactggctgataaccagtatctcgccgtctgcttcaagaatggatttgttcattacgccgttttcgtcatcgaaaatgcgcaggttgactatcttcttgcaaagccagtcgatatcttcttttccatcggattcttcgatgcctacgagtatcatgaggccctttccaatggaggctttgcaggttccgttgatggtgacggaagcgtgtccggcacgttgtatcactactctcatgttgttcttgtctttttgaggggacaaagttacgaattaattcgttgtgtgcatggctctgcaggctgatttatcagtcattatttctctgagaaataggtctggatgattttggctttcgcttctcccaccacggcggcaagctcctcggcagatgcttcgcggatacgcttcacgcttttgaactccttgagcaacgtgcttttcgtcttttcaccgataccttttatctcgtccagtgcggaggcaatctgccgtttgctgcgcttgtcgcggtggaaggtaatggcgaagcggtgcacttcatcttgaatctgcgtcagcagtcggaagaggggggtgttctgtttcaatccgatggtctggggagggtagccatacaatagctcggaagtgcgatgtttgccatctttggcaagtccggcgatggggatgttcaggccaagctcgtctatcacctcttttacggcgctcatttgcccttttccaccgtcggtgataagaaggtcgggcaggggtgctttctcttctatagcgcgctgatagcgccgttttacgacctctttcatggaggcatagtcatccggtccctctacggtcttgatattgtacttgcggtaatccttcttggaaggtttccccttgacgaagaccacgcacccggccacggggtcggaaccctggatgttggagttgtcgaaacattctatctgcatgggcaggcggtccaggtgcagctcttgctgtatctctttcagcaggcgcacggtccgttgctccggattcagcttttcggcttgcttcaggcggtcggctttgtactgcttcacattgaggatggagagttccagcagtttctttttgtctccccgttgcggaatggtaaagacgacatctttcagctccatatccagctcaaaaggcacgatgatttcacgagaaaggctcttgtatctttcccgcatttcgatgatgccgagagagagcagttcttctttgctctcattcaatcgtttcttgtattcaaaggtgaaagcctggttgatggcaccgttcgtaatgtgcaggtagttgacaaaagcggacttttcatcgctgtcttcctcgatggagaacacgtcgatattgtgcagcacgttgcttaccacttccgatttcgcccggtagttttccagcagcaggtatttcttctttatcttctgtgcttcttcaaacttcatttcggctgccagttcctgcatttgctggaaaagcatccgttctatctcctgggtattccctttgagtatttccttgatttcagcgatgtttttcagatactcttcctggctttgcttcccgatgcaaggtcctgcacagttcttgatgtggtattccaggcaaacattgaactttccggcacgtatgttttccggagagaggttcaggtggcatgtacgcaaagggtacagatgcttgatgaggtcgagtaatgcgtacatggaaggtatatggctgtaagggccataataggaggaaccgttacggattatcttccgggttctgaatacacgtggaaagtattcgttctgcacgcagatgctgggatacgtcttgtcgtctttcaacagtacgttgtagcgaggcttgtatttcttgataagattgttttccagcaatagcgcgtcttcttccgtattcaccacgatatatcggatatctgcaatcttgctgaccagcaccctcgtctttcccggttcgtgctcccggttgaagtaggaagacactcttcgcttcagattctttgcctttcctacatatataatagtcccttcggtattcagatattggtaaataccgggactttcgggaaggttggatacaatccctttgaggtagtcgttagttctgagttcttccataataccgacgtttcaccacagattacacagattagcgcagatttctcttcgataaaactgtgttttgtggtggataaataatctgtgttaatctgtgtaatctgtggtgaaatatgaaatggctaaagcgacagcacagcctccacttccacatcatctccaaacacatccttgccatgaagctctttcagctcgatgatgaagtttacatacactttcttggggttcatctgtttcaccagtttgcaggcggcttccattgttccaccggttgccagcaagtcgtcgtgtagcaatactacatcgtcttcattgatggcatccttgtgcatctgcacggtgtctttgccatattctttatcatagctttcttcaatggtttctgcaggaagctttcccggcttgcggataggtacgaagcctgcccccagtctggtggcgagaatggggcccataatgaatcctcttgattctatacccactactttggtgatgcctttgtctttatacatctcgtatagtgtgtccgagagttcctgcaaggcggtaggctccttgaacaaggtagttacatcgtagaatagaattcccggaatggggaagtcgggtatttctcggatgcttttggtaagagtttctttgctcataatcagtttatttaatacgtttattgaattctttgtttcacgtggaactttgcgctctatcgtccgcaaagtaccagtagcacgttgatgtcgcttggagatactcccggaatccgactcgcttgggctattgtttccggatctatcttcatcagcttctgtctagcttcggtagaaagggattgaatggaattatagtcaaacttaccttttatcttgatgctttccaatcttgccaatttatccgcaataatccgttcgcgtccgatgtatccctcgtacttgatgagtatttctgcagcttctacaatttcttcctttctatcggatattttatccagttctcgtttaaaggcactgacgtgttcggcaatgttctcaatcgttatctgcggacggtttatcaaatctatcaatttgcatccctggcgcagtggagttgtgccgagctgctccaataccggattgattaatgccggtttcatcgagtaattccgcgcgaagtctataatccggttcacggcttcacgtttttctgtcagcagcttgtaccgctcttccttggcgagtcccagcttccaggctttttccgtgagtcgcatgtccgcatcatccatacggagcaggatgcgatattcggcacgggaagtaaacatacggtaaggctcgtccacgccttttgttaccaagtcatcgattaaaacgccgatatatgcttcatcccttgcaagggtgaacggctctccgccgtggcaattgatgtgggcgttgatgcctgccatgattccttgtccagctgcttcctcgtaaccggttgttccgtttacttgtccggcaaagaacagattctttatattcttcgtttccagcgtatgtttcagttgggtggggtcaaagaagtcgtattcgatggcatagcccgggcggtagatgacgaggtctctgaacgccggtatctttttcaatgctgcaatctggatgttcatgggcaatgaagaagagaatccattcaagtagagctcttgggttgtttccccttcgggctccaggaaaagctggtgctgcggtttgtcggggaaagtcacaatcttggtttctatactggggcaataacgtgggccgatactttggatttgtccgttgaaaaggggagaatccggcagaccttcctgcaggatgcggtgtgcttcttcgttggtgaagcaggtccagcaagggagctgtttcaaatggcgtacatgagtgtccatgaacgagaacttgtggaagtcacattctccgtcttggatttccatatcctcataatgcacgctgcgtccatctatgcgtacgggggttcccgtcttcatgcgtccaaaggtgatgccatgctttgcgatggattcggttaattggtaggatgcaggttctgccatacgtccacctggaagcatggtacgtcccacgtgcatcagtccattgaggaaagttcctgcggtgagtactacacatttggcatggaacgttactccccataatgtgactactcccgtaatctcaccgttttcaacgaggatttcctgcacggtatcctgccagatatgcaggttggggatattttccagtatctctctccatgcccagatgaatttgttgcggtcgcactgcgcgcgcggactccacatagcgggacctttggaacggttcagtatacggaactgtatggctgtctggtctgtcaccaatcccatatatcctcccaaggcgtctatttcgcgtactatctgtcctttggcgatgcctcccactgccgggttacaactcatctgtccgattttgttcatatccattgtgataagacaagtcttcgaacccaggtttgcagcagcggcagcggcttcgcatcctgcgtgtccggcgccgattacaataacgtcatacttaaactccattcgttcagtgtattttaaaactgtgcaaagttacgaaaaaagttgtatgccgggacgtgtcatatcttaaaatccggatatatcttctttggcattgcttatatttccgtatccagcatcatacttattgcttggaatgcttaggttatagacatattgcttgtgtttggcttaaaatacaatcaaaatgaagctttttgaatactattgcttttctttttgaaaaagatacatacctttgcagcgtttggatattaaaaagtgttttgattgactaattttaaggaagagaagcatgagaaagaaattcttcttgttaatcattgtctgcctggttatgggggcgggagtgatggctcagacgtctacggtctcgggaacagtatttgccgaggacaacaatgagccgattattggggcatcggtattggtgaagggcacaacgctgggggccgtgaccgatatcgaaggtaaatttacaatcttgaatgtgccgggcacggcaaagacagtgattgtctcttttgtaggtatgcagaaagtagaagctgccataaagcctgctatgaaggtggtgctgaaatcggattcggaactgttggatgaagtgatggtggtggcttacggcacggccaaaaagagcagctatgcaggttcggcttctttagtgaaagcggatgcgctgaaagacattccgacgaccagctttgaaaacgcgttgaacggtaaagtggcgggcttgcaactgacgaataattccggccaggcgggttccgcaccggccatccgcatccgtggcataggttctatgaatgccgggaatgaaccgttgtatgtagtggacggtgttccggtctcttcgggcaatacggggcagatgagcggtgagctctattctaccaacaacatcatgaatacgttgaacccggaagacatcgaatctatttctgtattgaaagatgcggcggccagctcgctttatgggtcgcgtgcggcaaacggcgtcattctgattactaccaaaaaaggacagattggcaagccggtggtgacgctgaaagccgaagtgggcttcacgccctgctgggcaacggacaactatgaaacggccagcgtacaggagaatgtgaatatgctctacaccgtatttcacgatgcccgtacaagcggtaagggcgaaacggacgaaaaggcggcagcctatgccataggccagttgaacagccgtttcaacaaacatggctaccaatttaccacaaatggtacgggagcttacgagaacgtcaatatccttgagtacgacaactccgggcgtggaggcaaatactacgattgggacaaggcatatttccgtaccgccatttaccagacctacgatatgtccgtcagcggtgctacgcagaataccaactattacacttccctttcctatacccaggacgagggacgtttgaagatgaacagcttcgaccgtgtttccggtcgcttgaacctcacccagaaggtggggaaattccttgaactgaccaccaatgccagcctggcgcgtaccaagaaaagcggttataatgatacacgcaacacgggcagtaattacttcatgcagacccgtaacttgctgtggggactctactggcccactgattacaagaccggcgagctctggaccgaacgttacggtagctacgcctacaatgggctttattatgacaaagagtgggagaacggttctaccagtaccaaaatcatagctgcggagacgctcaccctgcatctgatgccgggcctggaccttcgttctatctactcttacgacaatactactgtaaaagaccatatctattacagtgccaatcactataaaggctcggcagacaatgggaatgtcaacgaataccgtactacatacgagaagatggttacctccactaccgccaattataccggcaccttcgacaaacacacagttggcaccatggtgggtttcgaagcggagaagaacaagacagactatgtgcgtgccacaggaagcaatcttgcggtcagcaccattcatacagtttctactgccggaacgcagacttctgccggatattcctggggaaactcgatggtgtccgtgctctccaagttggattataattacgatgaacgctacttcatttccggttcttaccgccgcgacggttcttcccggctcagcaagcaggaacgttggggaaacttctggtcagtggcgggagcgtggaacatcatgcgcgagggttttatgagcaaatattctttcctgagcaacctgcgtatacgtgcctcttatggtattaacggtacgctgccttcggacaattacggctatatgagcttgatgagctataccagtaagtacatgggtaacccgggcggtacaatcactaccgtcaccaatgacaagctgtcttgggagacgagctacaacacgaatgtgggtatcgacttcggcttcttcggccaacgtctgcgcggtacggtggaatacttcaaccgtgattcgaagaacctgctccaggatgttcccatttcgatggttacgggattttcctctacgttgcggaacgtaggatgcatcaacaaccatggggtagaggtggagttgagtggtgacatcattgatagtaaaggatggttatggagtgccggtgccaacgcaaccttcctccgttctgaggtgaaagagttgtatggcggtgcggacattatctggtacgaccccaccagtagcgacagccgtgcgcaatatgtataccgggaaggtcagtccacgctggctttctatggatacgaatgggcaggtgtggacaagaccaacggcaagaacgtctactatgtaaatgaccccaagaatggcaaggccggagattttgagtataacgggcgcggagctacttatgactataacaatgccaactacaccatcatcggcaatgccgttcccaaagtgtatgggggcatcaatacctcggtctcctacaaaggcatagccctttcgttgggctttacctataagataggaggagacttgtacgacggagcctacatggatgtggccgacgacggttattattgggagcgtatccgtgctaaaagctactacaacaacctttggacgccagaccatacgaacggtacagagccccgtatcgaaggtgtagacctcgatgacccgcaacaatacagcagccgccacttgttcaatgccagttatctgcgcttgaagaatctctcattggcctatacgctgcccaaagccatgacccgcaaggctttcatcgagaatgcccgccttttcttcactgccagcaacctttggacaatagccaaatacaaggaggcagaccccgaagtgagcgaatacggcacacgtggttgggaaacccctatcggaaaaacgtttgtcgttggcgttgaattgaaattttaatgaactggaggaactaacaatgaaaaagatatatcatttattggcacttgtgatacttggtgcctttacattcacttcgtgtgacgattttctggatatgcagcccaccaactccggaaatgcagaaggtgctgtcggtacggtagccgatgcgcaggtggttatcaacggtgtgatgagtgcgatgacctcatcgtcctattacggcagaaacctttttatgtacggtgatgccaagggcggtgacctcacgatttttgctgccggacgcggactggatgcattctatacgttcaaccacacttccaacagcaatacttattccggtttctggagccgtggatattactgcattctgcaggtcaacaccttgttgagcaacattgagaagctggaagaatcgggcagtatggaagacttttccgaagccaaagggcaggcgttgactctgagggcgctgttctatttcgatttggtccgtctctacgggcttccttacaattacaacaagacctcttatggagttcccaatgtaaccgagccgcttacggtgaacgcccagcccacccgtgctactgtggaggagaactatcgccagattctgcaggacttgtcggacggggcggccctgcttgccaagaagaagacaaagcagagcggatatgcggactattacaccaacatagccctgcaagcgcgtgtgaaactctatatggaagattatgacggtgctttgaacgctgcccgggagattatagaaagcggtgtgtacaaactgtatgagcctgccgattggacggcttcctggagcaagcagtttggttccgagtccatctttgagctgggcatcaccactgaggaatcagacctgggaacttcttctttgggcttttacctgatgcgctacggacagttgaagaatgccatgggctggtatcttgccagcgattatttcttgaaccgtctgggtgaagacgagacggatgtgcgttggggaatcatggacaacgatgaatactgggtggacaatgagattgaacgcaagggagcctgctacaagtatatgggcagtaccactctggcaggtgacggcaaggcaaccaatacagccgtcaatatcaagataatccgtctttccgagatatatctgattgccgccgaagcagccttgcactccacgaagcaggaagcaggcgcagatgccgccgccggttacctgaatgaaatccgcaggcgttctcccggactggcaccggccactgccgctaccattaccgatgatatgattctggacgagcgcagcaaggagctttttggtgaaggacaacgcttcttcgacatgatgcgtatgggcagaaccatcgaattcaacgacgattttcaagatattccggtgagtcaccgtggaaaaacaatcgaccgtactttcgagaagattgtgcttcctatttcgcaagatgagataaatgccaatccggcattggagaaccagcagaatccgggatattagtcgttccctgctgtctattgtttgctactccttgtatatcagggaggtattttgccaacaagttgtcactgccttggcaaacttttgccacgcctatggcaaagttttgccaatgggaaggcaaaaccttgtcataggcgtggcaagaaaagcggaaaaaggtgcctttgatgaatttctttgataaaatgagacggtaataccttgatattccacaaaaatactatttattggttctaaatttctattctttttttctgaatcggcttatctttgctttcgtagaaaccaataaaaagttataatactatgagaagatttttcctcatatcgtcattcttgacgttgtttgcaatcggaagctcggcgcaatggaagccggcaggtgataaaatcaaaacggactgggcatcccagatcaatcccgcgaatgtgttgcccgaatatcctcgtcccatcatggaacggagtgactggaagaacttgaacggactgtggaattatgccgttataaataaaggtgagcatcttccggcagagttcgaagggcagatacttgttccttttgccatcgaatcctccttgtccggagttggaaaaagaatcaatgaaaaccaggaactggtctaccagcgcagttttgaaattccttctgcctggaagggaaaacaagtgctgttgcactttggtgctgtcgactggaaaacggatgtatgggtgaatgatgtgaaagtaggcagccatacggggggatttactccgttctctttcgatattactgccgccctttctggcaaaggcaataatcagttggtcgtaaaagtttgggacccaacggataaagggcctcaaccccgtggaaagcaggtcagcaatccggaaggtatctggtacactcccgtaagcggtatctggcagacggtatggatggagccggttgccggaaaacatatcgagaacctccgtattactcccgatattgaccgtaatatgctgacagtgaaggcagaattgaataaggcatgcccttccgactttgtggaagtgaatgtgtatgacggcaatcaactggtagccaccggcaaaagtatcaatgcagagccggtggaggtgtccatgccccggaatgccaagttgtggagtccggattcccccttcctctatacgctgaaagtgactctgaaaagcggaggcaaggtagtggataaggtggacagctatgctgccatgcgtaagtactccacccgtcgtgacgcggatggcatcgtacgcctggaactgaataacgaggctttgttccagtttggaccgctggaccagggttggtggcccgacggactgtatacagctcccacagacgaggctttgctgtatgatgtacagaagacgaaagatttcggtttcaatatgattcgcaagcatatcaaggtggaaccggcacgttggtacacacattgtgaccgtttgggtatcatcgtatggcaggatatgccgagcggtgaccgtaatccggaatggcagaaccgccgctatttcgacggaacagaactgaaacgctccaccgaatccgaagcctattatcacaaggaatggaaggaaataatggattgtctctactcttatccgtgtatcggtacatgggtaccgttcaacgaagcctgggggcagttcaagacggtagagatagccgaatggacgaaacagtatgacccgacccgcctggtgaatccggcaagtggcggtaaccattatacttgcggtgacatgctcgacctccacaactatccccaaccggaaatgtatttgtatgatgcacagcgcgccacggttttgggtgagtatggcggcattggccttgtcttgaaagatcatctttgggaaccgaaccgcaactggggatatgttcagttcaactcttccaaagaagtgactgatgagtacgtgaaatatgccgatatgctgtatcagatgataaaaagaggtttctcggcagccgtctatacacagaccacggatgtggaggtggaagtgaacggtctgatgacttacgaccgcaaggtgataaagctggatgagaaacgcgtgaaagagataaatacacgtatctgcaattcacttaagaaataggggcatttacaatttaccatttacaaagtacaatttaactatgcagatgacagcgcagccaaattgtactttgtaaatggtaaattgtacattaaaaatgttgttatgaaacgattgattataaagcttttccttagtctgtgcctatgggcggtattgccggtctgtgcgcaggatgctgttcattactatttcagaacgatggatatccggaacggtctttcgcagaacaccgtgtatcagattttgcaggataggaaaggctttatgtggttcggaaccaaggacggtctgaaccggtatgacgggttgtctttccgtgtctacaagaaagagaactctggtttaggcaagaatttcataaccgcgctctacgaggaccgccggggcaatatctggattggtaccgatgggggagtctttatttacgacccggtactggattcctttaccgctttcgatgaggccagtgataatggcagtatcatcagggatttcgtcaccatgattggaagtgacgaggacgacaatatctggatatcggtagaaaaccaggggttgttctgctataaaccggatgaagggaggctgctgaaccatctgcacgattcgggactgcccaatgtaacccgcttttggctgaatgggaatacgtgttggctggccttgtatgcggataatctttactatacgaaagctgactttgaaactcctctgcagcctttcaaggatgcggaaggaaatgagattttcaagaatgatattatcaactggcaggtcagcggaccccataattgtgtgtatatcgcttcgctgaacgggttgacagagataaaccagactaccggcaagacgcggaagctgctgaacacctatgtgagggctttgcagttcaaatctgacaacgagctgtgggtgggcgcagagtccggcttgtatatttacaatctgacgaatgacaagattacccatttgaccgttcccgaccaggatgattcgtatgcattgtcggacaatgccatttattcgctctgctgcgacaaggagaacggcatgtggatagggtcttatttcggtggagtgaactattgcccttatcagtggacttatttcgagaagttctatccgagagacaatctcaggcatttcggccgtcgtgtacgggaaatctgtgaaagtaatgatggcaccttgtggataggtaccgaagacaaaggcttgttcaattacaatccggaaaacggaaagatagagccttttgagcatccggccatttatcagaatgtccacggcctttgcctggacggggatgatttgtgggtaggtacgttctccggtggtctgaaccgggtgaatcttcggaccaggcaggtgaaacattatgccaagggtgagagtgagaattccatggtcgccaatgacgcctttaccatttgcaggaccactacgggagacgtgtggataggcaccacgtccggtctgttgaagtacaatcgctctacagatgactttacccggattcctcagctgaagaatatgtttacttataacattctggaggacttcaacggaaatctgtggtttgctactttttctaatggagtgttctgctacaatgtaagaagccagcagtggaggaattatctgtctaatgagaatgattcgacctctcttccctacaataaggtaatcagtatctacgaagacagcaggaagcgtctgtggttcatgacgctgggtgagggcttctgccgctacaatccggaaacggacaattttacccgttatgacatgtcgaaaggatttccgagcaacactatctacaagatggtcgaggataagcggggtaacttatggattacttccaattatggtctggtctgcttcaatcccgatacggagagcaaacatgtctataccacggcaaacgggctgctgagcaaccaatttaatttccagtccggttacattgacaagaagggacgcatctatttgggaagtatcaacggattcatagcctttgacccggaaacttttgtggagaacacttttctccctcccgtagtgattacagatttttatctgttcaacaaacggctttcggtggatagtccggattctcctttggagaagagcatcacctatgcggatgagatagagctggatgccgaccaaaattctttctcttttcaggttgcagccttgagttaccaggcacccgaaatgaatggtcttgaatgtaagctggaaggctttgaccgcgactggtatacggtagggcggaattccatcatcaactattcaaaccttccttatggaagctatacattgcgtataaaaggttccaacagcgatggcaagtggaacgcgacggaacgtgtgctcgacatccatattcatcctcctttctatctctccacttgggcgtatgctgtttatacggtattggcgttatgttcactggctgctgtaattatctatttcagaaaacggacccggcagaagcatcagcaggctatggacaagtttgagcgggaaaaggagcgggagttgtatactgcgaagatagacttcttcacgaatgtggcgcatgagatacgtacaccgcttacactgataaagagtccgctcgagaatgtattggtttcccagtctgtctcggacgacatcagggatgatttggagaccatggaactgaacaccaaccggctgctcgatttggtgaaccagttgctggacttccggaagacggagacgcaaggcttccaattgaattttgtggaatgcgacgtgtctgagctcttgcagaagacgtataagcgcttcaagcctctggcacgcgaaaaagggctggcattgagcatagagactcccgaaagcttgtatgcttcggttgacagggaagggcttaccaagattatcagcaatctgctgaccaatgcgataaagtattcggagacctatatacgcatcaggctgtactcggaaggtgaaaggctgctgctttccgtatgcaatgacggccttgtcattccggtagagatgcgcgaggagattttcaagccgttcatccagtataagaccggtacgctgcgctctgtgcccggcaccggtatcgggcttgcacttgcccgttcattggccgaactccatgagggtacgttgtgcatggaagattcgatggagaacaactgtttcctgctgtcacttccgctgaagcacgagcagacggtggctatggagcataaagaaccggtaacgggcggggaatcctctgaggaaagtggtgcaggtactgccttggaacagcaccggtatactcttttggtggtggaagacagtctggaaatgcaggcatttgttgtgaaacagctctcttcggaatatcgtgtgctgactgccgtgaatggggtggaagctttgaaggtgttgaaggaacatactgtaaatcttgtcatttcagacattatgatgcccgagatggatggattggagctgtgcgagcatctgaagtccgagcttgactatagccatataccgattatcctgcttacggcgaagacgactcttcaagccaaaatagagggaatgaagctgggggctgacgtatatatagagaaacctttctccgtggaatatctgaaagtttgtgtggccaatctgctgaacaaccgtgagaagctacgggcttcttttgtcaattctccctttgtgcagacgggcagtatggcaatgacaaaggcagatgaatctttccttaaaacattgaaggaagtggtggttgccaatatgcagaatccggatttctgcctggatgatatggcaagcctgctgaacatgagccggtcgagcctgaaccggaagataaagggcatattggatatgactcccaatgactacatccgtctggagcggttgaagaaagcggcgcagcttttaaaggaaggagagtgtaaaatcaatgaggtttgctatatgaccggcttcaatactccttcctattttaccaagtgcttccaaaaacaatttggtattctgcccaaagacttcgtgaaatgatagcatggaatgcttgctaaatataacaatccaatcaaatgcccctgaggtgtctctcaggggcattttttggatttataattgcatagattgaagcgatatttgcattaattttagctttatgcggatatatttgcatccgaaagccaacaatttataatactatgacccctatgcctatgacgtaacaaatcctaatcaatgttctatgattggcagaagtgactaatcactttctgcggtgtatttaaaaagcgggcgttagtttccgcatagttttaaaatctaattctataaaaaatgatcaagaaaatcttattcttattctttgttgtgtttgcagctaccgcttattcacaagatgtgaccataacgggaacggtgacggatgcaaatagtgagcctttggtgggcgtgaatgtattggtgaagggtactaccacgggtgccattaccgatattgacggtaatttctcagtgagtggaaaaaaaggaagtacactcgttttctcttatatcggtatgcttacgcaggaagttgtctataagggaactgccttgcgcgtggtgatgaaagatgattcgaaagcactggaagaagtggttgtcatcggttatcagaccgtgaagaagtccgacttgactggagcggttgccgttgttgataccaaggaaatgaagaaaagcgctgcaggaacactggtcagccagatgcagggtttggcaaccggtattaacgtacgcagtagcggtagggcgggcgaagatgcctctattgaaattcgcggtgtcggttctttgagtaataactctccgttgtgggtaattgatggtatgattacagatccgggagttgacttcaaccctgcagatgcagaatccatccagattctgaaggacgcttctgctgctgccatctacggttcgcgtgctgccaatggtgtgattatcgttactaccaagaagggtacgaaaggtcccatgaaggtgaatgtaagcgtaaaggaaacattggaatggagcccgaaatttgatttgatgaatgcggcagaatatatcaagtataatgatattgcctataatgaagctatcaaagatggcattgctactgtaaacagcactcagaaacactcacagtatgataccaactggcaggatgaagtgttgaagaccgcattggtgcaggactacaacgtatcactctccggtggcggtgactccggtagttattttgtatcagccggctactataacaatgacggcgtttcttatggaaatactttcgaccgttatagcttccgtgtcaatacacaaggtaaaaagggctggttctcttttggtgaaaacttggcttattcactcacaaacacagacccgaaccagaccaatacctacaatgactttttgcgtatgatgcctactattcctatctatgatgagaataatccgggtggatatggctatggtgatgctgccaaatacaatacttttggtgtgaacccgattgcccgtgaagatttggaataccgtcatttccgccagaatcgtttgaatggttctttatggttggaattcaagcctttcgaattcctttcttataaattcaatggtggtattgacctttatttctatgagaactcatggttccgtggagaaggtaactggactcagaatcaggaacaccgtgatccggaaagccagaaggcacgtgacaacacctacaacatgttgattgagcacacgttgaacttcaataaggattttggtaagcatcatgtggatgccgtggtcggtactacttaccagcaccatgagtgggaaggtttgtgggcttcccgtctgaactttccgatgacgggtaacggcgattactttacagttttgaatgcaggacagagcaatcagcagaattcaaacagcatcagcgagaatgcgatgatttcttatttgggacgtgcaaactacgtttatgatgataaatactatctgactgccactttccgtcgtgacggtacttctcgcttggctaaggaaaaccgctggggcaatttcccctcattctccggtgcctggagaatttcaaaggaggaattctttgatgtgccttggattaatgacttgaaaattagaggtaactggggtcgtcttggtaactcttccattggtgattgggattatatcggaactatcaaccagagtattgtaactgtattcggtggtgctattgttccgggttctactcaggtgaaactggtgaatgcaggtcttgtttgggaaacaaaagaaacggtgaatgtaggttttgatgccagtttcctgaaccaacgcctgactgtcagtgcggaatattataattcaaaaaccagtgacgtattggctgagactccgattgccatttctaccggtaatcaaggaggctctccgtggaaaaatgctgccagcttgcgcaacaagggcttcgagtttacatttggttggaaagaccagatttcaggctttaagtacagcgctttactgaatgtgactacgatggataacgaagttctgagcttgggacgggatgggtcggaaagaaactttattgattccggtcaagccagaacagagccgggaaggtcgttggccgaattctatctgagaaaaacagacggcatcttccggacacaagaggaaatagacaattatgtgacgaaaggtaaccatgtaccgggacctaatgaagataaagtacctgccggtacaccgatcatgattgaagggaaacgtccgcaattgggagacgttaagtatcttgatttaaatgatgacggtcaaattactgatattgaccgtgattattgtggtagtccatgggccaagatgcaaatgtcgttggtattgaatgcagagtggaagaacttcgatttcagtatgatgtggaacggtcaatttggcaataagatatacaacgtatcccgttggcaaggacgtctgtttgcagacaactccaactatatccgctttgagaagggcgaagagccttatcaggtgaatcctaactccaataccccacgtatcatttacggtgacttccgcaactcgcgtgatgccgaccgtttcctggagaatggttcttacttccgtatgaagaatatctctatcggttataatttcaagcagaagtggctgaccaacttgggcgttgagaaactccgtctgtttgctaccggtagcaacttgattactattaccggatattccggtctggatcctgacttcaagggtgcgaattccgtttggaacagtggtacggacagctttgcttatcccaatacccgttcggtgatgtttggattggatttgaccttttaacttataaatcagtttgtaaattatgaaaaagatatataatggattaatgctcgcaggtgccttgacattgtgcactggatgcagttctagtttattggatattgataatcccaatgaagtgaccaacgatacttattggaataagccggaagatgctacagctggtgtaaatgcctgctacagttttctttataaggaaggtacttggatgcgttggctctcttttcgctacgatttgacctcggacgagggatggagttcttctccttggattgaattgggtgactggacacgttttctttacaacaattataatttttacgaaggcaacaatatacattgggaacatttctacgtaggtattttccgttgcaaccaagtgttgagtcatgtgcctaatattgaaatggacgagactacaaagaaccaggtattggcacaagcttctttcttacgtgcaatgtggtattttcaggtaaatctgttgtgggacaaaggaacgatgcctttggaacctaaagatgccaattatattccggaagacgcttccgagcaggaaatatgggatcaagtggagaaagacttgctgtttgctatggattatcttcctgaatcttgggatgctgccaatttgggacgtgccaccaaaggcgctgccaaagcattgttgggcaaggcctatatgcaacaacataagtatgacaaggcgaaggaacaattgcaatggctgattgataaagagggctctttgtacgatcttatcgccaatcgtgaagataatttcactgacttggatgagaacaacaaggaaggtatctttgaaattcagttcgatgaccaaaacaagggtggtacgggtaatgatgccagtatggcattcggtttccagcgtactcagttctatgctccgagtggtataggttggggagatggtaaggcacgtcgctggttggtagatgagttcttgaaagagaaacgtattgacggaaagaatgacttgcgtttgtatggtagtattctgtaccgtggattctcacaagacttccccgatcaaccgaagaaatattatggatttgaaaatgccgattggaatgacggttggggaactgacccggaagactgctacatacgtaaatacaatactgcttactatcgtgatgcagaagattactttgcccgtaacaactatcgtatcatgcgttatgcagatatcttgatgaactacgcagaatgtcttgttgaaacgggtactaatcctgccgatgctgctgtttatgtggataaggtaagagaacgtgccggtctggccaagttgaaagacagtcagtggaaagactgcctgagttctaaagatgcctttatcaagcgcctgcagatggaacgtactttggaactctgtttcgaaggttggcgttgggctgacttgaagcgttggggattacttgattctcaggctggaattgatgagctgaaagcccgtgacaaggacttcaataacttcatcgtcggtaagcacagacgtttgcccattccgagagatgaagtgatgaacagcacggtaggtggtgttgcacatcttactcagaatcctaactattaataactaaagaaggctatgcctggaagcctgttctcattcaggatgcttccggcatagccttttctttcttaaatcttataccatatgcttgtctgtaaaaaactactattaccattcgcttttgcttgctgcggcagcttgtttgcgcagaacatccagaatccggtacttccgggagtggcggatgccggcgtaatgaaatataatggcaaatattatattggcggggtccgtacaaacggggatttctatgtatccgatgacctggttcattgggggaaacctatccatgtcgtatccatggacaatgactggaccagaggcagcggagccggagatgaccagattcatgccaatgacatgttctatctgaatggagattttcatttgtactggtcagtcaattattggggaaaggacaagcatgccgttcacattgtacatgcgcagagcaaagatgtcttgggcgcttatacagaaccgaacaagaagacatggatggataaccgtatcgaccccaaaatattcagagatgatgatggacaactatacatgtatatggtacgttttactgatggaaataccatatggggacgtaaaatgaagaacccggcagaatttgccggcgaaccggtgtgccagttcgcctcattgccggatacatgggaaacgatggataacagagtagcggagggaccgtgggtcatgaagtatagagaccgctactatatgatgtataatgccaaccacacctctacagagtggggcaattatcagttgggagttgctgaggcagactctcctttaggttttcaaaatggtaataaatatagctatccggttgtaggctgcaatcagacacaactggaggagaagcaagtggatttattgcggtatggccgcacgtatgagccgttgtttgcttatacggagagcaaaccgggaagcgattggacaaaagcgacctacgatgactccggctgggcgaagggggagaccggcttttcgtcccgtgaagtgaaaggttccaccacccggcatctgggtaccttgtggaatacgccctccttatggttgcgaaagactttctctgccggtagcgaaaccggcaatctggcattgcgtgtcgctcacgacggagatacccggatttatctgaacggaacacttgtctacgagaagcaggggcgtgattattgtatcgtgaacctggacaagaagctgcgtgctgctttgaaggaaggcacgaatctgcttgccgtagaaacaaacaagggacgttcgcaattcttcgacgtttctctgttcgatatgaaagacggcattgccgacgatattctgatgactcccgggcagcccaatattctgagaggccccaacggatttgaatggtggctgatttatatggcaaacaagaacaatgagcatcggggacaatatatcaaccgtgtccagttcttcgacaagacattgtttgtggatggtatcaccagcccccgcacgatgggttatcatcccgaaccttcgatgcctacctttgcgggcaaaggcgagacagcttcgttcggtgtgttgcaacaagtacagccgtccgtggcttacttgttcgagacgggagtcaagaccgagggtggagccggcgtcattgcctggtggaaggatgcagataactgtgcctatgtaggtttggatgccgagaaccggagttggtacctgcgtacacttgtcggcggtaaagaaaataaggaatcctatgccctgcctgaagatttccgttggggtgtgtaccatcatctgcgcattgagcgtaatggtggctgtctgaaaatttggctggatgagattcccacaccgggaaaacatgtctttgcagaggctcttccgacggaagaagcgggtgttcccggagtatttgacgagacaaagtctgccttgttcgaaggggctacctataccatcggcttcgatgatgtgcatttccagctttcggggaatgaggagttgttgaagggcgatttcttgaacgattatgaattcagcttccagttgtccggcttgtccggacaagacaaggcaggaagctatccggtttatgtggataaggataactatgtgaaggctcagttcgatggcatcacccgtatgcttgaggtgacagccgtgaagaaagggaaaactgcctggaagaaggaattcccgttgggatgcctgcaaacgctctatccggatgtgaagtataccgacttcattgagaaaggttatcgttttgccgcacctgcatggttggatacaatttacctgaatcgtcacgaagcaggcaataaatccgaatttgtggatgacatgttcggcaagttcgacatagaatacctgaatggcggcgaatggcatccgatagaaaacaaagatagggggatagcagaacatcctgcatataattattgtacctttactccggtaaaggcagaaggcatccgcttcatcaacaaggaggcggaggatttggaacgccatatctataagataggtgtacatgaattgtggaaggaatcctataattttcgtgccgtgcgtcgtgcagacaagctgtatctgtttgtcgacggcagggagctgggagctttggatatacgctaccctgcatcccgcatcggattctgttcggagggcggctctccggtttatagtggtacgttgtattatcatgtagggcagaggcgcgattagacgcaatcgtgggatgtgccgttccgtatatatgtaatgaaagatgtatatagaagccggtgcttgtatttccttgtgaatcagtgtgatggactggggtgattcagtatacgactgaatgtatttcagtatacgattgaataggattcagtatacgactgaatagggttcaatatacgggtgtaacggaacatcttcttgaaagtaaatatttatcatcataacaattgtttaagaaagaatcatgaaaaagaattttatatgtatgtatctgtttctgttggccacgctggcttcctgccagtcctgctcttcagactataaggatgtggacgatattgttgtcgaaggagttgaaacgccggtgcttttgggcgacccgttcatcatgttgcacgatggcacttactatgcctatggcacccatgcggatgaaggcatcgaagtctatacctccgatgatttgaaaacttggaagtataagggcatggcgctccagaagaaggatgtctgggccgaccgctggttctgggcaccggaggtctacgaagtgaacgggaagttctatatgtattactcggcagacgagcatatctgtgtggcaacagcagactcacctgcaggaccatttacccaaagtaagaaggaaccgatgattgccgatgagaaatgcattgacaactctctgtttattgatgatgacggcacgccttatctcttcttcgaccgtttcaacgacgggctcaacatctgggtggccgaattggagaaagacctcatgactatcaaaaaggagaccatgcacccttgcatccacgtctctcaggcatgggaggaggtatggccccgtgtgaatgaaggcccgtttgtcatcaagcgtaatgggctctactatatgacctattctgccaatagctatgaaagtcctttctacggcataggttgcgccacagctaccgatttgatgggtacttggaccaaatacgaggagaatcctttgctgcagaaacccggagaactggttggagtggggcacagtgccaccttcacagacaaggcaggcaagcttcgtatcgttttccatgcccataaagacaagagtagtatccacccacgtgccatgtacatcagtgacgtttctttcgagaaagtggacggtgtggaccgcatgagaatcagcaaggactatatgacgcccaaaatagtaaaataagagatggatatgaaaaagaattatatattgctactgttgctttgtctttgctttgcaggatgcaaggagaagacggttgtagaatcagactatctgccgattgccgacccttacgtaatgctttacgaaggtaagtattatgcttacggcactggaggtacggtagaaggagaaggctttgcctgcttctcttccgatgacttgaaaaactggacgcgtgaaggccaggcgttgtcggccgcagattcctacggtacgtggggattctgggcgccggaggtctactacatcgaatcgaaaaagaagttttatctgttctactccaccgaggagcatatctgcgtggcaacggcagatgttccccaaggcccgttccgtcaggaagtgaagcagccgatatgggatgagaagagtatcgatacctctctattcattgatgatgacggtacgccttacctttatttcgtgcgttttacagatggcaacgttatttgggtggcagagatgaacgatgatttgaccggcattaagcaggaaacgctgacggagtgcattaaggtgggagagccttgggagctttcgcaggacaagcccgccagggttgccgaaggtccttccgtcttgaagaaagaggatgtatattacctggtttattcggccaatcactttgaaagcaagaactacggtgtgggctacgccacttcggacagcccgatgggaccgtggaagaaatacgagggaaaccctattctgcaacgtgccgacggcttgacgggcaccggacacggagcgcccttccgctgcaaggacggcagttggaagtatattttccatgcacactgggattctgtgaaggtacagccgcgcacttcgtacatcaaggattttgccatttccgaccagggaacggtttccatcggcggcactcttgtccgtccgcaggtattgggcagtacatcacccgaaaagtaaaatgaaagaatgaaaagaatacattgtatgaagaagtttcttgtattatcagtgttatgcagtctgatagcctgttcctcgtcatcggctacgaaagaggataaaccggaagaacaacagccgaagaatgtttatcgcaatccggtgatagattatagtttgccagacccttctgtcattgagggagatgacggatactactatctgtatgccaccgaggacatacgcaatctgccgattcaccgttccaagaacctggtggattgggagtatgtcggtactgcctttacggaccgtacgcggcctgattttgagccgaacggcggtttgtgggcgccggacatcaacaagataggtgataaatacgtgctctattattctatgtctgtttggggaggcgagttaacttgcggcatcggttgtgctactgccgataagcctgagggaccttttacggaccacggaaagatgttccgcagcaatgaaatcaatgtacagaactccatcgaccctttctatatagaggatggagggaagaaatatcttttctggggcagttttcgaggaatctatgcgattgaactgtctgatgacggactctctctgaaggacggcgccacaccgcagcaagtggcaggaaccgcttacgaaggtacctatattcacaagaaggacgggcattactacttctttgcttccataggaagttgttgtgagggattgaagagtacttacactactgttgtaggccgttcagataatcttttcggcccctatgtcaacaagaatggcggtagcatgatggataacaagcacgaagtgctgattcagaaaagcaattcctttgtgggtaccggtcataattcggagattgtgacggacaatgccggcaatgactggttcttctatcatgcggtgagcacaaagaagcctgaaggccgtgtattgatgttggataagattagctgggaagacggatggccgacggtagaaggctccgttgcatccacggaagcggagaaaccgaaattctgacaagtatgaagaaatctattttagtctccttgttggccctattgatgatgggctgtcaagtatcgggtggcagttccttgaaagtggaggaaaccactgttgaaatgcggaagaatcccgaaggagtagctgtatcggctccccgtttctcatggcaactggtaaccgacaagcaggatgtgatgcagactgcttatcagattgaagtggcggactcggaaaagggcttgcaggccggctccgggctggtatggaacagcggtcgtgtggagtctggccaatcggtgctggtgaagtacgcaggggcgtctttggagtcgggacagaaatattggtggcgtgtcactgtatggacaaataccggtgacaaggcgcaaagtagtatccaatattggtcaatggctttgctggacagttcggactggaaagccggctggattggactgaacgacagtacaaacttgaaactggacggtgagcggaccatccttccggcacgttatctgcggaaggagtttgatttgccgtcacagccgaagcgtgcagtcctttatgtttcgggagtaggctcttccgtatgctatatgaatggcgagaggattggaaatgatgtattcggtcctttgcctacctggtacgatgcttctgtatcttatctgacctatgatgtcacccccttgttgaagtccggtaccaatgcgataggcgtggctctgggcaacggccgctatttttccatgcgcgccaatgggatggtaggttttggtttgccccgtctcatggcgcagttgaatatagagtgcgacaatggtgagacggtgtcggtagtcagcgatgattcctggaaagcgacgaaccacggtcctataactgcgaacaacgaatttgacggtgaacattacgatgcccgcttggaattgggtaaatggacggaaagcggctatgatgattccggatggcagttggccgaacggatggaggctcccaaaggaaaacttgtggcacagctctctccgagtctgaaggtgatggaggagataaagccaatatccgttaaatcggtaggtgatggaagatatatcgtggatatggggcagaatatggtaggaatacagcaggtgaaactgcgtggcaagaaggacaagcccattactatgcgttttgccgaagtgctgaaggacaatggtacggaactgtatcttgacaacctgcgcagtgcccttgtcacggatatttatactcctgccgctgacggtgagtttgtttgggaaccgttgtttgtttaccatggtttccgttttatggaaatatccggtttggactatgaaccggcagcggatgatttcaccggtaaggtggtgtatgatgaaatggcaacgaacggtacgttcgagacttctgaggagttgattaacagacttcacaagaatgcctattggggaatccgtggaaactatcgcggtatgcctaccgactgcccccagcgtgatgaacgtcttggatggctgggcgaccgcactactggtgcctatggtgaaagtttcattttcggcaatgccttgatgtataagaagtggctggtggatatagaagagtccatgaatgaaaatggaagtatctctgtggtatctccccgttactggaccatcttccatgatgacgtgacttggccggctgcctatttttacgtagccgacatgctttaccgccagtttggcgatgatagctccatcaaagggcgctatccgtccatgaagcgctgggtaaaccacatgacggagaccaaaatgaaggactatattctggtgaaggatgaatacggggattggtgcatgcctcccgagtcgccggagctgattcattcggaggaccctgcccggaagacgaacggcgaagtgctgagtacaacggtgttttacagcattctgcaactgatggagaagttcgcgcaaatgaacggacttccggcagatgctgaagagtatgcagcacttgccattaaggtcaaggacgcttataacaagaaattcttcaatactgagactgcacagtatgacaacaatacggtgacggcaaacctgctttcccttagactgggcctggttcccgacggatatgaagataaagtatttgccaatgtcgtggagaagacggaaaaagactgtaagggacatgtcagtgccggtgtgcttggcatccagcatctgatgcgcggacttaccgagtacggtggactggaacttgcctataagatagtgaccaatgacacttatccctcatggggctacatgattaagaagggtgcaaccaccatttgggaattatggaatggtgacacggcaaatccggcgatgaattcaagaaaccatgtgatgcttttgggagatctgctgatatggttctatgaggatcttgccggcataaagaatactcccgcttccgtcgggttcaagcagattctgatggaaccggtattcccggaaaaactgaattatgtgaatgcttcgcatgtatcgccttatggcagaataggaagttcctggaaacgtgatggcaataagctggagtggaacgttgagattcctgccaatacaaccgctacggtcaagctgccgcttgacttccatgtacaggtagatgccggtcaggcggggattcattccgtggaggaggctgacggtaagctggtagtcgaattgggctccggcaagtatgtattcatgtctgaatgatatttttctaacaacaataaaacagatgtaactatgagactaaaaagattgtttttgggggtaatgcttttggtgggcattacgggtgccggagcgacaaatgctgctccggaagacatctctgcttctatttccttgaaagtgccggggaatgatgccaagcaatatccgctggccttgcagaagatgcaggatggtatgtacagctgccgggcttcggaaaagttaccgttggacatcatccgccaggtggtggacaaggatggcaaacagcgcattaccgtcacactcaaggcgctggaaaatgtgtatttcaactacggggaacagataaagaccggttacaagcattcagactgccagttctacatgccgggcttctggtatcgccgcaacctgcgttcgccgaaggaagctccttctttccacacatcggacagttggctggtgcgtgaggaccgtttgagcactccgctgacggcagctttcaatccggcaagtggtacgtccatgtcggttatccgtattgacaagttcgacaaggaagctttgaccactcataaggagggagaggtaatcttgtccggtgagacttccatcggatataccggtttctgcaatgtggatggtatgactgtcttggcatacggtttcccctataaggaagcaccgaagacatatatccgcaaattgacgctggctcctgccgttgaggctttccagttgcttcgtaagggtgacagcatctccatgacttgggaggtgtccgaaaggaatgctgccgatttttcggaatgcgtacagcgcacctgggagtattgttatgacactaaccgtccgaaaccggttgacacaccttacacggtagaccgcatgaaggaggtgatgagcaacttcttcgtggaaagctatgttggcaatacccccactcattattattccggtgtagagttggagactgctacttgtgccaataccgatgttgccgaagtgggctttgtgggacgtacattgctgaacgctttcaatgctttggagtatggcaaacagcagaaccgccaagacctggtggacaatgccaaccatatctttgacacttatctccagaacggtttttcgcctgccggtttcttcaacgaagtggtacactacaaccgcggcttcaaggaaaccagacatagcatccgccgtcagtccgagggagtgtatgccatcttgaactatttgaactacgagaaacagcagaagcgtaaacaccccgaatgggagaaacgcatcaagggcatgctggacagcttcctcaagttgcagaacgaggacggcagcttcccgcgcaagttcaaggatgatttctctgtcgtggatgccagcggtggtagcacgccttcggcaacattgcctttggtgatggcgtccaagtatttcaaagacaagcgttatctggcaagcgccaagcgtacggtagactatctggagaaggaattgatatccaaagccgattatttctcttctacgctggatgccaactgcgaggacaaggaagcctccttgtatgctgctacggctgcttattacctggctttggttaccaaaggagaagagcgtgcacactatgccggtctggcaaagaaagccgcttattttgccttgtcatggtattatacttgggatgttccttttgccgaaggtcagatgctgggagatatcggcttgaaaacccgtggttggggaaatgtgtcggtagagaataaccatatcgatgtatttatcttcgaatttgccgatgtgctgcattggctctccaaggagtacaacgagccgcgcttctctgactttgccgaggtgatatccacttccatgcgccagttactgccgtatgaagggcacatgtgtggcattgccaaagtaggctattacccggaagtggtgcagcataccaattgggattacggacgtaacggaaagggatattacaacaatatcttcgctccgggctggacggttgcttctttgtgggagttgttcactccgggacgtgcggagcagttcttgttgaaaaaatgatagtctaaacagtaaccaatattgtatttatgaataagatgatgactttgttggcaagcgtgatgctattggcatcggcttgcacgggcaaacaggcgagtgaaaagactgcttctggactggaacctgcgaacttccgtacggaagtggatggcaagcagacagacttgtttgttttggagaataagaatggtatggaagtttgtattacgaatttcggtggacgtattgtatcagtgatggtgccggacaaggatggcgttatgcgtgatgtggtgctgggcttcgattccattcaggactacatcaagttcccttcggatttcggcgctaccatcggacgttatgccaaccgaatcaaccagggtaagattacggtggatggggtagagtatcagctgccgcgcaacaattacggtcattgcctgcatggaggtcccaagggataccaatatcaagtgttcgatgcccgccagttgagtaatcaggttttagaactgacttatctgtcgaaagacggagaggagggtttcccgggtaacctgacctgcaaggtcactttctcgctgacagatgacgatgccatcgacattcgttacagtgccgaaacagaccgtaccactgtcatcaacatgacgaaccactcttacttcaatctggatggcgatccctccaagtccaattcggattatctgcttaccatcgatgcagatgcctatactcccgtggacagtaccttcatgactaccggtgagatagcttccgtagaaggtacggatatggatttccgcactcctacagccattggcgcccgcattgacaatgactttgagcaattgaagaacggcaagggctatgaccataactgggtactcaatacgaagggtgacatcacccgtccgtgtgccaccctcgaatctccctcaacgggtattgtgcttgatgtctataccaacgaaccgggcattcagatttatgccggtaacttcctggatggcacactgaccggaaagaaaggtatcgtgtacggtcatcgtgcgtccgtctgtttggagacgcagaaatatcccgatacgcccaacaagccggaatggccttcggcgttgctgaagccgggagaaaagtatgacagtcattgcatctatcgcttttcggtgaagaaataaatataaggcaggcgtagcctgccttatatttataataatctcttttgttaactttaaaaattaatgcgtatgaaaaagtatttattgtatgcttggattgtatcagcattttgttcatgcagtgagaatagcatggaaccccttcctatagaagtggatgctgattgtgtagacattgtaaatgatgaaagctttgtgccggttagtcaagccacagaggtggccggcttgtttttagctgctaatggtaaagatgcggtgacaacaagaaatggctctattgagccagatgccttttctggtaaaacagtaaaagatattaagacggtttacggtgaagacaatacgccttctatgtatataataaattatgaaggcggtggttttgttatagtaggtgctaccaagaattactatccgattctggcatattcagatactaactctatcaatatagaaaaagctaagcagagtggcttttctatttggatggatgaaacaaattgggctattaaggaaagcgatatgcaaaatgccgagactttggcaaatatgcgctctatgtgggaggcttacgaaatactgcctgccacaacacgtgatgctacttctgatcattatagtgatgggacaatgtttcgtgaaaggttaggcgaattgtatactttgtgtccgggatattcgtttggtcctttaagttctgcaagatcttttctctcacaatcagattatgaaagtcttgtagaaaaggctaatttttatggttctcctcttgagtttacaatagtaggatataatagtaataacagaaaagttgggcctttgatgaatacaaaatgggggcaggagggaggatatagtgcattatgtccgaatgaatatcctgctggctgtgttgccattgctatggctcagattgagaagtatcatgaatggcctcaatcctttgactggagcggtatggctaatgatagaccgacttctgcatctcaatctctaatagcgatgattggtaaagccgtgaatatggaatatggtaaagacgaatctggagcttccttaggtgatgccaaaagaggttttgaggcaatggggtatgcagtatctaaaaaggatcatgacatgtgggatgtagaaagtgaaatctattttagaggacgtcctgtatatatgacaggtgacaggaaaaattttatcggaataacttggaaagggcatgcatgggtttgtgatggtgcggaagaatatggaagttcctatagctattttgtggagtatcttgtaaaccgttctacaaatccaagttattcaagttgtggattccctaattatatgaatcccactactacttcttttggttctggtcgcatatattttcatatgaactgggggtggtatggcactggtaatggctggtttagtggaaataatgtgaatcctacagatgataggaactatcaatacgacagagaaaatctgtatgtttcacccttaaaatgacgcattatgagaagagtatatatctattcattgttattgtttgcaatatgctttgccggttgtgaacataaattggactcttacccgcctcatctctatagatactatttagcattcatagataaatcgggtaatgatttgcttgcagatgtaccatttgaaataaacagcgagagggattctgttttattacgcggaacttatacttttgagtttatcaaatcaacggaagatgattattttgataccaaatcattaatattaggaaaggtaagtggctatcaatcgctacgcattgatgtctgcatggaagactggtatgggcataagaagccggaagtccttactcataaacttgcctgtaagcatatattcggtgatgagaaagtacatacgattgtttcttattggaagtttgatactgattatcgggaggcagaacttatccgtcttacaatagatgatgtggagagtccgatttttgaaggttttgacaaattttatcctcaagttcttgttagcttagataaatagagagtatcttatgttttttatatggacgatataatggttggtatacagcttatgatgttagttctacagaagatagatttatcaatatgatagagtaagtttgtatgtttcacttcagaaaatgtattacgagaaattttagatttttgttattggctactttattccctttgattttcatgggttgcaaaagtgaggaagactcttatcctcctattcattatggatacaatttagcatttgtcgatgaaaatggcaatgatttgattgagggaatgcaaaccggtcttggaagaaatggtaagcctgctttgagagagaaagattactcctataaattggtagaacccgattctaaagatgactttaccggaccggactgtatctatgtggaaagcagggacggactttttactttggcaatctttgatgcactatgggatggatataaatatgacaagaagcctgaagtattgaggcgtacgtttgtttgtccctatatctttggtgacggagaggaacattctattatttcccattggaagtataatgatggttatggcagtgttgaacttattagagtaactatagatggtgtggatgcccgcatcgaattaggagcagacaaatatcacccgttagttgtcgttgtgttggcaaagtaacttgtttttcttaaatactctgtcttggtaaaatcagcactttatcaagacagagtttttattctttggaattaccgcatcgccagcgccttattctccgcctcctccataatctcccgttctcccggccctttgtcattgatgccgcaaaggtggaggatgccgtggatgatgacccggtacagttcacgttcgtagttgttatcggcgaactgttccgcattggtgcgtacggtatcgaggctgatgaagaggtcaccgctaaggcggttgccttcacagtagtcgaaagtgatgatatctgtgtaataatcgtgttgcagatattggcggttcacttcgagtatcttctcgtccgagcagaagatgtaggcgatttcaccgactctttttccgtaagtggcggctacggattttatccattccgtggttttacgcttcttgatggatggcatttccacgccgtctgtctgataactaatcattttatttacaattttacgatttacgattgaaattacattcctgtgattaagacagtttctttagaagaagaacatataactgataataatcgctgcaatgatgccggaaaaatcggcaatcagcccacacgtcacggcattcctcgttttggtgatacctacgctgccgaaatacacagcaagaatatagaatgtggtgtccgaagcgccacgtgccacgcaactcatgcgtcctacaaatgaatcggcgccatactgtttcatggtgtcaatcatcagtccgttggcaccgctgccgctcagtgacttcatcaaggcagtgggcagggcacctacaaaactggtgtctacaccgaatagtcctaccacataaccgataccgttcaccagtatgtccatggcaccggaagtgcggaaaacggcgattccaacgagaaaagcaaccagataggggatgatgcgtacggcggtggtgaagccttctttggccccttcgatgaaggcatcgtatacatttatctttttccatagcccccagaggatgaacagcaggatgatggagaacagcagtatgttggcaatcaaagtggaatatacgcccatttcatcgcggctaatctgtgtgaacaggtagacaagcgcggcaaagaaaagactgatgcagccaatcaggataagtatgggcttgttcaacaggttgatgcgctgtgcaatgctgacggcaatgacaccgacaatggtcgagatggcggtcgttatcagtgtggggataaagatgtccgtgggttgggcggcacccatctgcgagcgatacatcatgatgctgacggggataagtatcagtcccgaggtgttgaggacaaggaacattaccatcggattggtggcagtatcctttttcgggtttagttcctgaagttccttcatggctttcagccccattggggtagcggcattgtccagccccagcatgttggcagagagattcatgaatatggaacccatggcaggatgtcctttcggtatttcgggaaagagacggcagaataccggactcagccaacgggagagggcattgatcatgccgctgttttcgcctattttcatcacgccgagccagagggcgagtattcccgtcagtcccagggatatttcaaaagctgttttggaagaggagaaggtggagttgacgagttctgtgaatatctccacatcacccataaagatgagtttgcagagggctacgatgaatgcgatgacgaagaaagctacccagatgtaatttaaaaccatgtatcgttactttgtttctagtggattaatatttgttttcgttggcaagattccaggcgttgaggaaagctgctttggttatttctatcattttttcccagttcagccggtcggtgtggtccgaaggctggtgataatcgggatgtccgtctgtgtggtaccagatgatggggatgttgcacagggcaaaagaagcattgtcacttcctcccgtggggcggtcccaggcgcggtagtccggttgcaggcgcaagctgtagcgtgcaatgtcctgcttcagccagtcgccgaatacggggtgggcggcggtgtagaagtagacaacgtgttgaggctgctcgggcttattgttacggcctatcatgtcgaaattgagataacctttcacctggctgatgaaaggacagctttgtacaaagtattttgagccgagcaatcccttttcttccccatcccaaaaggcaaagatgaccgtgcgcagaggcttctgtccggtggcaagaaatgcacgagctatctgcaggacggcagagacaccggaggcattgtcgtctgcaccgttgtatatccggtcgtttgccagcgtctcgtccacacccagatggtcgaagtgggcacctacgatgacatattcatccggtcgttctcccgggatggttcccaatacattactcatctgcaggatgcggtggacgccttgtttaaggatggcgatggagtcgggatgcacttgccaccgtccccgttgttggcgttccttgttgtaagcctcgaaggattggtaataactgtccttttccagcggggcaatgccggcttctttcaggcaggatgccagatagcgggcagccagtcgtgaaccgtgcatgcctgcttcgcgtccttgcagctcatcgtcggccagaaagccgacaatagccttggccgaagtgcggctgatgctttgcaaccccttttcttgtggagattgtgcatgtaaggatagtgcgaaagaaaggcagcagattgctcccaaaacagctttatacatgtcgtacggttttaaggattggacataccggttgcaaaattaaagataactttccatagtttctatataaatgttgtatttttgtccattggtggatgaattcaaatccgtgtaaatcaaatgagagaaggatgaaaaagaagaatgaagcagtggaaaccgtcttgtgcgaacgtgtgctttcggcagaagaagtggcgtgcatctcggtacagattcagcaggaattggaggcgtatatcgacccggtgaaaagggagtatcttccccgtttcttcaagaccggaaaggggcagtatggcgagggggataagtttctgggagtggtggtacccaacacccggcaggtggcaaagcagcacaagcacgaaccttttggggtaatggcaaccttgcttcagagtgaatggcacgagtgtcgcctttgtgccttgctgatgttggtggagcgattcaaaaagagcgatgaaaaggggaaaaaggagatttatgacttttacctttcgcaaacgggccgtatcaataattgggatttggtcgatttgtctgcccccggcattgtgggcgaatatttgaaagacaaacttcgtaaagacctctaccggctggcggatagtccgctgctttgggaccagcgcattgctgtggtatctacctatacacttatcaaaaatggtgatttcatcgatatattagccctttcggagcggctgctccatcataagcatgacttgatgcaaaaggcggtaggatggatgctccgggagatgggtaagcgggacaaggacttgctggtacaattcttggagaagtattgcaggacgatgccgcgaacgatgttgcgctatgccatagagaagtttccagaggaggagcgcaaggagtttatgaagcgctgatggggaatgaaaatcgttaaactgtattttgctcttcttgccaacaagttgacaagtttttgccaccttattggcaagactttgccaccgcgttggcaaacttttgccataggcatggcaaagttttgccaaaggtgaggcaaagagttggcaaaattagtctctgatggtcagtgtgttaccaaaggtagccttctgcgtaactatcaaattctgtagccatgccggcatccagatgtctgaagacgttcagtacggattgttgctcttcggggagcagcaggcgttcgcctttgcgggcgcggtagtaggtgcgctggccgaagccggctatcaggttggcgatggcgattccccgcttgttgtagggtaggctgttcagcatgttcatgaagcctttggcgtagcgcgccttctgactggagcggtagaaggggcattcccctttgacggtggcaaggcgtttggggctgatgattttccagtaatctttttcggtaggcatgctctgcatggcgagctggcggaggcaggtggcagccttgggacattgttcgttgaggcacaaggggtagtcgaaggggacttgggtaaaggatatttcttctttcataagtagcgtgttctatgcattgtgctttcagcaggggtagatttggttgctgtcagtaaatggctggttattttacacaaaggtatataaaaaaacagattttttacgcccggtaaataagaaagtcaagaccgcgactatctttgtggtaaaaacgaggtcatagggtttccccatcctcatatgtccaacgggcttgatgtcccaataaaaaaatacttctatgaaggtagtctgcggtcttgacgtacacaaagatagtgttttttgctgtattctgtgtgctaatggagaaaaaatccagcataaattcggagttcttaccgaagagttggtcacacttcgcgaccttatggtctctgaaggtgttgaagagtgtgcaatggagagtaccagtatctactggatacccatatggcgagtgcttgaagggtcagtgaaacttcatctggtaaacccttattttataaaacagcttcctggcaaaaagagtgatgtgaatgatgccgaatggatagctacttgtctgagtaaagaactgatagcatcaagctttgttcctgatgataaaattcaacgtctgcgtcaatatgacagaaggatatttgacctgaatgtttccataagccgcaatttagtcaaacttgaccaatgcatccagaggtgcaacatcagaatcagtaattatatatccacaacagattccaaagggtaccgttcaatagttaaacttatatcccaaggtgtgacagatgcggaagtccttgtgaaggaactgcatggaagaacaatcaacaggcatggcagagaaacattggtgaaagcacttaccggagttgtcagcgagaccgacatagacattataaaccagcttgtagaagagattgaattgcagcaacgacacaaggacgaagcacaggaaaagatgactgcactatgcatggagtggtttcctcaagaagttgaaaaccttcagactataccgggagtgaaagaacgtagttcgacctcaataatagcagaaataggaacagacatgacacatttccagacaccaaagaaattggtgtcatgggtggggctaagaccccgtaacgaggaaagcgctggcaaaatcaaggcacgaggtatcacacatggtaacaggtttgtaagaaaaaccatgattgaatgttcatggggagctgcacgtatgaaagattcatttttcgcagaattctcatacaggcaatgtatcgaaagaagaaagaacaagatgaaggtgcaagtagctattgcgagaaaaatacttgttgcagtatggtatgtacttagtcagggaactcagtatatcaaaccaacagatcattatacggcaaccgatatgactgccgtataatgatacaaccgtccgttacaaggtcaatatatttgtggtgattatatcccgttttcgcaaagtggctatcgtttcggacggagtaggacacccggttgagttttaatctcgaagaggaaatgtacataattgttcattgttccgactataatcggaactgaaccgtcatgcagtagtgcaaggaaaaaagatgtagaaaggaatagacactcgtttccactcacaaagatagtcgcggtcttgcttttcatagaggaaatgtaggaagaaagtgtgaacctgcaaatatatttcaagtatatatcttgctacttctatcgttttttctgtaatttgcctccgggcagcataatattccgttgtatggagcgtaccaggtatgtcatacgccttttacttatgtgaaaaaagaaaggggatgagtgctatctcaaaataaattcgttattttgcaggaaacaaaaggaatatccctatgattacttatcttaaaataaatggttttaagtcatttcataattttgaaatggagtttacccctttgaccattgttgcaggaacaaatgctgctgggaagagtaacttgtttgatgcattgaatctgttgtcacgcttggctgaagtggacaaaatacatacagcattcagagaagggcaaagaggtgatttgtttgaactattcactcagtatgatgaacatgcttatgccgatgaaatggagttttgtgtggaagtgctggtaaatcgtgaagtgactgatgcttggggagctactgcaagattgaaatatacgaggttgcgttatgaactaaaaatacatcgctttgtaaactccagtggtattgatgatttagaagttgtttatgaacatttggctacattgaaacatcaagaagacaaatggataaaacttttgcctaaagaacaaatagaattttggagacctaaagtaattacagggaaacgtggtcaaccttatatctatacacaagagcaaaatgaattgcctacggtatttgttcctcaagatggtggtggaggtaacaagcgaagttttcccctgagaaatgctacgcgtacggtattgagcagcattgattctgttgatttccgccatattctggccgtgaagcaggaaatgatcagttggcgtttcttacagttgaacccggaggatttacgtcaacccacaagtaagaggacgggagaagatgtcattggtgtttctgggaaaaacctggctgcagcattatttaggattcagcaggaagataaatattcattggtagagatatctcgtgaattaaatagttttattcccaactatacccaggtctttgtagaagatgatacagaaaacaagcagtatatcatttatctgaagaatgtggacggaaagaaatactcttcccgcgtgttgtccgagggtacgttgcgattgcttacgctttgcatcctgcaacacgatatgaaatactccggtttgctttgttttgaagaaccggagaatggcattcacccatttaggataaaatcaatggcgaaattattgaaggatttgaccactaactttgaagaccatgatctacctttaagacaagtgattgtgaatacgcattctaccgtttttgtcggtgaaattcagaaatgggaagatgatttgaatgtttccatccattttgcggagatgaaatcaagagtgctttctttgccatcgggcaataaggtgaaactcgatgtttcgaaaattatacaagttcctaaagaagggcaattgactatcaatttctctgagcaagaacgaaagctttctttgcaaatgattaaggagtacttagaaaataccctaaaggagtggtaatatggctagacaattatttattggattaatcacggaaggccctacggatgtacgtttcttgcagagtgtggtggaaaggacttttattgatgtggcttttgaatgcgagaatgatttagaaccatacgtgaaatgcttgactgtggaaaaagtgcgacttagttttaatgaatatgtagagaaagcttcacgtcgaggaatggaagagatgggtatggatatactttgtgtccatacagatgctgatagtaaggatactaaaagagcctatgctgaaaagataaatccggccaaagagttcttgtctgataagaaaggggagatttgcaagagtctgattcctattgttccagtgaggatggtagaagcatggatgcttgctgacaaagaactattaaaagaggaaatgggtacaaggatgtcggatgaagaattgggtataaatcgtatgccggaactttatcttgatcctaaggctaccattatacaagccataggtaaatctaatcggactacgacacgtaggcataggaaggatttggatattagtgaactatatgcttccattggtgcgaggttggaattggaaaagttgcatctgcttccttcatataggcaatttgtggatgaggtcagagaagcctacagacagttgggattgttacggtaatgtggaaaaatcaataggaaataaagcagtgtttggaacatgatagatagtatggaacaagaagattttgatatacgcaaccagcagcccgtcaccagccgagaacgtgatttcgagaacgctctccgtccgttgaattttgaggatttcagcgggcaggacaaggtggtggacaatctgcgcatatttgtgaaagctgcccgcctgcgtggcgaggcgctggaccatgtgttgcttcacggccctcccggattgggaaaaacaacactcagcaatatcatagccaacgaactgggcgtaggtttcaagataacttccggtccggtactcgacaagccgggggatttggcgggagtgcttaccagcctggagcccaatgatgtacttttcatcgacgaaatacaccggttaagccccgtagtggaggaatatctgtactcagccatggaggactaccgcatagacatcatgatagacaaaggcccttctgcccgaagcatacagattgatttgaatcctttcacgctggtgggagctaccacgcgtagcggtctgttgacagctccgttgcgtgcccgtttcggtatcaacctgcatctggaatattacgatgatgatgtgttgagcggcattatccgtcgttcgtccggcatcctcgatgtgccttgctccgtaagggctgccgccgagattgcgagccgcagccgtggcacaccgcgtattgccaatgcattgctgcggcgtgtacgcgattttgcccaggtgaaaggttcggggagcattgacacggaaatcgcacagtttgcccttgaggccctgaatatcgacaaatacggtctggatgagatagataataagatactctgcaccatcattgacaagttcaaaggcggcccggtgggactgaccaccattgccaccgctttgggcgaagatgccggcacgatagaggaagtctatgaaccgttcttgataaaagagggtttcctgaaacgtaccccccgtgggcgtgaagtgacggagcttgcctacaagcatttggggcggagtctctatagtagccagcgtaccttgtttggcgacgagtgattcattaatcactaaccattaatcattaatcattaaaaagaagtggccggattaaaatcattggcaaaagaaactgccatttatgggctgagcagtattgtggggcgtttcctcaattacctgctggtgcccgtatataccatggcgatgtccgcacagagtggcggctatggcgtagtgacgaatgtatatgcgtgggtggccctcatgctggtattattgacgtgcggcatggaaaccggtttcttccgctttgccaataaaggggaggatgacccgatgcgtgtgtactccacgacattactcagtgtgagtatgggggcgcttactttccttgcattggggctgctgtttctcgaccctattgccggatggatggagtacagtgagcatccctggtacgtgggcatgatgatgattgtggtggcgatggatgctattcaaagcattcctttcgcttatttgcgctacaagaagcgtcccattaagtttgcggcactcaaactgctgtttatcttcctgaatatagcactgaatctggtctattatgtagggatgaaaggggatgacgtgggctatgccttccttttcaatctgatatgcacctctaccattatgctttgcatgattccggagttacgcgggtttgcttatgtgctggataaaaaactgttgaagcggatgcttgcttacagtctgccgttactggtacttggcttggcgggtatcttgaatcaggtggccgataagattatttttccttttgtctatccggatgaggcggaagctaccgtgcagttgggcatttatggagctgccagcaaaattgctatggtgatggcgatgcttacacaagctttccgctatgcatacgagccttttgtcttcggaaagagccgggacaaagacaataagcaggtatatgcgcaggccatgaagtttttcatcatctttacactgctggcattcctggctgtcatgttctatctggatattttgcgctatatcatcggccctgattactggccgggattgcgggtagtgcctatcgtgatggctgccgaaatctttatgggtatctatttcaatctttccttctggtacaagctaattgacgaaacgcgttggggagcttatttctccttgataggttgcacggtgctggtagtgatgaacatacttctgattccccgatacagttatatggcttgtgcctgggcaggattctgtggctatggtatcgccatgcttctgtcctatttcgtagggcagaagaagtatcccattcagtatgacctgaaggctatcggtagttatgtgctgcttgcggcagtactctatctggctgccgaatatgtcccgatagaaaatatctacctgcgtatggtgtaccgtaccgttttgttgctggtctttgtggcctatatcgtgcggcgtgatatgcctctcggcagcatacccgtcatcagctggttgataaagaaataaactactgaatagtaaatcgtcaaattgtaaatatcatggattctgacaacagaaataccttcgctatcaagacttttctgaaagactatcttgatttgcgtaaagacaaggacaatgaactggaaactgtagattccatccgtaagggagtggaattcaaaggagccaatctttggattctgatattcgccatattcatggcctcgttgggattgaatgtaaactccacagccgtgattatcggtgccatgctcatctcgccgctgatggggcctatcatgggtgtggggctttctgtggggttgaatgattttgaattgatgaagcggtctttgaagagcttcttgataactaccttgttcagtgtgaccactgctaccattttctttctggtgagtcccgttgccgaggggcagtcggaattgctggcacgtacgtcacccaccatttatgacgtattcatcgccttgatgggtggcttggcaggtgtgacggcgctctctaccaaagagaaaggaaatgtgattccgggtgttgccattgccacggctttgatgccgcctctctgtacggcaggctacgggctggcaacgggtaacttgatttatttcctcggtgcattctatctttatttcatcaattccgtgtttatcagtcttgccactttcctgggcgtgcgcgtgatgcacttccagcgcaaggagtttgtggataagaaccgggagaagaaagtacgtaaatatatcgtcctaattgctatcttgaccatgtgtcccgctgtctatctgacggtaggtatcgtccaggataccttctttgagagtgctgccaaccgttttgtcaacgagcagctctcctttgagaatacgcaggtgctggacaagaaaatccatcacgagggcaagggccacgaaatacgtgtcgtgctgattgggcaggaggtgcccgaagcttccatcgccattgcccgcagtaagatgaaagactataagctggacaataccaagctgatagtcctccaaggcatgaacaatgaagcggtggatatttcttccatccgtgccatggtgatggaagacttctacaagaacagcgagcagcgtctggtggaacagaaacagaagattgccacactggagcagaatttggaaagatacaaaaccttcgatgaattgggcaagaagattatcccggaactgaaagtgctctacccgtcggtaaagaccgtatcaatatctcatgcgattgaactggcggtagattctgtacgggtggatactgtgacccttgccgtcttgaaattcggcaagcatccgggtgcgcacgagaaggaaaagattgcggagtggctcaaggcgcgtacgggtgccaagcaattgaggctgattactgaataatacaagaattgacggaatgaaaataagatttatactgatagctgtctgcttccttttttctctgccgggacaagcggatgaagggatgtggatgctgggaaatctgaacaagcagacacgccagaccatgaaagagttgggcttgcagatgtctgtcaacaagctatacaatacgaaacgcccgtcgctgaaggatgcggtagtcagcttcggaggcttttgttccggagtggtggtgtccggggatgggctggtgtttaccaatcatcactgcggcttcagcagcatacagcaacactcgtctgtggagcacgactatctgaaagacggatttgtggcacgtaatcttagtgaagaactgcctaatccggaactttacgtccgcttcctcttgcaccagcaagacgtgacccgtcgggtacttggagcagtaaaaccggatatgaacgaatctgagcgtacaagtgtagtagattcggtgatgctggtcattggcgaagaggtttctcgtaaagactccacgctgataggcattgtggatgcttactatggaggcaatgaattctggctttccgtttatcgcgactacaatgatgtgcgtttggtatttgcacccccttcttcagtgggcaagttcggctgggacactgacaactgggtatggccgcgccatacgggtgacttcgccgtattccgtatctatgccggcaaagacaaccgtcctgccgactattctcccgacaatgttccctaccatcccgaatacgtggctccgatatctctggacggttatcgtgagggttccttctgtatgacgatgggctatccgggcagtacggaacgctatctttcctcttttggcatcgaagagatgatgaccaccaccaaccaggctcagatagatgtccgtggtgtgaagcaggccatctggaagcgtgaaatggatagccgtgacagcatccgcatcaagtacgcttccaaatacgacgaaagttccaattattggaagaacagcataggagtgaaccgcaccatcaagaaactgcatgtgctggacaagaagcgtgccatggagaccgaactccgtcgctggatacagcagacaccggaggagcgggaacatctgctgcatcttttttccgacctggagctgaactacaagagccgccgtgatgcttatcgtgccagagcttactttgccgaatctttcctgaacggtccggaactggtgcagcttgctttgtccatcctcaacttcgactttgagggggaagagaaaacggtggttgccaatctgaaagctatcgttgagaaatatgccaatctggacttgggcattgacaaggaagtgtttacagcactgttgaaagaataccgctcccaagtggattccacctatctgcccgagctctaccagacgattgcgacagaatacggaggtaacgagcgtacctatgtggatagtctttatgcccgctcggagctgaccaccccccgtggattgaagcgttttctggagcaggacaccacctatcagatatataatgaccctgccatcaacttgggcatcgacctcatcacgaagctatttgagatgaatatgcaggtacagcaggcttccggtgaaatcgagcggaatgaacgtttgttcaactctgccgtgcgacgtatgtacgcatcccgtaacttctatcccgacgccaactccaccatgcgtttgagttttggcactgtctgcggttatgcccccttcgacggagcggaatatgattattataccaccgcgaaaggtattctggagaaagtcagagcccatgcaggcgatgtggattttgaagtgcagcctgagttgctatcccttctttcctccggtgatttcggtagatatgccgatgagaagggagaaatgaatgtctgctttatctccaataatgacattacgggaggcaattccggcagtgccatgttcaatgccaaaggagaacttctggggcttgccttcgatgggaactgggaagccatgagcagcgacatcctttatgagccgaagatgcagcgcaccatcggggtagatgtacgctacatactgtttatgattgagaagtatgggaaggcaggaaatctgattcaggaactgaagcttgccaatccttaacgtgtgccccctgcctatacttttatgggtgatattttctaaatcactccacggatacggtcatcgaatgccgagagtgctgcctttgccccttcgcccatggcaatgactatctgcttgtagggaacattcgatacatcccctgccgcatatacccccggaagtgtggtacggcagaaagcgtcaatcttaatctccccggtcggagtcgtttccagcttgttgcggaaaggagcgctgttggctgccaaaccgatttgcacgaagatgccgtctaacgggaagtcgcgttcctcgccggtaaggcggtccttgatgcggatagaagttactttttccccgtttccatcgacttttacggtctgtgacgaggtgaagatttccacattcggcaggctccgggctttctcttgcagcacttggtcggctttcagtgtatcggcaaattcgaataccgttaccttccggcagatgcctgccaggtcgatggcagcttcaatccccgagttacctccaccgataaccgccacatgcttgccttgatagaacggaccgtcgcaatgcggacagaatgccacgccgcgtcctatgtattccgcttcgccctccacattcagtttgcgccagcttgcccctgtggcaatgattaccgccggtgcatggaacacctcgccgcctacggtggagacacttttttccgttccctgcaactttactttctctatcttacgctcctcgaaaatctctatcggatagtgctctatatgtgtgcggagtgcgttggcaagttctgcaccagtagtctgcggcacggagataaggttttctatgcctaccgtctcctttacctgtccgcctatgcgctcggcaacaatcgccacccgtaggcccttgcgtgcagagtagatggctgcggaagctccggctggtccaccgcccaataccagcacgtcgaaatctctctctatcggtgcttcgtcctcttgcggagcactgccgaaggcttcttccagcttctgcaaaagctctcctaaagaaccgcgacctacgtgaagcagcttgccattagcgtagactgacggcacggcttgtatcttcagcgcatccacttcctcttgattaagcgccccgtccaccatctcgtgggtgacgtgcggattcagcaatgcgatgatgttcagtgcctgcaccacatccggacagttggtgcaagtaagcgatacatacgtttgcaggctgatgtcgccttgcaacgcccggatgcggcgacgaattgcttcgtccggcagatttttcccctttccatcggcattcagcacggcaagcaggagggaagtgaactcgtgtccgccggggatgccgcggaacttgatgccggtttccatatcgtctttcagcaatgtgaactccaacacggggttctctatctcactcatccggcaggagagcttgtcggaacagcttgccacatccttcaagaatccgataagctcttgtgcctgctcgtgacccggatgataggtgatgtgaaagacgtagcgggcttccaaatgctggaatacgctccgcacctggtctaatatagttgtttctaacatgattaatagggtgtttggggtgagaaaatagtcttttaatatgtttgatatagagtagctgcagaacttgtgaggaagtactccaatactccttcgaaagtactgcggtactcctttgaaagtactacagtacttctgtacaagtactgcggacgtcttaaaggaaagcggacgtctttctatggtgaaagcgcccgctcctcctattacttatcaaatctttcctacaaggtcgatgctcggcttcaaagtttccgctcctttcttccacttggcagggcagacttctccatcgtgtgtggcaacaaactgtgcagcttctaccttgcgcagcagctcgtcggcattgcgtccgatgttgttgtcctgtatctcggcaatcttgattttaccctcgggatttacgaggaatgtgccgcgatatgccatgccttcttcttcaatcatcacgccgaatgcgcggctcagcacgcctgtggggtcggcaagcatggggtacttaatcttgcggatgctttcggaagcatcgtgccatgccttgtgcacaaagtgcgagtctgtgcttacagaatatacttctacgcccattgcttggaattggtcatatttctctgcgatgtctaccagctcggtagggcatacgaaggtaaagtctgccggatagaagaagaaaatggcccatttaccttttacgtcttcgtgggatactgttttgaaacttccgttttggaaagcctgaaccttgaattcagggagttgtgagttgatgatcggttccataatttttctcttttaataggtttagttttttgttttaccaatgcgaagattgtgcagacagaatgtagaagccagtttgcttgatgatgctgaggtgcaaccgaccttcgctttttctgtttgcaaaaatatagcatttttccccgatagaacaaaaaatccgattgaaagattttatggagcgatagatgaaatctatacgactgcttgggttgctttcagtgagagcatttccttgggtacggaaagttttatctccttaaccagcacttcgagcagcgtgtggcggataaagttcttattggtcagcagcacgacctggcgggtggggcaggggatggcgaaggaacgtaccagctctttctgggcatcgcccagttgcagaacggccagttcggggatgaaggtcacgcctttgccgctttctaccatgcgcataaaggtctccatgctgcccaagtgataggcaagctggctggcacgtgccgacttcatctggcagaagcgcaccagctggtcacggaagcaatggccctcgtcgagcagccaaagctgttcgccgttcaggtcggaagtacggattacctcgttgttgaagagggcgtcttcgcgcgacacgtaggcaaagaactgttcatagaacaacggcgtctgctgcaactcttccatacctgccagactcgctacgatacctgcatctatttctcccgtctgcagggctttcttgatgtcgtttgttttcatttcgactacccggatgtcgaggtcggggtatttcttcatcagctgcggaaagaaacggggcaggaggtaaggagctacggtgggaagtatgcccagcttgaaggtgccggtcagtgagtgtttttcttcttctataatattctttatacggttggcttgaaccaatatattctgtgcttgttctatgatgtggataccgacgggagtggggcataccggctgctggctgcggtcaaaaatccgggtgtccagttcctcttccagtttctgaatcatggcactgagggtgggctgtgtcacgcggcaatattcggctgctttggcaaagtggcggaactggttgacggcaaggatgtattccaattgttgtaaagtcatgatgaacaaggcatttgaaggttatgtatagagttcgtctatgcaaagatagaaattatctgtttgacaagccttgatttaccccttatctttgcaatacccaaaagaaaaatagtataaatatttaaaacaatagaattatgaaaactttagattacttgcatttgaatgaaaagaaagtggctggcgtaacatcagcattgcaccaattattggccgacttccaggtacattacaccaatctgcgcggtatgcactggaacatcaagggacacggcttctttgtgctgcacgagaagttcgagagtatgtatgacgataccgccgagaagattgacgagattgcagagcgcatcttgatgctgggtggcgtgcccgagaataagttcagtgaatacctgaaggttgctaacgtgaaggaagtatccgatatctcttgcggcagtgaggctgtggaccatatcctcgagacttacggctacctgattggtgaagagagaaaggtaattgaactggcaaatgaagccggcgatgacgtgacggcagatttgatgaccggctacttgaaagagcaggagaaaatggtttggatgctcgttgcattcagtacgaaaagctgtacgaaataaaggataaagagttgtgaaaaaggatagggtgataaaacggtagcggatgctgccggttttatcaccctattatctttctatagtttatatcacttcttcttcggtgtccgtcttgcccacccttcttcactgaagtcgggctctgcatccttaaagtcattgttgccctggaagaactgtttccagtcatcctttttgccacgggctttggtgtaaccccgctcttcgcggctgggcttgcctttcttcttgtcgtttgcaggactttcggccttttcgctgcgtttgccggtggcatcgttccgtttgccgtcttccttgtagctgcgcttcttgctgtcaaactcttttttcccatagcttccggctgtacccggacgtttgcccctcggagcctccttaccctcgtctccggcaacctctacggatactttacggccgttccagctggcgcggttcagggccttcactacattggtggcttccttttcctccacttcgaagaaggagaacttctgcatcaggtcaattcgtcccagctctacacgtccacgtgtattgttgttcagcaggctgattaattcgttggggaagaagttgtccattttacccaggttgatgaacaagcgggtaaagccgggttctgctttgcggctgcttctacggtcgttgcggtcgcccctctcgccacttcttgcaccacgctcactaccggttgctgtctctatctcgtcacggccgcgatagtaatccaggaaacggttgaattcatgcgaaaccatgcgtttaatcaggtcctctttgctcagccagtccagcttgcggtagatgtcggtcataaagtcggcgatttcctcctcgttcactttcaccttttcaagatcgtctatcactttgagcagttgcttttcgcatatctgtttgccggtgggcatttcgcctgcaatgaatttcttgccgatgatgcgctcaatctcgcgcattttgcctttctctcgcaggttgatgatggcgatggaagtcccggttttgccggcacgtcccgtacggccgctgcggtgggtataactctcggtgtcatcgggcaatccgtagttgatgacgtgtgtcaggtcgtccacatcgaggccgcgtgcggcaacgtccgtggcaaccagcagttgtaggttgcggatgcggaacttctgcatcacggcgtcacgctgcgcctgactcagttcgccgtgcagcgagtcggcattatagccttcctgcatcaacttgtcagctatttcctgcgtttctttgcgggtacggcagaagatgatgccgtatatctgcggatagtagtccacaatacgtttcagggcagcatacttgtctttggcatgtacacagaaggctacgtgtttcacgttgctggtgctttcatttttgcgtccgatggtgatttccttggcatcgcgcaggtacttcttggagatgcgtgcgatttccgggctcatggtagcggagaacagcaaggtgttgcgctcctgcggcacatcggcgagaatggcgttgatgctgtctgtgaatcccatgttcagcatttcgtccgcttcgtccataaccacgttctgtatggtggcgagggacacggttttgcgttccatcaggtccagcagtcgtcccggtgtggctacgatgatgtgtacaccccgtttcagggcgcgtatctggctttcgatggacgagcctccatatacgggcaacactcgcaagccatcggtatatttagaataatcgttcaagtcgcctgctatctgcaaacaaagttcgcgggtggggcagagaataagtgattggggaattcggttgttgacgttaatcttctgtatgagcggcaggccgaacgctgcggtctttcctgttcctgtttgtgccagtgctactacatcattgttttctcctaaaaggtagggaattacttcctcttgtaccggcatgggctgctcgtaacccatttcttcgatggcgcggcgtatctccggcgacacaccgagctcttcaaatgtcttcattaaatcttctgtatatctttatctttatatttcgggcgcaaagatagtgcttttcaatggataattgataattgatggttgataattatgcaattacatgataaaatcgttttttattggctactcattatccattatccattgtcaattatccgttaaaagaatgtcttgcagtctctttctttcttcttttgtcagaccgatgcctctttgcaggtaggtgtcggtatctccataccttcgttccatttcttcgatggcggcattcaggaaatcctcgcgtgccgagaagagggtggtgatggcctcttgcgagcgtgccggaagctggtaggcgtatcgggaggccgccgggatgttgaagtagtcgttgctgaggcggtagtcttccatgatgatgtcttcgtccactccaagggaggcaagcacaagtgccgatacgatgcctgtgcgccctttgcccgacgagcaatggataacgacgggataattgttcttgtccagcagaatatcgaaaatccggcggtattctttggtgtagttgctgatgagctcgcggttcatctgctccacgattcggtagacagtatcgctcttgattttctgttcctgtacacctttcaggatatactccatgtcgccggtaggaatggggatatggatcactttgaatgcctgttgcaaagggctttgtctattcgcttcgacagatgaacgcaggtcgatgatagtccttatgcctatgttcttgagctctttgcgcgaacacggtttcagtttatctatttcggcagagcggtacagcatgccccaatgcactttcttttgggtgggataggaggaatagcctcccaggtctcggaagttctgtatgccggggatgttgatgttgcgggtggcaatctttacccggtatttgtcagcgaatacaagtgtgtagtagtatcgttgtgtagggtcggtagtgatgacagtcatcttcaggtcggagatgttggcgacggcaacgggaacatcttcggggatatggttgggattggtcgaagcatataccttcacatttcctttgatgagaggggccatttcccattttacaatgcagttgcccacgttgttttcttcgcatacaacggaaatgtgaggggcagtgccattgcaggaagggagcagcactgccaaaacaagcaagttcaataagttcttatacataattcgtaacctctctgatgtcgttaatcacaaatatatgtaatttacccacagaaggtaacagcaatgccaagcttttatatttcttttttgaactttaaaaaaactgctatagattctttcgtgcataggcaggttggtttacaatgttacatcagcgaaccgggaggtggtaatggggggagtttcccttggggcttttgtctccatgacagcatgatgtaattgagttgttttcccacttctccgggtttaaagtgtatttgttctttcagttttacttcgatttccctatatacatgcagtggtactctggcgtatgggctaaaggtcgtgaaattgaaattcacttccattactttccccgtatccggactgagtagcatggttattgtgaactcacgctttccgagttcatctgccatggctttggtaaaagcttcgtccacaatgaagtctgcttgtttactcatggagctattgtattcaattacttttttttcattccagctaccgatgtatatttttcctgtggctttatatacaatatctttgtatgtcaacttgttctctttgttataaagagtcacaaactggctaccgtcatctacgtcacattgatacgtataaccatctacctcgaaagtggtggtttttttataaatgactgttccttcaagcgattcttctgttctgataggtttatcctgtgctacacaagggtagatgtatcctataagcagtgtaataagcaatagtcttttcattcgtcacaatttttagttgttaattttgtatgttgcttacattagcgaaccgggaggaggtaatggggggagtttcccttggggcttttgcatccatgccagcataatgtagttgagttgttttccttcctctatgggtttaaaatgaatttgttctttcagttttacttcgatttccctatatacatgtagtggcactttggcgtatggctcaaaggtgaaaaaattgaaattcacttccattacttctcccgtatttggactgagcaacatggttatcataagttccgttttcccaatttcatctgccatggctttggtgaatgcttggtctactatgaaatctgcttgctgactcatgaatctgtcatattcaattacattgctactccagctgccaatatatgtcttccccgtgtctttatacacaatcttttcgtatgtcagtttgttttctttgttataaagagtcacaaactggctaccgtcatctacgtcgcattggtacgtataaccatctacctcgaaagtggtggtctttttataaatgactgttccttcaagtgattcttctgttctgataggtttgtcctgtgctacacaagggtagatgtatcctataagcagtgtaataagcaatagtcttttcattcgtcacaatttttagttgttaattttatgttgggaaaaatattggtgatatccgaatactctttaaatggataattgtcgtatccttcctgacggaaagcattaacgacattattagatatataggtttcaaagatatccaagaatgaagttgtaacatgaccttgctgatttacatatttagtcaatgaagttgttgctcttaggcgttggctttttgcatatttatcttgttttttgtccgtccactccgcgctcctttgtaagaacaggtattgcgcatagtgcgcttctatctctctgttcatcatagaacttttgaacgatgatataggctcttgtgtggtttggaaaacatggaacatttcatgcagaaggttgtttgcttccaattcttccaatccgatgtgcaaggtatgctcttcccaattgtaggaataccctttgccgaaatcgaattccagattgattttgttgtttttgactttctctttcagttggctgtataggtctcctcccaaacagtcttccatgattcgggctgtcatgttttcggtgattacccataaaagcgagtcttggtcggcctctttcttgaatatatttcctgccggagtgcccgatgaagagccggaacctcctgaacttcctcctccaatccacacatcgccgcttcctcctccttcactgttccagttgctattatttataagggcatcatctacccaataggaatgactaacgcagttggtatagctgtattccagctggtctttaggtccggtatatacatcccagcattgggtgacggttattaccgaacgggtctgggcatgaggcttgaatgtgagtccttgcgcattctcttcgccaaatactagatagcttaacaagtcgaatatgaacacttggtcgctttctcttatgagttcgtcatcacgcttcaatggaaaaaacttcatccatccgtctttgatgtgcaacagccagatggcatcgatgcagtgtggcttgtcaaggcggtagaggggaacgaagatacaggtctcttctccagtcaatttataggtgaagttccagagaggaatgccgtatttcaacaggaaagaagcggtgaaatgcttttcttcttccactctgcgtagtgcggaaatcacggcttttagggtagagtcggtgtaggcaaagaagttttccggcttgaataacgcttgccgggtcaacgggacatcgtttgccgggaatcggggttgatagaaggattcttctgtttcgcaagaggcgagtattcctaaaagaatgcacaaggcaaggcagatgttttgccatttctgcttaggaggggttggagagtgctgtctgcttccttttgtattcatagcgcgaatgcttaaggtataaaggatagacaaataaagcaaaaaaaaagcagaaatgaaaggaaaagcgggagaattttgttaatccggaagctgttctaccacagattgcatggattttcaggccatgtaatctgtggtgaacacccttttgtaagggtgtctatggctggtattttcgtgcttctgcaaattcctttgaaacggagttgttgaaactcttgcatacctcggcggcaaactcaatgccgtattggataacttggtcccaagtagcctcgtccatggtatcgaggtcctcgtagcgtacattatgtttcagcagcccgaagatgatgcctgcgttgaagttgtctcctgcaccgatggtgctgaccgcctccagtggggggatggaatattccttggaaatcgtgccggtgcgcaatgaaacctgctccgcgccggctgtgcagaggaagttgcggcagtagaactttactttgtctttgtatatcttgtcggcctcctgcaggccccacatatagaagaaatcctcttgcgagccgcgtacaatgttggcgtattccagattctcgatgatggtgggagccagcttgatggcctcctctttatgggacgaacggaaattgggatcgtagtagataatggcatgcatgtcgtgtgcgcgttccagtagctccaccactttgtcgcgcagtaccggattcagggcatagtacgaccctatgattacgatgtcgtcttcctgaatctgcggatattccacgtccaggcgctgcttgggataatctttgtagaagatgtattccgcatcgctccggttgttcaggaaagcgagtgatacgggggacttcccgtcggggaacacattgacatggtctgtgggaatattgttctcgcgcatgaagttgaggatgatattgcccacgtggtcgttgcccgtttcactgataaagcagatgggaacaccgatacgtcccagtgaaacgatgccgttgaataccgaaccgcccggaacggctgctgtgggctgttcgccacggaatatgatgtccagtatggtttctccgatgcctattactttacgcatagcgatcttgatttttctccgaggtaaccaccgtgatggcgcttggagtagtcttcaatggtgaatcctgtttctttcatggtctgtaccaccaggatgtcgccgatgacggtcatggcagtggtcgaagtcgtgggcgtcatgcccaatacgcatacttcttggggttttccggtgctaaggcatacatcggattcgtgtgccagggggctgtcggggtttccggtgatgacgataaacttcagttctgggttcaggttatgtgccagctgtgtcagctccacgatttcgcgagttttgcccgaattggagatgagcagcaacaagtcattctcctggaggatgccgaggtcaccatgctgtgcttcgctggggtgcaggaaaacggacggaataccggtagagcagaaggtggtagcgatgttcatggctatctgtcctgccttgcccatacccgaagttaccagtttcccttttttgcggtgcacttgttctacgatgagttctacagctctttcataagcgtccgtcactggaatgttcagtacggcctgtgcctctttctgcaaaagctcttgaatggatgcaatcatacttaatgtgctaatttgattaatgtgcttaaaattatagcaattgcaaatatctgcaattttctataaacggcaataagttttattgtatttttgtcgcctcaaatagtttgaaacgtcagaatgaagaacttaaaagaaaatttactgccaactttcaatcaatatactctgcccaatggcatgcgcatcattcacgaaccctcagcctccaaagtggcttattgtggttttgccgtagatgcgggtacgcgcgacgagcttgaaaacgagcagggtatggcgcattttgtggagcaccttatatttaaaggtaccgccaagcgcaaggcatggcacattctgaaccgcatggagaatgtgggcggtgacctcaacgcttacaccaacaaggaagagacggtgatttactctgctttcctgaccgagcatttcggccgtgccttcgaacttctggtggatattgtattccactccacctttccgcaacgcgagatagagaaggagacagaggtgattatcgacgagatacaatcctacgaagacaacccttccgagctaatcttcgatgattttgaggacttgatattcagggggcatcccttgggacgcaacattctgggcaatcccgagcagttaaagcagtttcgcagtgaggatgctgccgcattcactgcccgcttctaccatcccaacaatatggttttctttgttctgggtaatctgagtttcaagaaagttgtgcttatggcaaaaaaacttctggcggatataccggcaacaccggtgcattatggtcgtactctgccgcccctctatgtacccgagcatcttgtagtgcataaggatactcaccaggcacatgtcatgattggcagccggggatataatgcatacgatgacaagcgcaccgcactttacctgctgaacaatgtcttgggtggcccgggcatgaacagccgcttgaacgtctctctccgtgaacgtcgtgggctggtctataacgtagaatccaacttgacttcctataccgatacgggaactttctgcatctacttcggttgcgaccctgcagatttggactactgcacccgcctggtatataaggaattgaaacgcttgcgtgatgtccggatgacttcctcgcagcttgcggccgccaagaagcagcttatcgggcaaatcggtgtagcttcggataataatgagaacaatgcgctgggtatgggaaagactttcctgcattataataaatgcgaaacttccgaagccgtgttccatcgcattgaacagctcacttcggaagctctgttagaggtggcgaacgagatgtttgccgaggactatctttcgacgctcatttatcgctgaccgctttttttatttgaaaacctgcaacataggacgtcctatccatacttgtggctgtttcagcccgaagatgtgggcaatggtggaggcaacgtcatactgcatcatgctttcgtggaattcgccttctttcttaatgttctttccggagatgatgaagggagtctgcatttcctgcatggtcttgccgccatgtcctttttcaatgcctccgtggtcggcagtaacgatgaagatggtttctttcagcatgcctgcctctgtaacggcctggatgatgcggctcacataaccgtcgagttctttcagtttggcgtaatattcaggagtattgtgtccggcttgatggcctacatggtcggggttgtcaaagcaaatggcaagaagggtcggttgtttctccttgatatacttttctgccataccgcataaggcttcgggatgtttgttgtagtcgggcgcttgcgcatagtggcttaaggcaagagtgtctacaaggtatttgataccgtcccattcatacaggcagcctatttccgcttccggccgggcatcacgtagcagctggaagatggtaggaaatatgccgtgctggttcagtacgcgtgacggaagctcgggagtcttggagccccattgcgtatatccgtgcaattcaggacctgcccccataaacatgcttgcccagttgacggcgctggaggagggaagtacagtccgtttttctaatgtataagaaccgtctgccatcagttgcttgatgtgggggatgtctgctttgggaacactgtagctaccccagccgtcaagaccgatgaaaactacgtgttttgcttttcccttggcattgcagggaactgaaaagaggcatgccactgctagggcgatgaataatgtaaaagtcagtttcttcatgttttctttagttcttattgttaacatgaaacaaagttacgggaaacgtacctagttttagtacgatatcgtacataatccggccgattttatatcgtttcgttcttttccaaccgttgcatgctgaattcacagccgcaatactgctggttgtagaagtcatactctttcagcagttggttgcgccgctcctggagtccgcctttccgccaattctgttcccagaagagggtatccggatagagcgcggcggcacggcgtccggcttcattgatttgctccaggcttttccagcgcgaagaggcgagggtagtggtgaatacggagaaaccatgctcggaggcgtagcgggctgtctctgtcaggcgcagtgtgaagcactttaggcatcggctgccacgttccggctcgttttccagtccttttatagtgtgcagccagtgtgcatagtcgtagtccgcgtcgatgaaatcgaggtttttggaggttacgaagcggatagcctcctctttccttatctcatattccgcctgcggatagatgttgggattgcagtagaatacggtggggcgtatgccgttttccagcatgcactcgatgatggcagaggagcaaggtgcgcagcacgaatgcagcagcaccttgtcttcaccgttgggtgtttggactttcaacattatactttcagtttaatctttactttcaccagcaagccggtcagcccgacaatgacaagcgagaacacgagggacttgatcagtcccggcacgccgcttcccaatgcttcgggatagtgcagatgcagcagttgctggacagcataccagatgtaaggaataatatagcaggtcagcgttgccgtacctgcaggtttgatgatatcgaaccagttggtcttgcctttcacgtccgtcagccagtagaagaagccgaacagcgggaagaacatggcgaggcagtagaacaaccatgtcggcgtggcttgtattttggatataatccagaacgggtgtgagacgagggcaaggacaagcattcctacgccgagggcacaaagcatgccgatgaatcgtcccggccgttcccggtcggcatagcgctgcatgagcagggaggtcaatacgccggacataccgaaggcatgcagtgtccagtcactcgggataaagggaagcaggataatccggctgccgtactctcccggtatcaggtctgaatggctgactacggcaagcaatacgaccacgaaccaggcaatggcattcttccgcaggttctcccgagtgaatagatagatgcctgcacataccgcatacgtccagccgataagtccgaggatgccccaccagcttatctggaacggtttcccgttcatgtccttgtagatgacgaggaaggcaagcagaagcacgcctgctgttttcattgcggtgaaaaggacctttttcgttcctaccgctttgggatataccccccaggtgaggaagaaaccgatgaccatcaggatggagaaccatgggtgcgagaggccgccttcgatgcctccgctgttcagtgaaaacagtcccatggcaatcagtgccactgtccgccagaagatatgggccacgacttgcagggtgttgtctccctttttgtaccggttttgtatggcaaaggatacggacatgcccatacagaaaaggaaagcggggaagatggtgtcggagaatcccatcatgtcttcgtctatcctggcatgcatcagccagtgggggacgtttttcagtccgggaatgtcgttgacaaagagcatgaggaacatggtgagtgcgcggaatacgtctaccgcggcaatccgttggggtgttaagcttttcatgatagataatttgtttgggggttttgaacgcaaatataggaaactattctttccgatgctactgctttgcaggatttcttgctatatttgcatgaactttatggtcatggaaaggagattgttcattttttgttttcttgccgtcgtggtatggcaaagtgtggctttggctgccggcacgtcgtctttcactgcactgacggcttctttggatgaggctatcgaggcgcatcggcactatgtcgccgtgcgtgaagggcgcattgcccggctgaagtgccaattgctggatgccgacaccgccaatctctctttttttcgatggaatggggaaatttataaggagtacaaggcatatatctgcgactctgccatccattatcttcgtgtcaatctggattgggcagaacgctatggccaacggaatgcagcactcgaaacaaggctggagcttgcccacctgatggcttcggcaggcatgtacgaggaagccgccgaactcttgaggcagacggacaaagcctcccttccctcccatctgctgccggactattacaatgcctgtcataaactttacacagaactgagtttctatacgctggacgattctttcaagaagcattatcaggctttggctacccattatgacgattctttgatgcaggtacttctgccttcatcccccctctatctggaacgaagagagacgcgggaggccgctgcaggccatccggacgaagccttgagcatcaatgatacgcgtctggcacatgccaagcccaatactcccgaatatgcgctggtgacctatcagcgctcattgctctaccgccggctcgggaaccgggaggaggagaagcgctatctggctttgtctgcactgaccgatattcgcctgagcatcacagaccatgcctcactctggaacctggcggaacttctttatgaggaaggggatatggagcatgcctaccgttacatccgtttctcgtgggacgaaaccaaccgatacaacgcccgtagccgcagcctccagactgccggcatcctttcactgatagacctcacttatcaggccatgcgtgagaagcagaatgaccggctccggctgtacctctggctcatcagcgctttgattgtgctgttggtggtggcagtgggctttatctaccggcagatgcagcgactctctgccgcacggaacaagctggagcatgccaacgagcaactgcaactctcaaacaacatcaaggaggagtatgtgggccgtttcatgaatctctgctccgtttatatcaaccggctggatacctaccggcggatggtcaacaagaaaatctctgccgggcagatggaagagctgctgaagatggtgcgttcccgcgaggtgctggacaccggactgaaggaactctatgataactttgatactgccttcttgcaccttttccccgattttgtcgataaattcaatgacttgctgcagcccgaagaacgcatcgtgctccgtaaaggcgagttgctgaatacggaactccgcattttcgccttgattcgtctgggcatcgacgacagttcgcagattgcagaattcctccgttattccgtaaacaccatctataattaccgtgccaaagtgaagaacaaggcccgcatttcgcgcgaggactttgaaatacggctgatgcagatacgctgacaatacgtcaaaccggctttttgaatccactttctgcctttctcttcttctgattatatttctgattattagttgtttgtttgttcatgcttcttcacttcttccacctattcccgattcgccggtacgaggtgttcttatctttcctaactttggggaagcaaaagcgaatatcgcaactgataccataaccaaaattattgccatgaaacatttattagcgacaagcattaccatcgccctgctctctttgggccttgcgggatgcggtgagaaacaagcgacaaaagaagtaacttcggatgcattcgtaaccattcagggtcaggacttgataaagcccgacggtaccaaactcttcatcatgggtaccaacctgggcaactggctgaatccggaaggatacatgttcaagttcaacaagaccaattccggccgtttcatcaatgagatgttctgccagttggtgggaccggactttacggccgacttctggaaagcattcaaggacaattatgtaacgcgcgaggacatccgcttcatcaaggagcagggtgccaacaccatccgcctgcctttccattacaaactgtttacggacgaggactatatggggctgactgccgcccaggacggatttgcccgcgtggacagcctggtagagtggtgccgcgaatcggacttgtacctcatcctcgacatgcacgacgctcccggcggacagacgggcgacaatatcgacgacagctacggctatccctggctgttcgacagcgaagtcagccagcaactctactgtgacatctggcgccggatagccgaccgctacaagaacgaaccggtcatcctcggttacgaactcttcaacgagcccattgccccttacttcgagaacatggaggaactcaacggcaagctggaagatgtatataagaaaggtgtagccgccatccgcgaggtggacagcaaccacatcattctgctgggcggtgcgcaatggaacggtaatttcaagcctttcaaggactccaagttcgacgacaagataatgtacacttgccaccgttacggaggcgaacctacccaagctgccatccagacgattatcaacttccgcgacagtgtgaacctgcccatgtacatgggtgagataggccacaatacggacgaatggcaggccgctttctgccagacgatgcgcgagaacaacatcggctataccttctggccctacaagaagatggacggttcttctttcgtcggcatcactccgccggagaactgggcaaacatcgtgtatttctccgaagcaccgcgtgccacgtacaaggaaatccgtgaggcacgtcccgcgcaggccatgtcccgcaaggcgatgatggactttatcgaggcatgcaaactgaagaattgtgtggttcaggagggttatatccggtcattgggaatgaagtagcgggtgctgcctcgctgcaaacagtacgtatcaagtcccagaggatgagatgccgggacttagtatgaaagaggtagggactgagctgtacacaccataggactgagcatccaaaacatccggatgttttagggcaaaacatggggatatattgggataaaacatccgggtgttttggggtaaaacatggggatgttttggacaacaacatccggatgttatgggtactcactatacgggtgtaaggacttcagttcctatgtaggtagggctaagtcatattcccttgtatgttggagattatcaatggtacggactgattatgattgcttacttatataacaacttaattatacaacaatgaaaaaagtattattcggtttggttctggctgctgtcgcgctgcctctttcagcccagcagaagcccgtctatctggacgcaagcaaacctattgaagaaagagtggaagacgctttgagccgtctgaccctggaagagaaagtgaagttgactcatgcgcaaagcaagttcagcagtgcgggtgtgccccgtctgggcattcccgatgtatggacggacgacggcccccacggcatacgtcccgatgtgttgtgggacgagtgggaacaagccggatgcaccaacgactcctgcgtggctttccctgccctgacctgtctggcggcaacctggaaccccgaaatgtctctcctttacggacagagcatcggtgaagaggcacgctaccgcaacaagtccgtcctgctgggccccggtgtcaatatctaccgcacaccgctcaacggacgcaacttcgagtatatgggtgaggacccttatctggccggaaagatggtgtcgccctatatccggggcgtgcagcagaacggcgtggctgcctgcgtgaaacacttcgccttgaacaaccacgaagtgaaccgccacaccaccaacgtcatcgtggacgaccgtgctctttatgaaatctatctgcctgctttcaagatggccgtgcaggaaggcggagcgtggagcatcatgggtgcctacaacctatacaaaggccaacatctttgtcacaaccaatacacattgaacgatatattgaagggcgaatggggattcgacggcgtagtcatttccgactggggcggcacgcacgatacctggcaagccatcaccaacgggctggatatggaatttggcagttggaccaacgggctctcgaacggtgccagcaacgcatacgataactattatctggcaaatccctatctgaacctcatccgcgaaggtaaggtaggtaccacggaactggacgacaaggtacgccgcattctgcgccttatcttccgtacggtgatgaaccccgaccgtccgtggggaagcatgctctctccggaacattacgaggctgcccgccgcatcggtgaggagggcatcgtactgttgcagaacaagggcaatgtgctcccgatagacctgaaccgggctaaaaagattcttgtagtgggcgagaatgccatcaagatgatgaccgtaggcggtggtagttcttccctgaaggtacagcgcgaactctctccgttggacggcatcaagcagcgtgtggccggcaaggccgaggtggtctatgcccgtggctacgtgggcgatgcaagcggtgaatacaacggggtggtgaccggacagaatctgaaggatgaccgtactcccgaagagctgatagctgaagccgtgaaagaggcccgggatgccgattatgtcatcttcatcggcggcctgaacaagagcaacggccaggactgcgaggactccgaccgtaagggtctgggcttgtcctacggtcaggatgccgttatctccgcactggccgaggcgaacaagaatctgattgtcgtcaacatctccggcaacgccattgccatgccgtgggtgaacgaggtgcctgccatcgtgcaggactggtatctgggttccgaagccggcagttcccttgccgccatcctcatgggtgatgtcaatcccagcggcaagcttccgttcaccttccccgtgaagctggaggactgcccggcccacagcttgggcgaatataccggcaaacggagcaaggacatcatcgacatcaagtataatgaaagcatcttcgtgggctaccgttgggccgataagcagaagaaggtgaaaccgttgttccccttcggccacggtttgagctataccactttcgaatatggcaagccgacggccgacagcaagaccatgcaggccgacggtacgctgaccgtgaaggtttctgtaaagaataccggagcgcgcgaagggcaggaagttgtccaactgtacatcagtgacaagaagtcctctctgcctcgtcccgtcaaggaactgaaaggtttccaaaaggtgaaactggctccgggcgaaacaaaggaagtcacatttaccattgataaggaggctcttagcttcttcgatgacacccagcacgcttgggtggccgagccgggcaagttcgaggctgtcatagcagcttcggcagccgatgtgaagggaacggttccttttgaattgaaatgatgtaggaaaataaagtttccttttaggttattatcaaagatagtgtagatggagggtgtggccgtgaggttgcaccctttctttgtactctttacaagccaatatgttttcttatatttctgagtttcttcgggttggctaaggaagatgcagatatgctggatgttagagttaaagcagtgatgttttgtagtaatgggtgagtttttaccgccgtgtttgggcagattttcatcttttatatttatttttacagaaatgatcgggacaatggttcttgtcctgatgggatgtggtagtgctgtctttgccggaagtgcggcgggggcggttagtgcaggtgtcggaacgctgggagtggcttttgctttcggcttgtccgttgtggcgatggcatacgctatcggaggaatctcgggctgtcatattaatcctgccattaccctgggcgttctgttgtccggcaggatgagcgggaaagatgcagccatgtatatggtgtttcaggttatcggggcggttatcggttctgccattctttatgcattggtgtctacgggcgctcatggtggtcctacggctaccggttccaatgggtttgctgacggaatgatgttgcaggcattcattgcagaggctgtgttcacgtttatctttgtgctggttgtcttaggttctacggattccgagaagggggcgggtaatcttgcaggattggccattggtcttacgttggtattagtgcacattgtttgtattcctgttacgggaacttctgtcaatcctgcccgtagcatcggtccggcactgttccagggtggcgaggctctctctcagttgtggctgttcattgtagctccgtttgtgggtgctgcgctgagtgccgttgtatggaaagtgcttgctgcaaaagaaggtaaataaatgtcggcagacagtgccttaagaagaggcggctgatggcagaaaacttataaagggaagccctccgtccgaaactttgaagtttcggacggagggcttcctgttctttccttatgcttgctatatcttgtgccttattcgtacagcgatttggctatacccatttccagtccacgaagttctgccagtccacgcaggcggccgatacaggaatagccgggattggttttcttcttcaagtcgtccaccatctggtgcccgtggtcgggtcgcatcgggatagagacaccacggcgttgttgcagttcaaggaaggctttcatcacgtgatacatgtccacgtctccttccaggtggttggcttcgtagaagttgccttcggcgtcgcgttgcgtactgcgcaggtggacgaagttgatgcggtcggcaaattgctgcatgatggcggcacaatcgttggcgctgcttacaccgagcgaaccggtgcagaggcaaaggccattgctcttgttggggacagcgtcaatcagtgtctgaaagtcggcagcgcaactcatgatacgtggcaggccaaggatggagcaaggtgggtcgtccggatggataacgagcatgacacctgcttcgtcggctaccggagtgatttcttgcaggaaatagatcaggttggcacgcaggcgttccggagtgatgcccttgtagcggtccagttcctgttggaactgttccagggtgaagctttcttctgagccgggaagtccggcaatcatgttgcgtacaagcagttgtttgtctgcctctgtcatctgttcgaagcgggcacgggctttggccttttcttcatcggtgtattcgccttctgcaccgggacgacgtagcaggaagaggtcgaaggcgatgaaagcggcacgttcaaagcggagggcacgactgccgtcgggtagttcgtaggcgaggtcggtacgtgtccagtccagtacgggcataaagttgtaggtgacaatgtgaatgccgcatttgcccaggttacgcaagctctctttatagttgtcgatatacttctggaagtctccggtttgggtcttgatatgttcgtgtacgggtacactttctactacagaccagcgcagacctacggcttcaatcatttctttccgtttcttgatttcctctactgtccatatttccccgtttggaatatgatgcaaggcgtttacaatgccggtagccccggcttgtttgatgtcccaaaggcttaccgggtcgttgggaccgtaccagcgccaggtttgttcacaaagaatcatgttatttattgtttgatgatttgcaatttactatttacatggcgaatgcgttgaaccctccgtccactacagccaccgtaccggtgacaaagctggaagcatcgctgatgaggtattggatggttccgcaaagctcttctgcacggcccatacgtccgaagggagtttggcgaatcacatcttgcccacgttccgtgtagcttccatccgggttcgtcagcagggcacggttctgctctgtgaggaaaaatccgggtgcgatggcatttacacgaataccttcaccaaacttcttggcaacttccgtagccatgaaggctgtgaaattggagataccggcttttgcggcagcatatccggctacacgcgtcatggggcggaaagcagccatgctggagaagttgacaatagcacctgccttctgctccaccatcggtttgaggaagacttgtgtaggcagtacggtaccggtcaggtttaattccagcacccgttggaactcttctatcttcaaatcgaagaaagtgcccgtgggcgcgatggtggcacccggcatatttccgccggctgcattcagcagggcatctatgcggccataggctttcaggatgtcagccaagttctgttccagcagttcacggttcatcacgtcggttgtcaggaacatggcttctccaccgtttgccttgatttctccggcaatggcgtcccctatttctgccttgcgtcccaaaatgacgacctttgcaccttcttctgccagatgaaaggcgatggctttccccaatactcctgttccaccggttatgaccactactttgtctttaatgtcaaataagtttttcatgattcgttcatttaaaaattacgttgtgttttatttgattagcgttgcaaaaatacggaataatccgttgcactgactaacaatcatacaaaaaagatgcatttgttgtccggaagaaagtgctatttccttatcgggttgtccaatgccgtggcttgtatatacagtagattgaagttgtcatgcggttttaggatacggtgggcataataaagattcaggtagtctttgcgtgcaggattcaggtagacggcagtacggtagaggtctttgcagaaattctgtatcgagctttcccagccgcttatctgctggtagggccattcactgaggccctttccgacgtaggaagccaggaaatccatggctttgtagaagttacgtccatcggtagaggtgatgtcatccagcttgattccaagattttttgccatcagcatgatgtcaataaagtgggtcaggttgtactgtgagtagtggaaggcaagggtacgttgcagttcgtgcggttgtcgtccgtcaggagctatctgggggaagatacgtttttgggggaagtcattgatgatttcctgcgccagtttcttgttaccggtatagagggcgaaagctatgatttgggcatcgtaggctacgctgtggttgttggcactggctgcttcttccttaccttgcggactggcgagcatccagtcggtcagtttggaaaaccatttcttcagttgtttgctgtcctgggtagtaaatgcttttgactgttctagcagtgccacagcatccagcatttctatgaaggagtaggtgtctatcagcccatagcagcgacctttgtcgttattgtgtcccggtatcatttgtgcatattccaggttggggttcattcgggtgtctttgttcagaaaccatacgcggataagttctgtggctttccgggcatactgctcttctccgctgaagtaccagaccagagccagggtagtgatgcggccggctgttgttcccaaccgattacggtctagtttgttcagttcaggattggatacgccgtcgcggttgatgtaaggcaggccgtttggctttgttgggtcgggccaatagtatcgggcttggctcatatagtcatgcttgtcaccgctggcaggtgttttttctttcatcatgacagaaaggggctgggcgtccaataacctgtccgcttccgctttcaatatctcgtaagttgtggcatagaaaggctcgtgaatagagtgctttacatttgcaaggtgtgctgtgttccaaatggattgtgcttgcatacaagatgccagaagcaggaatgcaagcgtccattgtattgttgttttcggtttcatgtcttttattttagagcgatggacttctgtaataccaataagctttccggtcccatattgaacagcaggtctatgatgctcaagttgggcagaaacccgagtctctcttgaaacacttgataataaggttgtggtgagaattctgtatcttccagagaaaaatcctttttcggatgaatgcgttcgcggaaatctgtctcatccggagcaaactcagtccggtatccggtagtacgtgccatatccggttgcaagtctatcagggagcagacgaggtggcaaagttcttcgttgaaatcggctaagaattcatatttctgttcatagaagggacggaagtcatccttgtagtattcaaagaaaggagtgtggttataggcagattctatggcattccagtgcagatgccgccagttaccgtggtcggagatacggatatcgcgcatcgggcattttaggctatccggctttacggtagggatggaaagtgccaactcgccgtccggtgcggcaatggtgcagcggttgcggtaagtctgcttcatatagtggtcatgctgttcgatgaatactttatcgtatgccagcaatttggtataatattctatgggagccaaataggcggaagaaagaaaaactgttttcatcagtatatttacgattagatgatttgcgatttacgattgaagctactgttcattgtttgtattttcatttttattctttcatttgtttgtcattccactcttttccatatcttgccccatcggtaaccgctgaaaggtcctgttcccttttctttggagaaccagatgatagatgccttgcctatgatgtggtcttcggggacgaaaccgaaaagacgggagtccgaaagattgatggcattgttggcacttacccagtagtagtctttggtaaaatggcagtgttgcacgggtttgccttccacataaagggtgtcgtttttgatttcggcttgtttcttttcgtgaagtaccagggtgtttcgcaacaaagtcttgttccacggatatacgcgtatggctttgcctttgctggggattatcagaggtttcaacatctccatggagtcttccttgacaatcggttctatccagcaattcccgttcatggcttgttccagcaagtagtgttcatagcggctgaaactacgtatattctttattgagtcctgtcccaatagttggttgggagcgatggaaaggatggaaagcaatgaatccaactgttgttcccgttgactggggtaagaataaagaaacttctggtcgggtgcattcttttcggaaggaatcactgaaaaaagcgaatctatcagcaaggtatctccaggagtaccgatgcaacggctgataaagacttcccgtcggtcaatcacgggttctgaaagattggcaggattgttgaatacaagaatatcctctttctgcaccggactgtccgcccagcgatgatatccccataacttcatgaaaggaagccgcagaccgtagctccacttgtttacaagaatacgttcaccctgatacagtgagttctccatgccggaagaggggataagataggaagttgccacacaaccccgaagcagcaccacgacgagtgccactccaactattgtgattgctatcttacacccttttttcatttaatgccgtccatccacttgaatatccggttccagcgtatcttaccgtcaaaccagcctcggtctttgtccagtgacaaccatactacgataggctttcctacgacatggtcttccggcacaaagccccagtaacgggagtcggcggacttgtcgcggttgtcgcccatcatccagtagtagtccatattgaaggtataggagtcggtcttttcaccattgatgtagatgccgtcttccttgacttccagtttgttgccttcgtaagcaacgatgcagcgttcgtagatgggaaggttgtcctcggtcagcttgatggtggcgcctttggcaggaatccatatcgggccgtagttgttgcggtcccatttggtgtaaaggttcagcggatacatctgtcccgagaactctcccggctcgatgataatcttgctgatgagtttcttgttgcccgtaagggtcttgtacatctttttggtgagcggaagatgatagaccggtgccagcctgccctgggcatcccggcggtccagtcccatttcaatcagattctcttcccagcccagaccgtcggtcatcagtgtctggtcctctttgctgatgcccagttcacggaacatatcatcggtgatataaggacctgtagtctgtacaaagtagttgaactgcatttctgcagggttctcgatggccttgccgtcgatgtatacctgtcctttcttgatttgcaacgtatcgccgggcaggcctacgcaacgttttacatagttttcacgacggtcaacggggcgtatgacaatgtcaccgtacattctaggattggaacggataagattacgtccggcattgtagtacaggtcgtagacagtacgttgctgcttgcgtgtcaggctgtccatattcaccttgttgggatacacgcgttttccttcttcgtaagcaagggtatagaagtctgtctgctggaagttggtggctaccgtgtcgcctgccgggaagttgaacaccacaatatcgttcagtttcactttgccgaagcccggcacacgtttgtattcccattgaggccattcgatgtacgacttggtgttgaataccggtagtgtatgttgtgccagcggcatggaaagcggcgtattcggtacgcgcgggccatagctcatcttgctgacataaaggaaatcgcctaccaacaaggatttctccagtgaggaagacggtatctggtaattctggaacacatagatatttacgaagtagacggctaccagcgcaaatacgatggcatccacccaactcatgatgctgcgtacggcaggattctccgatttcttccagaacccccagggtatcttcttactgatgtagatgtcaaaaatgaagggtagtacaatcagtcccagccagctttttacccaaaccagaaaggcaaggtagagcagggtgactatactgaatttaatccattgggtgcgtgttgcttttctcatgatgttttagtcttttaaaaatggaaacaagtcactcattcccaaagcaccttcgtgcttggcggtatattcggcagcaaggacagctcccaaggcaaatcccctgcgattcttggcatcgtgggtgatagtgatgctgtcggcttcggagtcgtagcggatgctgtggatgcccggtacttctccttcgcggatagaacttatgggtagctcattggctgcacattccgtagagcccgaaacggttccgtcgggagcctggaaagttccttctatccatttgtccttacggtcgagattctccagaataccttcggcaagcgtgatggccgttccgctcggagcgtccatcttgtggatgtggtgcgtttcgctcattgtcacatcataggcagggaattggttcattatctttgcgaggtacttgttgacggcagagaatatgcttactcccagactgaagttggacgaccagaacagtgtcttgccgccttcggtacaaagtctcttcacttcgtctccatgttccgccatccagcccgtgctgccggataccagtttgaccccggcgcggaatgccttcatatagttattgtatgcaaccatggggttggtgaactctatggcaacgtcggcgctcttgaaggctgccgattcaaagtcttcctgattgtcgacatcgatgatgcttacaatttcgtgtccgcggccaagggctattttctcgatttccttgcccatttttccgtagccgattaatgcgattttcattgtttctatctgtttttatttagtttatcaacaaactataggtcgcaaagataatctttttcttacatttgtgctcaacattaacgtcttgttaacatggaacaactactgcattatgtttggaagcacaaaatatttcctttgtcattgctccagacaacctccggccggccggtagaagtgatagatcccggtttgccgaacatgaatgcaggccccgatttttttaatgccaaactgaaaatagacggtacgctctgggtgggcaacgtcgaagtgcatacgcaggcatcagactggctgctccataggcacgaccgtgacaaggcgtatgataccgtcatcctgcacgtggtgggcgaatcgaattgtgatgtgtaccgcacgaacggtgagctggttccccagatggtgctcacctgccccgacactgtccgcttgcgttatgaagagcttcggcagacagagatttatcctccctgctattccatccttgcctcccttccgaagctgaccgtccactcctggctgtccgctttgcaggtagagcgttttgagcagaaagcatgcgtcatatcccagcggctcgaacgctgcaatcatcattgggaagatgttttcttcattactcttgctcgtaacttcggcttcgggctgaatggggatgctttcgaggcatgggcaaaccgccttccattccgcgccgtagacaagcatcgggacagtctgtttcaagtggaggctttcttcctggggcaggcaggcctgctggaggaggtctcggcagaggcagatgattattatttgatacttcagaaagagttccgctacctgcaacacaagttcgagctgccagctcccatgtctgttgagcagtggcggtttctgcgtcttcgtcccgataactttccacatgtacgcctcgcccagcttgcctgtctgtatcacaaggagcagtcgctcttctcgcgtgttatggaggctgaaacgctggaggcggtgaagaagatactggctgccaagacttccgcgtattgggaggagcacttcaatttcagaaaggtttcaccccggagggaaaagcgggtaggggacggtgccttgaatctgattgccatcaatacggtcatcccgtttctttatgcttatggcctgcacaaggccgatgacgttttgtgtgaccgtgccacccgtttccttgaatccttgaaggccgaaaacaatcacgtaacccgactttgggatggtgccggtttgccggtatctaccgctgccgattcgcaggctctgcttcaacttcaaaaggaatattgtgacaagaaagactgcttgcgttgccggtttggttacgagtatctgaaacatagatgataataattatcgccccatagccttagcattttattacttttatattatctttgcgcattgaaaaataatccgagtatatgaaggctatccgctttgttttttgtctgtttgcggcactcatgctgacgactctcaatggtctggctgccgaagaggaggatttcaagacatttcttcagaaattcacgtccagtgcttcattccagtattcccgaatcaagtttcctttgaagtctcccatcgccctcttgaaggatgacggtgagacggaacagacttttcccttcacccgcgagaagtgggcattgctagacgaagaaacgctgaaggaaggacgtactaccgaagaggagggaggtacctatatttctcacttcactgtcaatgagcctgcccataaagagttcgaagcaggctatgatgaatcagaaccttcccttcgtgtggtctttgaactgacagacggcaagtggtatgtcaccgactgctataacgactggtacaacttcgatctccctatcaatgaactggaagaaactattcaggcggtacaagaggaaaacaaggctttcgaagaacttcatccctgatgaagtgggggcagaaatccgcctcaaccattattttatccttcttctgtacgatttatgcccctctttttccaaaaagaggggtttctttgtaccgtactaatacattgaaatatgcggttacaacttcttttgatgcaacttctcttatgtgtcctccccggtatggagatgggcgcttcctgccggcttaccgcctgggtcgtggaggattcttccggaaaagtggaaattacatgtatcggcgatacgatggatattgtatctccggacgggctgtccctttggtataaggaacggttgacgggaaactatgagattacctaccgggtacaagtggtggttgagaatggtagctacgaccgtctcagcgacttgaattgtttttggggggccgatgacccccggcatccggatgacttctttgcccgcagtgcatggcgcaacggcgagttcaagaattacaatacgctggacctttactatgtgggctacggcggtaatgataatggaactacgcgtttccgtgaataccatggagagtattacggagtggacgatgcaaagattaagcccattttgaaagagtataccgatgccgcccaccttttgaagcccaaccattggtatgaagttaaaatccgtgtggagaatggagccaccacttatgccatggatggtgaagagcttttcagcttaccggtggccgatggcaaaggaggcggttatttcgccttacggttgtggcagaaccacgtacgttttgcagatttccaagtagcaaatatcgataaccttaaataaacagacatgatgcaattcagtaaatggaaaataggagcggtagcgctcgtttgcatgttgctgccgggcagtgtacatgcacaaatcgtgaagaatgagcgcttgctttcttttgaggagaagcaggttccggcgtttgtcactacggcagctggttcgcagttgggcattagcgacgaacattatagggatggcgaccacagtttgagctggactttcgagccgggtgccgcactgtctatcaaaaaagacttgaagtttgagaagaaagacccgacggggaaagacacctatctttcggctttcatcgtatgggtgtacaatgagcaggcccaggacaagcagattcggttcgagttcctgaaggatggcaaggtatgcacttcttttccttttggcatcaacttcaccggttggcgcggagcatgggtatgttatgaacgcgatatgcaaggcaccccggaagaagggatggacgaaatccgcattgtagcccccgacgtgaaagggaaactctttttcgaccatctgattactgccagcaaggtagatgcccgccagcagactgccgacttgcaggtaccgtttgtaaataagggaaccaccaaccactggctggttatctacgaacactccttgtggaaaccggacatccctctgacagacgtgaccgaggcgcagaagcaggatatacggattatggagaagcgtttccgcggcatgctctacacaccttccgcgctttcggacaaggagatgcagtccatccgtgagaagtatgatttttatcggattacctacaagaacggcaaggtagcaggacgtcctatctatttcgtacgtcactccgaggcatacgaacgtatggtacccgactgggacaaagatatgttctccagactggggatagagataagcgactatttcaacttgatgaaacgcgtcgccatcgcctacaacaatgcggaggatgcggcgctgaaacacgagttgaagcagaaattcatcgccatgtacgataacgccaccgaccagggtattgcctacggcagttgctgggggaatatccaccattacggatatagtatgcgcggtctgtttgtggcttatttcttgatgaaggacgtgttgcgtgaggcaggtaagctggaagaggcggtacgtacgctcaactggtatgccatcaccaatgaggtatatcccgaacctgccgtcaacggtattgatatagatacgttcaacaccaagttgcaaggccgcatagccagcattctgattatggaggatacaccggagaaactgcaatacctgcgttccttctcccgttggctggacaatggctgccttcctgcgccgggattggccggttctttcaagccggacggtgcttgcttccatcattgcaacaattatcctgcctatgcagtgggcggtctggacggtgccactaatatgatttacttgctgagtggtaccgagttccgtctgtccgagcaggcacacgagacggtgaagaaagtgcttctcaccatgcgtttctattgcaatctgaagcaatggtctctctccatgtccggacgccatcccaacgggggaggaagcctgatacctatccaatatgccacgatggccattgccggtacgccggatggcaagcagaagtatgaccccgaaatggctgctgcctatctgcgcctggttgcctatacagaagctccggacaagaatgcgcccgactatctgccgaaggcttctacctgccacgaattggagatgaagaagttgctcgaagcccaaggcttccgtccggaacccgacccgcaaggcaatctggctttgggttacggttgtgtatccgtacagcgtcgcagcaactgggctgccgtagtacgcggacattcccgttacctctgggctgccgagcactatctccccgccaacttctatggccgttatctggcacatggcagcatgcagattcttaccggaaaacccgatgaaatggttacttttgccaccagtggctggcaggaggccggtttcgactggaatcgtattccgggtgtcacgagcattcatttgcctttcgaccagctgcgtgcccgggtattgaatgtcgataccttctccggcatggaggagatgctctattccgacgaagcttttgccggcggtttgtcccaagcacatctgaacggtaacttcggtatggtgctgcatgaacatgataagtataacggttctcaccgtgcccgcaagtcgttccatttcttcgacggcaccattgtatgcctcggtacggacatcgaaaacctaaataccgaatatccaacggaaaccaccgtgttccagcttgccgccaccactcccgaaacccgccggtactgggagtcctatcagagtgatggacagacttatatagaccccaacggcgtaggttattacatttccaaagcttcccgtcctactgcccgatatgagaagaacttcccgcaagtgaccgtaggcgagcgtagcaccaagcctacttccggcgactgggtgtccttgacattgcaacatggcaaagccccgaaaggcgcttcctacgaatatgcagtgctgccccacacggatgccgccgctttgaaggcattcgccaagaaacccacttacaagattctccggcaagaccgcaacgcccacattgtgcgttctccggcagacggtcttacttcttacgtcttgtttgagactccgcaggctctgcccgacggtggattgttgcagaaagccgatacatcgtgccttgtcatgatacgcgaatataaggacaagcttctgctgactgtttcccagcccgacttggccttgtatcgtggtccgagtgacgaggctttcgataaagacggaaaacgtattgagcgcagtatctattcacgcccgtggactgacaatgagagtcaggagattcccgtaaccgttactttgaagggacagtggaaggttgccgagacgccctattgcaaggtgttgtcggcagacaagaagcagacagtgctgcgctttacttgccgggatgctgcaagtttcgacgtggagctgaagagataaaggtaaaacgtagctttgctttttaatcttttatatttacagaagtattctgtaaaagagtgctttgctgaggctttctgtttcactcgctgaacgaacgtcattcagtcagggactgaaagcctttcactcagggactgaatgcctttcagtccctgactcattgtaccccctttcagaaggtgttctggatgggggtggaaggaatgtcggaagataggagtatggatggtaaaaaatacggaaataaaggcttaatacattccgagcagattgcttaccgccgcctcataatttgccagcttcgtggtcttgtgtatggtctttcgcgccttgcggtctccgtccggcagcaggtattcccagaagcttttcattttcgtcagtagttgcgtgtctcctccttgcagtagctcccggtagctgttgaacacttcggtgtgcagttgtcccacctttttcgccatttcatcggaagaaaccggggttccttgcttgtattccagcgccagggcaggattggcgagcagcccacggccgatgacgatacctgccaatcgggggaaccgtgtggcgatggaacggatatcttccgcggtatgcaggtcgccgttgtagaacagaggatgggtgcactccttgtagaaagcctcgaatccctccaggtctacctcccctttgtattgctgcttacccagacgtgggtgcaggatgatgtgtgcgaggggaagctcgttgaacagcggcagcagggcaagacactcctccgcctgctcccaacccagacgcagcttcacggagaaacggatgtcgggatgccggtcgatggcttcggagagcagcgccttcacttcttcgggatagggcaacatgccggagccattgtggcggcgcgccagcatagggaagggacaccccagattgatgtccgcttcccggtatcctttttcgatgaaaagggacattatgtgctccagcttgtccgtatccggagcaatgagctgggggataagatgcaggcccggattgttctccggaccgatgtcacgggcatctttccgccggatttctccgtgctccatgcgtacgaaaggagagtaataggtctctatgccgccgaatatgcgtgcatgcgcccgccggtagacggcatcggtatagccttgcagcggggcgaagtggatgggtagtatgttctcgttcatggctgcaaagatacacatttttacttccggtctaaagtaaccatagctttttcaattcaaaggaaactcctctaattcctataaaggggagccgtgcagctctttccggcttcttctttttgcggcatctcgaacgatatttgtttggtttgcccgctttgggttagggttatcgttatctttccggggtttttcgattcgcaacgtgggtttgcagcatgaattttctcttctttttccttccacaagagggcgcaaggggtatctgttgcaaggatgtcaccattttcaagtctcagttctcctggctggtagaagatgatttccgttattcccagcttctcgtggcgtgcggcttgtatcttttccgtattggcaagtatctttatcggcaggtctgcggcatattttgcgacggttgatacggtcgagattcccggatgtaccaggtaggcatattctcctcgttgcgggcggataccgtgattggtattcagactgaacaatgctgtgtcgcaagctatccggtattcggcttggggcaatagattgacgtaggcggtctgtccatgaagcacccagtctgtggcagtctgcacggaaccattcttcagagtatgtgtttttccgttcaccatgtactgcacctttccgtcgcggttacattggttgagggtagtaaatacttcggcttttccttcggggttgcggatacctgtcccaagacatacatattcgtcgtcgaagtagaaccaggctttgtggccttgcaatccgtggcggtccagcatcatgccgcaggctccgtaaaggctgtcgctgacacctccggcaaagctgtttccattattgccgccttcaccccaatcggggatgggcaggggggcattgtcttgttcggcggtgataccgggatattggcggttattgaatatcttgaagaaatttccgttgtattctcgtccggtgacgaaaagatagtttactccattggaggcataatagttgaattcaccgtcaccattgccagcttcgttgcctacggtacgggtagaggtcatgcgagagctggtcatgtaattgttgcggcgatgcaccatgtagtcgaagcgccagaacatgcggtttcccgtcaggctgttgtctccgctgatgtgttgcagtgcctgcttcatgctgttgcggacatcggaactgcttagtttgtagattctctcggccaatgtttttatggcagaagagtattggttgctactgatgaaccgccctgcattgttggggtcgtgctgtttgctgtagaatatccattgtacgccgtcggtgaagagccgttgcagtaattccagtccggggctttggaaacgggtatccttgcagagttccaaataagctaaggttgagtttacgaactctttgccgtaactggtgaagtagagttgtcgcccgtggccgcaatgttgtccgaagagatagtcgggctggatgccttcggaagactgtatggtgagcagttgcgtcatccgttctttgaagtcttccatttgcgcctcgtttttggtcaggatgctggctgcaaacgaacccatgatgatgtcggctccgttggctcccgtcatgtgcgagggagctgcatgctcgtaactccagcgtaagtatttgatggccttgtcaaaaagttccgggttctcattgatttcgcggctcatcaacactacgctgacagagagctctttggggtagggaatgtagcgataccaccagttctttgcttggtggttggtgtctacccagaagcagagtgctttgagataagattctttcagtgctttgttatgatagagtgcgttttgtggatgttggtaggcacaagccagggtgatgaggttctgcacatgcttacggggtgaaccgtcggtggcatggtaattgagggtgacgaatgcaccttcgggagaaagagatttaatcagtccgttgatggtctctttcgatgggttccggtcaaggtacttctcatacatacgattgtagatagtctcaaagtcggaagcatgagcatgaatatttgctaatatgatgcacaaggcaattactgcaatggttttgatattatgggttttcatgttggtacttgttatgttagggtgtttatgaattagggaagagcctcgcggttcctccctgacaaagttaattgattaaggtctataaaaaaattttaaggttagaagtcttgtgttgatagtacgtttttcttcactactcggttacgactaccgtgtattcgcgcaccacggaagactcttgcttgtaattgccgttggtacctacgaaggtagcggtataggtgccgggagcgttgtaagtgtattggtaagagtcaagactttgggtaacattcttcaatccggtgcctgcatcgggggaacatgcattgaccacaaacagattggacaccagccaactgtattttaactcggtgttggcactggaactgtgaatgaagaaagcattcatatctttgaaattccagataccggaggtgttattggtaactgtaccataggcacggttagaggtcatacccttctggtcgctcaggttgtggcggtgtaacatgttgatgggggtaaagccgaacgagttggcggtgaaagccgtttcctgtccgttggtcatcttgttcacaatctgcatattgccgaaggtgaatctggattgtgtggccgatttgtcttgaccccggtagcagatggccacagcgatgcgtttgcctaaatagggcttcatgtccacttcaaaatcttgtgcctttggagtagcggggaagtcggctgccggaatcagggtttcccaagcgtgctgttccaccagtacggagtctacttcaaagttgcctttctccagtccggggaagtcggcagacacatacatggtcagtatgttttccggttttccatattgtggagtcagcttgaattttaaagttgaagtttctacttctccttcgtccactgtggtacgttctctatatttatattcttttccggcctcaccgctgtaaaatgtgaggaagtccggatcgccgttgaaatggaactctactggagttccactttttacggtaatggtctggccgtcgaaacttacaccgtctccggttgccacgtttacattcagttcggcatctttagtaaattcactctcgcaggaagcaagggcgaaggttgcgatactgacagctatcaatagtttatttagtttcataatattattcatttatttggaatgattatccttgtttcactcactcgattaccaacccagattattttgggtgatagctttgttcacagacatttcactatccggtatcgggaagtaattataagcatctgttatctggaaaaaagtgtagacactataattgggtcctgtagaccaattggcattggcaccttgcaaggcgcggggagccagctcattcatgttttttacatattcaccccagcggatgaggtcgtaacgacgggtatactcaaagcaaagttccatagcgcgctcgtcttttactgcctggcggaaggcctccttgctgagactgccttcttcgtagggagcgataccggcacggttacgcacgtcgttcaagcatttataagccagtgtagtgggagaagcactgacttcgttctcagcttcggccaccatcagcaatacatccgagtagcgtagcaacgggaagttgatagaggtgtagttcttgttcttcttcgacccgtaaagctcatattctctgcggtattttccgcaagcgcgtgagtaattcttttcggagtcggcttcactcttttcgtagtcgccggtctttttggcagcgtcaccttgaccgtagctataggatacatcccagtactggtttttcacctcttccattttgccgaactcgaattggcgtcccgtaatgcctttcttgctcacggcctctacatattcgaatggtgcaatgctccagttcatgcggttgatgtcgccgttcgccttgtagagctcatacagcttaggagtcgaccagaagtaggcataaccgaatccggggtctttggcatccagcagggattggtcggtagactggtccggacatttgatgcctatcaggtttccgatacgtccctccgctcttacttcggaagtatagtcaccggcgaattcggcttcccatatactttcattggctgtagtattgtagcggttagaacagaggtcgatgaatacgtcccagtagttggctgtcaggctatgtccttcgcccattaccttttgtgcgtatgtgctggcttgtttgaaataattttgaatggctgtagcgtctccactggtgttgtcgcggaagtgctcgccggcacggaataaataaacgcgtgccaagataccccatgctgcggaacgtgaaacgtgtcctggcttataacccagttctgcagctgtggcaagcccttcggcacactcggaaatttcagtggtgatgaagtcatagatagtctgcttgtctgtacggggaatatcgagcccggtcacgctatttgtcgaagtggttttgaaaggaacgtctccccagccttgtacgagcgtaaaatagtagtaagcacgcatgaaacgtgcttccgatgcatattgcagacgcaacttgtcggatatgtcatccgtcttatctatgttctccaagaatgtattggcacggtcgataccggtataaagtgtttgccagaggttgctgaactgtggtgagcttgaattggcattattacatgcaatggcaccgctggtttgcggattacgaccgccaccgtagtgggacaaatcgtcggcacccgtcatgaacatatactcgtttccgtagaagttctgtgaggtcagtggagcgtatacagaggtcaggaatgagagagcttcttccgcattattaaagtaattgtcgggagtcagcttggtcggttctttgtccaggaaatcgcaagatgccattgccagacaagcgaaagataatataattgtttttattgttttcatatatattccagtgttttagtgggattagaaacctaagttgataccgaaacttacggagagtgcacgtgggtaagacgagaagtcaaggcccggagtcaagcctccgctacggatagatacttcggggtcgtagccggaataaccggtaatagtccaaaggttttgtgcagctacgtaaaggcgtgcgttgtcaatcttatattttttcaagaaagtcttgggtacggtatagcccagcgtcacagttttcaggcgcaggaatgaagcgtcttctactacgcgtgaagaaatcacgagattggaacttgagttggtagctgccggaatattactgttcgggttttccggtgtccaacggtcggtatagctggcatattgattcaactcacgtttcttctggaagccactgtcgaagaacaggcggttggcattcagtacatcgttgccgtagctccattggaagaatacgcttaggtcgaagcctttgtattcgaaattattggtgaaaccaccggtatggatgggcagaccgcgtcctatcatggtacggtcattggtatctatgacgccgtcaccgttcaagtctttgtacttgggcataccgggctgtgtattgctttcgcttacgtagtggggaatgttacccttcagcgtgtagctgctgccgcttttgtcaaaatcatcatatttataggtaccttcgtagatatatccgtaaatcatacccattggttgtcctattttggcaatataattgggctggctgttgaagttctggtcaaatctggcggtactcaacaagctagtctgattttcggcaagttccaatactttatttttattgaaggaaatattgaaattactgctccacttgaagtttttgctgtctatgttcacggtgttcaacgtcaattcaataccgtcattgcgtactttaccgatgtttttcatggctgtcagataacctgaagagtagggaagggtggcatccagcaacaagtcgcgggtagtcttacggtataggtcggcggtgaaactgatgcgttcatcgaagaatcccaggtcaagacctaagttccactgttcggtagtttcccatttcaaatcttcattaggcagagagataggagctacaccgacatttccgttgttaccgtcgaaaggatatacggtgttggtcatgctggtggtggcatggcttttaatcatgtccaataaggcaaggtagtcatattcgccgatacggttgttacccgtaagaccccagctcagacggattttaccacttgaaaaccatttcttataatccttcatgaagtcttcttcggagaagctccacgccagtgagcctgaagggaagtagccatagcgattcttcttactgaacttggaggaaccgtctgcacggaacgaggctgtggcataatatttagacttgtagttatagttcacacgtcccagataagacagcatagaccaggaagacaaggtagaggtacttttgtcgaaagtgccttgactcataccggccatgcccagtgattcgttgggaatctgcttcatgcgtaatgaataatattcatagtcagagttctgcaatgttacaccgagcagtgcgttcaagaagtgtttgcttttgaagttggtctgataagtcaggatgttttcgttcagccatgtcagacgttgttggcgtactacttctgcattcactttgtcggtagaagtaggaccaccgtagcgggtcttggaattattgaaggtgtcggtgtgacggttgtcgtaagtccatcctccggatacttttagctttaatcccttgataaactcgtattctacataaccatttaactggaggttgttgacgtagtatttgcggtaggcgttcttcaggtcggctatgggattgaaacgatagtcatttgatgcatccacatcgtcatccacgaggtcgttcaataaagaatcgagagacttgccgggatagttaaccgggcggtatccccatacgctatagaaaaggttgttcataccagagtaagaacttgaggaaggagatgaaccactctggatggaacgagagaagttggagttgaagtttatggtcagcttaccgcgttttaccaaagtattcagacggctttgcaggcgctcgtaattggagttgagcaggataccatcttggtcgtaataagaaagggatgcattgtagcgtataccttccgaaccgccggacagacgaacattatgattttgctgccatgctgtgcggaaaatttcgtcttgatagttgttttgggcaataccccggtagtcgtccagtgtccattggtgaccttcgtatagagggaggtatttttcgatggcacgggtgggatctacttcgagttgcagttttacgtagtcgtaagcatccatcatgtccagctttttggtaacggtggagataccgaagctgccgtcatagctgagctgtggtttgccaacttttccctgcttggtggtgatgataatgacaccgttggcaccacgcgcaccgtagatggctgtggccgatgcatctttcaaaacatcagtcgattcgatgtcgctcgggttgatagcagccgccacgcgtgcatcttccaccgggaagccgtcgatgatataaagtggggtattgtcttgtgttagcgagttgttaccacggatagtgatggtcatcgtaccaccgggcatgccttcacctgagcttacgtttacaccggcgatacgaccgcccaatgtctggtcgaaagatgcagaaggagtcttgagcaagtcactcatgttgactttggatacagaaccggtcaagtctttcttacggacttcctggtatcccacaacaaccacttcatccaatgcctgggcatcttcttccaatgtgatattgaatgtccgttggtcacctactttgatgtcttgggtcttgtatccaataaaagagaattgaaggatgtcggaaggttttacgttgcccaatgcaaactttccttccagatctgtggtagttccgttggtggttcctttcacaacaacgctgacaccgggcagttctcccatggcgtcgacaactttaccgcttacttggcctccggtctgtgcgtgtataccaagtacacagcagaagagcattgcaagtagcataaaggttactttttgtctcataaatattaatttaattagttattaataaaggttgtttcttcgttttgtactcactttagagttgaatcacatcgcaaatgtaggagatggagtatacaaatgcattggttaatagttcacaaaaagtacgaattcgtacaaaacttgcgaactataccactcttgtacttttattccctttcactttggttctttgcttccttcacctcttccagtagggcagagagcgtttttaccttgtccggatgggcttctgccacattgtctttttcggacggatcaatggaaagattgtacagttggggctgcggggcgttgcccatttctatttttgtccaatactccagtgccggcttgtcgctgggctctatgtatttccagtctccttggataatggagagtgtattgtccagattctgttgtacaatatagtcacatccggcagtatcggttcccaggaagttgttgagctggtcgcggctgtcgggagcgatgcctgcttccagcggatggttcagcagggcggcgaatgaagcgtatacatcaatcatggagaagggggcttgttgtttgccgggtttgatgccattgggccagcgtacaatgaagggaatacgggtaccggcatcgaaagcgctgtacttcccaccgcggtagtgcttcatgggagtatggccgttcagcagttcgcgtgcctggtcctgatagccgtcgtctatgacgggaccgttgtcactgcagaatacaaaaatggtgttgtcggcaatgccgaggctgtccaaagtgtgcatgatttcacccacggtccagtccagctggaggatgacgtcgccacgtacgcccaaaccactcttgccggcgaaacgcggatgtggcacgcggggaacatgtacatcttgcgtacccatataaaggaagaaaggttcgtctttatgggctgtgatgaagttcttggctttgtctgtaatcacgtcggcaatgtcttcgtctgtccaaagggcggatttgccgccggtcatccagccgatgcgggggatgccgttgatgatggtgttattgtgcccctggctgggtttcatcttgacgagttcggggttttcgagaccggtgggccagtcaccgaccttgtggtcgtagctcacagtgatagggtcgttgtggtcgaggcccactacatgtccgttctctacaaagacgcagggaacgcggtcgacggtagcggggatgatgtattcatagtcaaagccgatgtcttgggtgttcggtttgatggagtggttgaagtctgtaccgcctttaggacccaggccgaggtgccacttgcccactgctgcagtggcgtagccttcttctttgaacatatcggccatagtgacgcaggcggtatcgatgatgagttcggaattgcccggagcaatgccggtattcttctgtcgccagggatacatgcctgtcagcaggccgaagcgggaaggggtgctggtggaagaagtggcataagcgttggtaaactgcatgccttgtccggcaaggcggtcgatgttgggagtgcttactttggtggcaccgtaacaactcaggtcgccgatgcccaggtcatcagcaatcagatatactacattgggcttctgcggagagtgctccgaagtcttgtctttagattggcttccgcatcccgctatcagggctgcaccgggaagcagagaccacaagggggaaaaatgcttcatagttctttgactttagattgtaattctgaggtcaaaggtaagaggttttgtggaatcgggtgtataaggaagtacaagggaggggagaaaaagtacaaaccgtgtcatgcgatggcttgatgtacaatattaagatgtctcttcactgtcttccgtactttcctctcctccattctctcctttgcggtaggccagcgggctgacgtggtaaatgtccttgaagcatttggagaaatagcgtgaagaactgaaacctatccggtccgaaatttcggtgatattcagttccggattgttgcgcagcatcagggcacccttcttcaggcggatagtcaggataaagtcgttcggagtttgcccggtgatagccttcagcttggtgaacagattggtgcgtgccattgccatttcacgtgcaaagacgttgacgttgaattccgtatcgtccagatgtttctcaatgactgtcatggcgcggtccagaatctccttgtctatgggattggtggcaagcatctgtgcgaaagcctgtggttgcttgctgaacttctcctgcagaagaatacgcgagtttaccagattgttgcagcgcgaaatcagcagattggtgttgaacggcttggtgatatagtcgtccgcaccgatgcgtagtccctcgatattctgttcgatggcagtacgtgccgtgagcagtaccacgggaatatggcaggtgttgaagtcgctctttatctgtttgcacagttccgttcccgacatgttgggcatcaccacgtcgctgactacgatattgggcatttcgctgcgcaccagtgcaagtccttccgctccgtcggccgcagtcagcacttcgtagaagggcttgaagatacctgccagcatgtcgcggatggagtcgttgtcttccactatcaggatttttgcatccgggagtcgtttgatgggagcactctcttccagctccgccttgagcagggcatcgttttccggtttgggaatttctatttgttgcacactgtctgcattcttatttatttgctcttcgtcaaactgtgcgttccccaattgcaggtttacgatgaagctgctacctttgcccagttcgctttccacacggatggtgccgtgatggagctccacgatacccttcgtcaatgccaggccgatacccgtacccgtcttgcttgcatctgtagagtccatttggtctatctggtagaagcggtcgaatatcttgtccacttcccgggcatctatgccgctgccggtatcggtcacgcggatgacggcattgctgccttcggtcttgatgctgagggtgatgctgtcttccgccttggtatgcttgacggcgttggacagcaggttgtttatcactttctgcatctgtttttggtcataccatacttcgaggctgtctgtttccttctcgaagtagaggctgatttgtttggcgctggcatattccaggaaaagcagatagttttcgtataggaagttcacgatgttgtgtggacttacctttatcttcatgtgcccttgttcctgcttgcggaagtcgagcagctcggtgatgagttcccgtagctgtatgctgttcttgtagatgcccagtaccttgttatatatggcaggcgtgaagttctggagttgcatcagcgtttccacttgggccacgatgagtgtcagcggggtgcggaattcatgggaaatgttggtgaagaaacgtagctttgactggttcagggcctctacgtcacggatgtgcttctgttcgtacttcagtgattcacgcaacttgattctggacttgtaggtacgcaccagataccagagcaggattcccgtcactatcaggtagataagataggcaaggggagtcttgtagtagggaggcaacacgtgtatggtcaggtggacttgcggacaaaggctctcgtcttttccgttgggctttataatcaagttataggttccggcgttcaggttggtataggtgatgttgtgcagtccacgggcactgttccagtcgttggagaagccttccagcttatagatgatgtcgtctttgttggcggctacatagtttgaagtggcgaactctatgctgaacatggactggtcagcgttgagcgtaatctcgggggtgcagtacaaggactgctgcaggataccggtctcatctcccacttgtatttccgttccgttcacaatgaggcgggagaggatgattttgtagggtttcggcgtgaagttcaactccatttcatggaaagaaatcattccctgcgtgcctcccaggaatatctctccgtcacgggtcacgcaaagggcattctcattgacggcagtcattgggaaaccgttttcggcactgtagttcaggaatgccttttgccggtagtcgaagatggagaagccctcgttggtgatgagcagcagtttgccgctggtgggggattcctccgtctcatagatacagtcgctggaaaggccgttcttcgcttggtcaaagttctcgaagtcgttgctggcagggcggtataagtccagtccgctgcccgaagtggcgaaccacagattgcctttgctgtcttgggtaatgttgtttacattgttgttgctgatgctgtgtgggtcggcagtatcatggcggtagttggtcagtttgccggtatcgaaacggtagctgaacacaccttcgcccgtggctgcaatccagagcgtaccgttgctgtcgaaagtgacatctgccaccatcttgatttttttgccttctttgctgtcctggaacagttgttggcatttcccgttggcagggtcgaagaggcagattcccttttgggtggctatcaccaggtggtcttggtaaggcgcgatatcgcggatgatgtcggaaggcaaggtctccggattacctgcttccatgcggtagtgtgtgaatcgccccgagcgtatgtccagtctgttcagtccgcccagatgggttcctatccagatgatgtctttggaggcatcataatagagagccttgatgttgttatgggaaatactgttgggaccgatttccgggcggaaccatttgaactcacgggtacggcggttgtaatagttcagtccacccccttcggtgccaatccacagattgccgtccttgtcttcgatggtgcggcctacaaccggattgctcagccccttcttttcgatgggcgaatacatatagcggctgtatatctcgtactcggggttgaagtagttgacgccgccaaagtaggtccccagccacagcgttccttggttgtcctttacgatgcaccagatggaagagtgtgtcagtccgtcgctctgggcatcactggcagtgtggttctggaagagtcccgtacttttgtcataccggttcaatccgttgaatgtcccaatccagatgtttcccagattgtcttcacagcaggctcgcacgaagttggaagagatgctgtaagggttctttgcgtcgtattcaaagatttcgatggttccgtcggtctttacatggtgcagcccttcttcccagctgccaatccataactcgccttcgctgtcttggtatatgctggtgatgttgcctttcaggatggggtgggtcagctcgttcttgtccagttgcaggcggtatgctccgtcggtggtcgttccaatccacatttgtcctttgtccagatgcatacagcagatttccagactttttccgggaagctggtaatagaggtcaaagttcccggtctgctcgttatagcggtagatttcattctgttttccgatgaaaagggcctctttgtaatatatgctgtgcacatttcctagcagcagggtggtgaatctttgggtggcgagattgaactcggctactccttccgtacagagcaggtagatttttccgttacggttgccggccatgcgcagcacggtgttgcagaaaaggctgtaagggtcgttcttctgcagcttgtaagtttgtatgtcttctccgtcataacggttcaagccttctcgggttccaatccataagacaccgttttcatcgatgtaaaggctgttcacggagaattgtgacagaccgtcgtcggttgtcagatggttgaaggtgatgttctgcgcctgcagggttgcagcaatcatgcttactgaaacaagaagcagccggatgataaacgttcgcacttttcgggtagtttttaaggtttcagttacaaaggtatataaaaaaacagattttttacgcccggtaaataagaaagtcaagaccgcgactatctttgtggtaaaaacgaggtcatagggtttccccatcctcatatgtccaacgggcttgatgtcccaataaaaaaatacttctatgaaggtagtctgcggtcttgacgtacacaaagatagtgttttttgctgtattctgtgtgctaatggagaaaaaatccagcataaattcggagttcttaccgaagagttggtcacacttcgcgaccttatggtctctgaaggtgttgaagagtgtgcaatggagagtaccagtatctactggatacccatatggcgagtgcttgaagggtcagtgaaacttcatctggtaaacccttattttataaaacagcttcctggcaaaaagagtgatgtgaatgatgccgaatggatagctacttgtctgagtaaagaactgatagcatcaagctttgttcctgatgataaaattcaacgtctgcgtcaatatgacagaaggatatttgacctgaatgtttccataagccgcaatttagtcaaacttgaccaatgcatccagaggtgcaacatcagaatcagtaattatatatccacaacagattccaaagggtaccgttcaatagttaaacttatatcccaaggtgtgacagatgcggaagtccttgtgaaggaactgcatggaagaacaatcaacaggcatggcagagaaacattggtgaaagcacttaccggagttgtcagcgagaccgacatagacattataaaccagcttgtagaagagattgaattgcagcaacgacacaaggacgaagcacaggaaaagatgactgcactatgcatggagtggtttcctcaagaagttgaaaaccttcagactataccgggagtgaaagaacgtagttcgacctcaataatagcagaaataggaacagacatgacacatttccagacaccaaagaaattggtgtcatgggtggggctaagaccccgtaacgaggaaagcgctggcaaaatcaaggcacgaggtatcacacatggtaacaggtttgtaagaaaaaccatgattgaatgttcatggggagctgcacgtatgaaagattcatttttcgcagaattctcatacaggcaatgtatcgaaagaagaaagaacaagatgaaggtgcaagtagctattgcgagaaaaatacttgttgcagtatggtatgtacttagtcagggaactcagtatatcaaaccaacagatcattatacggcaaccgatatgactgccgtataatgatacaaccgtccgttacaaggtcaatatatttgtggtgattatatcccgttttcgcaaagtggctatcgtttcggacggagtaggacacccggttgagttttaatctcgaagaggaaatgtacataattgttcattgttccgactataatcggaactgaaccgtcatgcagtagtgcaaggaaaaaagatgtagaaaggaatagacactcgtttccactcacaaagatagtcgcggtcttgcttttcatagaggaaatataggtatattttgtacaagacttcttatttattaggcagtttttgcggttatgtttggataaatgtataattttggaagcgcgccgaacgatacttgtcttttgatagatggcaatcggcgtatctttgtaaacaaattaattcatttattatcatgaaagaccttttatctattgtatctcattttcaaatgcagggtacggttcgtgaaatcaagcctttaggctcaggcctgattaacgatacgtacaaagtgaccaccgctgaggccgatgcgccggactatgttctgcaacgtatcaatcatgccattttccagaatgtagagatgttacagtccaatatcgaggctgtgaccgggcatatccgtaagaagctggaagagaaaggagaggccgatgtcgagcgtaaagtgcttcatttcatccccacggccgaagggaaaacctattggtatgacggtgagaactactggcgtatcatgacttttattccccgtgccaagacttacgagacggtgaaccccgaatattcctattatgcgggagctgccttcggtaacttccaggctatgcttgccgatattccagatacattgggcgagacaattcccgatttccacaacatggagttccgtctgaagcaactccgtgacgctgtggctgccgatgcggcgggacgtgtgcaggaggtgcggtacttcctggatgaaatagaaaaacgtgccgatgaaatgtgcaaggcagaacgcttgttccgtgaaggcaaactgcccaaacgggtatgccactgtgatacgaaagtaaacaacatgatgttcgacgaagacggtacggtgctttgtgtcattgacctggatacggtgatgcccagcttcatcttctccgattatggcgatttccttcgctcaggtgccaacacggggttggaagacgacaagaatctggataatgtgaacttcaatatggaaatattccaggcatttaccaaggggtatctggaatcgggcaaatccttcttgttgccgatagagattgagaatctgccttatgcggctgccttgttcccatacatgcagtgcgtacgcttcctggcagattatatcaacggtgatacttattataaaatccagtatccggagcacaatcttgtgcgtaccaaggctcagttcaaactgttgcagagcgtggaggagcatacaccggagatgaaaaaattcattgactcatgtatctgaaaaagtttttaatgacgatagcggcagctctttgcatgttgccgctatctgcaattaatccccaaaatagtaaaatgaaagaattgaatgtaaagaaagtaagtgcggccaatataccggtagagtcggttccggctcttctggatgaagagaaggtggcgtttcagcccgtaaacacagtgaattgggctgcttttccttatactcccgatgtggaattccgcatagcgcatacggaagatgccattctgctgcatttcaaggtaagggaagcgagtgtacgcgcagttgcaggccacgataacggtccggtttgggaagatgcgtgtgtagagttcttctctgtgcctgccgatgacggagtgtactacaatatggagtgtaattgtgccgggactctgcttattggggcaggtgccggacgtggaaaccgccagcatgccccgcaagaggtgctcgataaagtacagcgttgggcttctttgggacgtgaggctttcgacgaaagagtaggtgagtgtgcctgggaagtggccctggtcatcccttattccgctttcttcctgcatgacatcacttcgttggatggaaagacgctccgtgccaatttttataaatgcggtgacaagctccagactccccatttcctttcctggaatccgataggtctggagaagccgaacttccattgcccggagttcttcggtaccctgcatttcgagtagtagtagaacaaaaagttactcaacttgccctcaccactatcaccgcttttctgaaactccctattcatcgccctttcaagggtgagtgagagcaaataaaaagggtgagggcaaattctaccctcacccttccgggcgtacccggttgcttcctgctctttccccgtcttttataggacaagacgggccattgtctacagaaacagtataataaatcccctttatatacttaatccgttagttcacaacactgaacagtttgttccagcattagagaacactttgtttcagtatagaaaaacactttgttttcatataatggaacgaactgttttgttaagggaaacaaagtgttttctataaggaaacaaaatgtttagttaaaggaaacagtttgttttacttagcatactgcctggaatgaatatgcatcaaaaaatagtaaaagataatgcaggaactattgtagaggaatatagaaaaaggcacgaactacgcaaacttacagaaaagaatttatccatccgtattgtctgcgtgattcgtgcccgaagaagggtgtttacttcacgattcctttggaattcttgatgaagttgatgatattgtgtatctcgtcactcatcggtacttggtcttcaatcttctgcaaggcatcctgcacgctgaagtttccctggtataccagacggtaggtatttacgatatggcgcaatacacgttcgctcacctggtgtttgtgttgaagcacagcagcgttgatgccgtggtattctgccggattaccgttcatgatgatatagggcggcacatcctttgatatgcggcagccagcttgaatcagtacccaacttccaatgtggcagtattggtgcagaatgacattgctgctcagaatggtacaatcgtctatctgacattctccggctacggtagtcttgatacccagtacacaatggttgcctatctgcacgtcgtggcagaggtgtacaccatccatcaggtagttttcattgccgatgcgggtagcgcttcctgcatgggtagcacggctgataaccacgttctcgcggatgtcgttattatcaccgataatcagcatactgctctctcccgtatagtggaagtcttgtggttcggcacccagaacggcattgtgatgtaccttgttcccttttcccatgcgggtaccgtgcagaatttttgcacccgacataataatacagtcatcaccgatttccacgttcccttcgataaatgcaaagggctggatgattacattcttgccgatttttgcggcagaatctacataagctaacggacttatcatagtaattagcgattaatgattaatgattagtgataaatggttagtgattaggatttactatttcattaatcgctaatcactaatcacttatcgctcattttattctcttcctcctccaagcgcttgatacaggctgataaccgcctgcatgctgctgaaggtgtcggatacttctgcaagctgtgcgctgaggtaagactgctcggcagacaagacttccagataggtcgacgtgcctaagttaaacaattcttttgtatctgaggcagcttggcgggcagaatttacttgaatagtgcgtgaaacggctttgtccttctccatttgatacaggtgcagggcgttgctcacttcatttccggcatttagcagggcggtttggaactgaatcttagcctgctcctcttgtgccttggcttgtttcagacgggcaatgttggcaccgcgatagaacaagggttgcgtcagcgaaccgatggcggaagccagcagtttacccgggttgacgatacctgcaccggagttattggtccagcctcccgaaccgctcaatgtaatctgcgggtagaaagcggcacgggcgctgttggtattatagtagctggcagccagtgacatctcggcagctttcacgtccggacggttggatagcaactgcaaggggatacctactgaaaattccgtaggcagctgttgctcttccagtacaccgcgtgcgatgctctgtgccggttggtgcaacatcaggcagagggcgttttcggtttcgcgtatgctctggcgtatgtcgggcagtgatgccatgacttgagcgtaggcagtgcggctctgctctacggcagcagaagtggttccgtagatgcctgcatctttcatggcttgcacggtctccaggttctttttcagaatctcgacggtgccttcggtgatttgcagttggcggtccagcatcagcagggtgtagtacatgttggctacgccggcgatgacttgcgtctgaacggcttgttcgtagaattgcgtctgcttcaagctaacctttgcttgtcgcttcgggttcagcagttgaccgaagaggtcgacttgccagcttgcggtgacgggcagggagtagatttgtgtagcctttcccttgtcccagctgctgacggttccttgcggagacaaggcaagcatcggagcataggcaaggcgggcagacatcagtgcggcttgtgcttgtttcacgttcaaggcggcactgcgcaggtcaccgttgttggtgagtgcttgctcgataagtgtctgcagctgtgggtctgtgaacacttctctccaaggcagattaccgaagttggccgtatctgcggctaatgtatcgttcacggacgccgtgtcgcgatacagtccggcagttgtcatgtcttcgggtctgtcgtatgatttgtagatgtggcaactgctcaataaagcagttgcgcacatcaggcatattattttcttcataatcgctaatcgttaatcactattttgtatattgttcaatctccggttctgcatccgagttgtccacatcttcccattccatcggcttgaatttctcctgcaggtactggaatgccacgaacagtgcgggcactatgaagatttgcagaatcataccgattaacataccgccgatggcagacgtacccagcgtacggttaccgttggcacccgcaccggaagcaaacatcagcgggagcagaccgacaatcattgccaacgacgtcatcaagataggacgcagacgggctgcggcacccaatacggctgcccaggtgatactcatacccattctgcggcgttcgagggcaaactctacaatcaagatggcattcttggccaacagacccatcaacatgatgagggcaatctgcatatagatgtcattggacatcgtacccagaatcattttcagtgccgggatgctgcccaatgcgcctataccgcctacaaagaggaagctacccagcagaccgaacggcacggacagcaatacggataaaggcaggatgtagctttcgtactgggcactcagcaacagataaacgaatacgaagcacaatatgaagatgagtcccgtagtgctgccactcgtttcggcctcttcacgcgccatacctcccaactcataaccgaaaccggcaggcaggttttcctgcgccacttcggcaatggcttgcagagcctgaccggaagtgtagcctgatgcgggagccaccatcaccttcatggaggtgtagaggttgaaacggctgatgacgtcaggaccatatactttcttgatggagatgaactgcgtgataggtgccatctcgttgccgttgcgcaccttgatgctttgcagtgtttccatattcttggtagcatcaggttcggcttgtactattacgcggtacatcttaccgaagctgttgaagttggaagcatacaaaccaccgtaatatccctgcaaggtagtcaagatgtcattggggctgatgcctgctttcttacaagcggcagcgtcaatgtccagctggtattgcgggaagtgagggttgaaggatgtcttggcagagttgatttcagggcgtgcttccagggctgcgttatagttgttcaccacgtcgaagaagtggttcaaatcaccacccgtcttgtcctgcatgttcaactcgatgtcgcttgaagccgagtaacccggaatcataggcggcgcgaagaacaatacctgcgcttccttgataatcttttgggcgcgcatgtacaaagtggcgtacacaatcgtggagttctgcatcgtggaacgttcttcccagttcttcagcttgatgatgagtgaaccgtaggaggggccttgaccgcccaagaagctataacctgagataacggtacgtgactgtacggcagggtctgcagcaaccaagctgtccacacggttcaaaatctcttgtgcgcgttcttgtgaagtgcccggaggcagtgtcacagcgcccatgatggtaccggtgtcttcgttgggcaccataccggtcggggttatctgcatgaatacgcccaacagtacaatagagccgataaccagtcctgccgatatccagcgtttctggatgaagaacaacacttgtttcttatacttgcccaagataccgttgtatgagtcattgaaggattgtttgaacttgtcggtagtcatacctgccaacgccagcacactgatgataatcatcaagctacacagaatggggtgttcgctgaagctgaacagaccgaaaatcatgcccaggatagctaccgtcacgaagagcagtgtaatgccgggacgcatcaaccggcctatagagtcggcataacgtgcaatcataatcttgcgggcttccttggcggcaacgcctacacgctctttcagactttcgtgtccgccgttgtgaggtttcaggaagatggcacacagcgcaggactcagggtcagggcgttcagagccgagaaaccgatggcaatcgccatggtcaaaccgaactgacggtagaaagtacctgccgtacctcccatgaagctcacgggaacgaatacggacatcatcaccaacgtaatggagacgatggcaccacccagttcactcatggcgtcgatggaagctgtacgggccgatttgtagccctggtccagcttggcatggacgccctcgacgacgacgatggcatcatcgaccacaatcgcaatggcaagcaccatggccgaaagggtcagcaagttgatactgaagccaatcagtttcaatacgaagaaggtggcaatcaacgccacgggaatggcgatggcgggaatcaacgtggagcgcatatcctgcaggaagatatacactacgatgaacaccaggataaaggcctcgatcaatgtcttgattacctcatgtatggaagcgaagaggaagtcgttggcactctgtgcaatgtttatctttaagccggcgggcagtttgctggaatagtcgtccagtagggcctcgatatccgagatggtctgcgtggcattactgcctgccatctggaaaatgatacaactcacggctttatgtccgtttaccatattgttgaatccgtatgacagacggcccagttccacatttgctacatccttcagacggagtatttcaccgttctccaaggccttgatgacaatgttctcgaactccgtagtctgttgcagacgtcctttgtaacgcagagtatactggtaggtttggttaccgcgctcacccaactggccgggagccgcttcgatgttctgttcgctcaaggcggcaaccacatcgttggggataagtttgtattgggccattacatcaggtttcagccagatacgcatggagtagtcttgtcccaataccatggcatcgcccacaccgttgacacgtttcacctcagggataaggttgatgttggcgtagttttccaggaactcgatgttgtactggtctttttcatcatagatggagaataccatcaacatggaagtctggcgtttacgggtggttacaccgattttggtaacttcggcaggcagcaagccttgcgccatggaaacgcggttctgtacgttcaccgctgccatatcggggtcggtaccttgcttgaagtagatggagatgtcgcccgaaccgctgttggtggcgctcgaactcatatacatcatattttccacaccgttaatctggtcctccagcggagcgataacggagttaagcaccgtttgggcattggcaccttggtaagtcgcacttaccgatacggtgggaggtgcaatgtccgggtattgggtgataggcaaggtagccagaccaataactcctaagattactatcaggatggaaattaccgttgatagtaccggacggttaataaatctatctaatttcatttcatgaacaattaaggaattaaaaattgaagaatttttttatttttcattctttcattgaaacgcagtctgaatattgccttctttctggtcttttagggccttctggtattcggcttccttttcagcaggcgtgatgggcgtgatggactgtccgtccttcaggttctgtaccccttcgataacgattttttcgcctgctttcaaaccttccgtcacgtaataatacttgccgtcgtctaagctgaacactttaacttcggtatttttcagcgtgttgtccggttgcagtacgaatacgaactgcttgtcctggatttcggtagtggcagactgtggaatcatgatgacatcatgcagcgggttggggaataccacattgccggtgcttccactacgcagcacgttgtgcttgttggggaagagggcacgcatggttaccgaaccggtagtctggtcaatgactccgctgattgtctccacgcggccactgtcggcatacatggttccgtcgatgagctgcaactgtacattcggcatcttttccagaatttccttggtgctaccgccttcacgaatctgtgacaagagttggcgttcggtcatggagaagtaggcgtacatttcggagatgtcggcaacggtagtcagcgggctggctacggaaggactaaccaagctacctacgcggtagggaatgctacctactacaccgtcactggggctggttacactggtgtatgacaaattgttcttggcattgaccaattgggcattggcttgtgctagttgtgcctttgtctgtgccagctggttttcggccatttgcaaatcgtagtcactgatgatgtttttcttgttcagttcacgtttgttgtttacagtcagttcttgtgtgtttacggcagctttggctgtttcaacagcagctttggccgaatttacggctgcctgatactgtacggggtcgatgctgaacaacacttgtcctttgcgcactgttgcgccttcgtccacgtgcaattttgtgatgaacccactcaccatcgggcggatttctacatcttgtttacccttgatagtagcagggtagctgtttgtcaagttggcagtggtggtctttgcctcaatcactgcaaattcgggagctttacccgttcctttgtcgccttgtccgcaactgctgagcagtgccaggcaacatgccaataatactaatctactcttcatacacttttttgttctctgtataattttatattcttctttttttcgattcttgaaaggcgtttttgtgtgtaattcatgatttagaaataaggcaggaaaaagaaaactgaatacttctattcagttttcgtctgcaaaaatattcttttcttagtatataaggtgtgaaacacttccttttttaactatgtttcatacatagatgagaacgaaaggacattttttgattaaaatactgtaaagcataccgctaattggcagataacctttatttttgcagcatgttagaacgtaaacgccatactaaaatgaagccgcttttccgcaggttgttggggggtgttgccatagctgccgcactgtattcttgtgccagtgtgggccgtattgaaggaggaccttatgatgagactcctccgcgttttatttccggtactcccacgcccggcgcactccatcacaataaaaataaactttccattgagttcgacgaatttatcaagcttgacaagccgaatgagaagattgtaatatcccctccgcaggtgcagcagcccgaaattaagtctaatgggaagaaggtggtcatcaccctgcaggatacattgaaacccaataccacttatacattcgattttggtgatgccatccaggataataatgaggggaatcccttggagaatttcttctattctttctctacgggcgaccgtctcgactctatggctgtggccggtacagtactgaatgcggccaatcttgaaccggtgaaaggaatgctggtcggtctgcatgccaatctggccgactccgcttttaccaaacttccttttgagcgggtggggcgtacggacagtcgcggacgcttctctatccgtggagtggctcccggcaagtatcgcatttatgccttgcaggatgccgaccagaattttgcctattcccagccgacggaagtgatagcttttaatgactctatcatcattccttccatggaagagcgcatgcgccaggatacgacctggatagactcgctgacagtagatacgattgtagaacgtcaatatacccactacctgccggatgatgttctgctgcgtgctttcaaggagctttccttctcgcaacgttttttgaaggccgaacggttgactccggagaagttttcgctctatttcactgctccggcagacacgttgcctttattgaaaggattgaactttaatgaggaagatgcgtttgttatagaacagcctaccggccggaacgatacgattcattattggataaaggattctctgctctataagcaggattccctgaaaatgagtatcacctatttgtatacggatagcctgaaacgattggtaccccgtaccgatactttgaatgtgctggcgaagttgacatacgacaagcagcagaagcagaagcaggaagcgaaggaaaaggaacagaaagagcgtgagaagaaaaagaagaagttgaaggaaggtgaggtggaagagcccgagccgacggaattcctggctgtagatgtgtatgccccttctgcaatcgatgtatatgattatcttactctgtcgtttacggagccggtggcaagcatagataccaccgctttccatctgaaactgaaagtggactcgttgtggcaggatatcccgttcgactttatgcgcgactctttggacttgaagcgttataatctgtttgccgaatgggcacccggcgaaagctatacatttgaagtggattctgctgccatacgcgggttgtacgggttgttctccgacaagataaagaaggacttcaaggccaagaagctggaagagtacgggcagatattctttaatgtgcatggagcggactctctggcttttgtggaactactggacggtcaggacaaagtgctgcgcacggtgccggtggtggatgggaaagccgatttctatttcctcaatccgggcaaatatggagcgcggctgataaatgatacgaatgggaatggcgtctgggatacgggaaactacgccgagaagcgccagcctgaaatggtttactattatccgatggttctggagcttaaagcgaactttgatttgacccaggaatgggatattaaggccaagtccctggataggcagaagccggacgaactaaaaaaacaaaaaccagatgaagacaagaaaaagcaaaacaggaacaaaaataaccgcagtggcaatagcagccgcaacagtggtagaggccatagctattaggcggaagcaattgttcattctattaatggtgggagcggtctgtttgggaacctcccagtctgttcaggcccaatgtactgcaaagaatgaagctttccagtcgggcgagcatgtcatgtacgatttatatttcaattggaagttcatttggaagaaggtgggtctggcaagcctcactaccaatgccacgacttaccattccgagcctgcatttcgctttaacttgctttgtgtaggcagtaaaaagaccgattttttcttcaagatgcgtgatacgttgacttgttatgtcagcgataggttggagccgctctacttccgtaaagcggcagaggagggaagccgccatacggtggacgaggcttggttctcctactcggacggactggcgaatgtaaagcagagacgcacctggcacaatcccgtgcgtgaggctcaggagatggaatacagtgatagtcgctgtatcttcgatatgttgagcattttggcgcaggcgcgctcttatgaccctaaagactacaaggtagggcagaagatactctttcccatggccacaggacgcagggtggaagagcagacgttgatttaccgcggcaaggaggaggtcaaggcgaataacgacaccgtttaccgctgcttggtattctctttcgtagagtacaagaaaggtaaggagaaggaggtcatcaccttcttcgtatccgatgataagaaccaccttcccattcgcttggacatgtatttgaatttcggttcggccaaggcattcttcaagagtgtccggggcaaccgctatccgatgacgtctgtggtaaggaaaaagtgatgttatccccttttctaaatacactggattcgaaagtggcaatcagttttccctcctggttggtgacgtcgatctggtaatatccggtggtgcggccgatgtagcgttcgcgtgcttcggcatacagtacatcgcccggtccgctgctgcgcaggaaggtgatattggacgaaagagagaaggccaatgttccgtgggagttggctgctgctgccagtgccaggtcggcaagggtgaagatggcccctccttgcgtacggcctcctgcattgagatgctctgccgtgataaccaggcgtgccttgctgtatccttcctttatttctatcagttctacacctgcattcgtggcgaagcggtcgttcttaaaaaactcttgtgcggtcatggggagtaatgattaatgtttagtgattaatgattaatgggtggaaaatatgtgcttccggacgcaaaagtaacgattttagccattaattgaattatttaggcgggtcaaatctgtacacttgctctacttttgcagcaggaaaaatcataaactcttaataaataaatcccttattatgaaaacagtcctcactacattgggaatctccctccttgtattggcaggttgcgcagggcaaaagcaggctgaaagcaactttatccaagaaaacattgataatgctgtggctcaggagacaattcagacagacattatcgaaaaatccggtaaaatccttaatccccgtaccattgataaggatgggaacattgtctatgtacctatcgacgattggtgttccggcttcttccccggtaatatctggcatatgtacgagttgaccggtgaccagaagtggctgccgctggcagagaagtataccgaggatttggattcggtacaataccttacctggcaccatgatgtgggctttatgattggcagcagctacctgaacggataccgttttgcgggtaaggaggagtacaagccggtcatcatacagacagccaaatcattgtctacccgtttccgccctgcagcaggcgtacttcagtcatgggatgcagacaaggggtggcaggctgaacgtggctggaaatgtcccgttatcattgataatatgatgaacctcgaactgctgttcgaagcttccaggctgtccggcgactccactttctataacatagcccggaagcatgccgatacgactatggctaaccatttccgtgaggacaacagctgctatcatgtggtggattatgaccccgaaaccggtgaagtccgtaagagacagactgcacaaggctatgccgacgagtctgcttgggcacgtggacaagcgtgggccttgtacggctataccatgtgctatcgctatacacacgatgccaaatacctggagcaggctgaaaaggtctacaactttatcttcaacaacaagaatcttccggaagacttggttccctactgggatttcgatgctcccaatatcccgaatgaacctcgcgatgcttcggcagctgcctgcacggcgtccgccctttacgagctgagtacttatctgccggataagggatacaaggaaaccgccgaccggattatggaaagcctcgcttctccttcctaccgtgccaaggtgggtaccaacggcaacttcatcctgatgcactctgtgggcagtattcctcacggtgcggagattgatgtaccgctgaattatgccgactattacttcctggaaggattgatgcgtaaaagagacttggaaaaatgaaaactcaattaaatattttgttaggtggtttaggtttgttcgccttgcagggctgtaaagccccgcaggcggaacaatccgtccagccgaatgtcatttacgtttttcccgaccaataccgtaaccaggcgatggagttctggggccaggaaggttttcgcgagaaagtgaactttcggaatgacccggtgcataccccacgcttgaatgattttgcccgggagtcggtggtattgacatctgccatgagcaactgcccgttgagcagtccccaccgtggttctctgttgacgggaatgtatcctaataagagtggtattccattgaattgcaattcgagccgtcccatcagctccctgcgtgaggatgctgtgtgtgtgagtgatgttttctgcaatgccggatatgactgtgcctactttggcaaactgcatgccgactttcctacccccaacgaccccgaacgtcccggacagtatgtggaagaccgtgtacctgcatgggatgcctatacgccgaaagaacgtcgtcatgggttcaattactggtattcttacggtacctttgacgaacacaagaatccgcattactgggatacggaaggccgtcgccacgacccgcgcgagtggtcaccgttacacgaatcgggcaaggtggtgtcttatctgaagaacgaggggaatgtacgcgacccgaagaaacctttcttcattatggtaggcatgaatcctccccatagtccgtaccgttctttggacgactgtatggaggaagatttcaatctctataaaaaccagcctctggacagcttgctcgtccgtccgaatgccgactccaagatgctcaaggcagagagtgcacgctactactttgcttctgtgacgggtgtcgaccgtgctttcggtcagatactcgatgccttgaaggaactcgggctggacaagaataccattgtcgtgtttgcctccgaccatggagagaccatgtgtagccagcatacggaagacccgaagaattccccgtactccgagtccatgaacgttcctttcctggtgcgttttcccgataagattaagcctcgcgtggacgacttgatgctttcctcgccggacatcatgcctaccttgttggggcttgccggtcttgccgactccattccggccgaggtgcaggggcgcaactatgcaccgcttttcttcgatgaaaaggcggatattgtacgtcccaccggcgctctctacatccagaacctggacggtgagaaggatgcggaaggtatggtccgttcctacttcccttcgtcgcgcggctttaaatcggcgcgctacacgctggcgctctacattgaccgcgaaaaccataagctggtcaaaagtttgttgtttgacgatgaaaaggacccgtatcagatgaataacctttctttggaagaaaaccaagaagtcgtaaaagacctttgcgcagagatgggcaaagtgttgaaagaaattgatgatccttggtataaggaaggtatcttgaaggatatgataccttattgattggaaatgggttatagataatcctccataaattgcttgaacgttttttgcgacccgcttcgactgatagtgaactatttgtcggagcgggttgtttgattcagagtggaataaattaccaatacgtattaagtaaatgatggagatgaagtatagactatgggcttgtttgttgtttttgccgatggtcctttgggcgtccgggcgtccgaaagtggctgtcgtactcagtgggggtggcgccaaagggacggcgcatatcggtgctctgaaagtaattgaagaagcgggtatccctatagattatgtggtgggcactagtatgggggccattgtgggcggtttgtattctatcggatataccccacagcaattggacagtatggtgaatgcccagaactggaaattcttgctctcggatgcccccaatcctaaggatgtgttgctggatgaccggttgaagtcggagcgctatgtactctccattccgttttctttgaaatctgccgctgtttcggatgcgggtatcataaaagggaagaacctggcacgtttgttctccacattgacagaaggttaccaggattctgtggattttagccgtcttcctattccgtttgcctgcgtgtcggaaaatctggtgaatggcagcgaagtagtgttccatgagggaatactggccacttccatgcgttccagcatgtccattcccggtgtgtttgctccggtagacctggatggaatggtgttggtggacggtggaatggtgaataactatccggtagatgtggcgcttgccatgggggccgactacattatcggggtggatgtgcagagtccgctgcttaaggcttccgagctgaaatcggtgaaagacatcttcgggcaaatcattaatctgcaaggagagaagaaataccgtgagaatctgcgtaataccgacgtgttgataaaggtggatgtcaccggctattcggctgcaagtttcaccaaagaggccatcgacactttgatggtgcggggagagcgtgctgccatggacagttgggacggactgcttgccctgaaacggaagctgggacttgcagaagattatcagcctcgccgcccgggacctttccgcttgcccggcgcggctgttgatagggagattcccgttgattcccaaatagccgcccctgctgtacgggagaacaagctgaatgtcggttttcgttttgatacggaagaactggcggcgttgcaggcaaatacggacttctatttcggccggcagcgggagtcgctggccagcctcaccgcccgtctgggcaagcgtacactggcacgactcggatatagttatcagtgggacggtggatggcaggcaggacttgcctatcagttcgactataaagatatgaatatttataatgaaggcaaacgggcgctggatttgacttttacacatcagctggtccgtatgggggcggcgaaggactggaacaatatccaggtcagtttgggcattgactttgattactaccactatcatgatttgctgtcgctcgacccgttggcttcggcactgtttgagaattcgtccttattcagttactttgccggacttgtgttcaacaacttgaatgagaggagcgcccctacaaaaggcatgtcgtgggcggtatcctaccatctctatacggataacctcttccagtataaagacaacaatcctatttctgttttcgatgcccgttggcagggatgtttctctccgtcgagtaagctcactgtcactccttcgttttatggacgcgtattgtccggaagcgataattatccttttgccatcatcaatatggtgggggggaccataccggggcgctatatgccacagcagataccgtttacgggtatcaaccgtgcggaactgtcacaagccgcattgctggttgcagggctgaacctcagacagcgtatcttgaaaaaccagtatatatcagtgatgggcagttatgggcgaaactccgggaagtttcatcagattcttgactcttccgaatcggttgatatggcaggggtaggcatcggctatatgtacaagagttttctgggaccagtggagatacaattgaattggtccaaccagacgaagaaagtagggtggtatgccgggttcggattcgtattctaacagggatgtatcaaaatacacaatcaccataggattatacagattttatttttcagttaaaagaacagaagaacaagagagagaaatatgttcttttgttcttctgtctaaaacttaccccaatctgtatgattctgtggtgagttatgataccttcgttatttattcagcttccattcgcttccgtccttaccgtccttaatctcgaaaccgagcgcggtgagttcattgcggattttgtcggatgtagcccaatctttgttggcttttgcctttgaacgctcttccaatagcatgtccactaccttgccgaaggcagcttcacgctcttcgttggaggcgttgtcttcttgtaatcctaagatgtcgaagcagaagaggtggaaggtttccttcaattctttcaggtcttcggctgtgatggaatcgtttccagctaggatattgtttaccatcttggcgccgtcgaagaggtgggcgatgacaatcggtgagttcaagtcatcattcatggcttcgtaacacttggcacgcagggatttcacgtctatggtggaggttgcagcaggggtaatcttgtccagtccatgtacagcatccatcagtcttgccaatcccttttcggcggcttgcagagcttcgttgctgaagtctaccgtactgcggtagtgggcttgcagggtgaagaagcggatggtcattgggctgtaggcttgctccagcatggggtgtgtgcctttgaagagctcttccaatgtgatgaagttaccgtaagacttacccattttctgtccgttcacggtcagcatgttgttgtgcatccaataatgtaccatatcttccccttgggaagctacggattgtgcaatctcgcattcgtgatgcgggaagataaggtccatgccgccaccatgaatgtcgaagtgctcgcccaagtatttctttcccatggctgtacattcggcgtgccagccggggaagccgtcgctccacggggaaggccaacgcatgatgtgttccggttgcgcacatttccagagggcaaagtctgcggggttgtgcttctcgctctgtccgtccagttcgcgggtggtgttgagaacatcatccaggttgcgtccggagagcttgccgtagtgatggtccttattgtatttttctacatcgaaataaacggaaccttcactttcgtaggcatatccgttcttcaatatctcctttacaagttctatctgttcgatgatgtggccgctggcatgtggctcgatactgggagacagcacattcaatgcatccatcgccttatgatagcggttgatgtagtactgtgccacttccattggttccagttgttccagacgggcttttttcgcaatcttgtcttcaccttcgtcggcatcgtgctccagatggcccacgtcggtaatgttgcggacatagcgcaccttgtagccgatgtgcgtcaggtagcggaacagcaggtcgaaagtgatggcagggcgtgcatgtcccaagtgcgggtcaccgtacacggtcggtccgcagacatacatgcctacatgcggtgcatgcagcggtacgaacagctctttttttctatttaaagtgttgtaaatggtcagttgatgttccataacagttgattattagttcttttaggagtacaaaggtataataaatctgtgaaaatctataatgatattctgttttataagagtaaatgcaacggatttcaccttcgtttattacttttgtatccatgaagtcagataaacgtgtattgcttggcatgagtggtggcacggatagttccgtggccgccatgaggttgcaggaagccggttatgaggtgactggcgtgactttccgtttctatgaggcaggagatgagaccgggtatttggaagatgcacgggctctggccctgaagctggggatgaaacacattacctatgatgcacgcgagcttttccgttcgcgtattatccgctattttgtggaagagtatctaagggggcgtactcccgttccttgcacggtctgcaataatgagctgaagtgggcgctgttggctaaaatagccgatgaaaaggggatttattggatttctaccggacattatgtgcgtaaagtcttgtccggaggaaagtattatatagctcctgccgcagataaggacaaagaccagactttctttctgtggggattgaagcaggacatcctgcagcgtatgttgcttccgatgggagatattacgaaaaatgaggcgcgctcgtatgcggcggagcgtggtttcgggcaggtggctgcgaagaaagacagtataggggtgtgcttttgtcctttggattaccgttcctttttaaagtgtgaagtccccgaaacactattacccggtaaaggtagattcgtcgatgaaaaggggaatttcttaggatggcatgagggctatccgttttataccgtagggcaacgtaggggcttgggtatccatctgaacaaggctgtttttgtgaaagagacaagagtggaaagcaatgaagtcgttttagctccgctctcttccctctacaggcaggaaatgtggctgggagactggaacctggtggagaatagtcgtgtgctgggtgcaaacgaggttattgtgaagatacgctaccgtaagcaggcaaaccggtgcagggtgactcttacggtggaaggtctgttacgtgtccgtctgatagagccgctggaatccattgcacccgggcaggcagcggctttctatgataaggacggatacttgttgggcggtggaattattctctgaaccttacattcgttttatagcttctcgaacaaaagatagtaaatgttgttaattttatgagacgtctttttatgagaaacttttaaaacgaactgtaatatgaaaaggatatatattgtaatgttgtttgctgctttagcaaccataacttatgctcagacggatgataaaggttatcaggagggagcttgggtattgaaaggagtgactggtcttaatatgtcacagactgccatggccaactggtcggcaggaggtgagaattccattgctggaaatgcctacttgaatgcatcactgacacacaagaaaggaaactggctctgggtcaccaacatggtgctggactatggcttgtcgaaaaccaaatctcaggggatgaggaaaagtagtgataaaatagggctttccactcagttgggatattctacagacaacgtctggttctatacactgatgggtgatttgaatacccagtttgccaaaggatatgactatcccgacaaagagcaccagatttccaatttctttgctcctgcctattcgaatatcgccctgggtatggaatggaggcctaagagtaactattctctactgctttcacccgtttccaccaagatgactttcgtgactgatgactatctttccgatttgggtgcttttggtgtagacccgggtgaccacttcaagatagagggtggcgcttttgtgaaagcccgtgctgaattgcccgtgatggagaatgtgaatctgattactacggctgatttctttactccttacagcaaagattttggaaacatagatgtgaattgggatgtacttatcagcatgaaaatcaataaagtattgtcggctaccatcaatacaactctgaagtatgacaatgatgtgaaaacgtttgatgacaatggagtgaagaagggcgccaaggtgcagtttaaggaagtgctgggaattgggctggcatataatttctaatccttgaggctgattgttgaaatgaaaaagtaaagtcaaaacgtactgactgatttgtaaaacgcggattacgcagattacatggatttattaatttatccgcgtaatttgcgtaatccgcgcttgatttttatgatatagtaatttaccggtttagttccagcatttcctctatatactccctcgtgttgctgagccggggcaccttatgctgtccgccgagtttccccttgctatccagccagtcatggaagaggttgggacgggcgacgatgatttccagcggttgcagcgccaggttattctgccttttagcttcatagtcggagttcacctctttcagggtgtcgtccaatactttggcgaacttctccaggctgtccggcatttgtgcaaactctatcagccactggtggcggcatttggcatgcttgtccataaacacgggagcagcagagtaatctactacttgtgcaccggtctcggcacatgccctggcaagtcctctttccgcgttatccacaatcagttcttcgccgaacgcgttgataaagtgcttggtacgtccggtgatgacgaacttataggggttcttcgatgtgaacttcaccgtatctccaatcatatatcgccacaaaccggcagaagtggagattaccatggcgtagtttttgttcagctccacctcctcgaggcagaaggtacgcggattctccttgcctacatcttcaagcgggatgaactcgtagaagataccgtagtcaatcatcagcaacatggcagggtcggcagggtcgttctgcgtgccgaagtagccttcggaggcgttataagtctctacataatgcatcttgctgctgcggatcacgtctttgtattgctctcggtagggagtgaaggcaacgccgccgtggaagaacacctccaggttgggccatatctcctcaaggctctgctttcccgtcttttccaatatatgtttgatgagtacaagcatccaggacggtacgccggaaaggttgcttacatttgcatggatggtttcgcgggcaatggcctccattttgggctcgaagtgctccatcaaggctgtctgcttgctgggtacgcggacaaagtttaccagtgggttgatattttctatgaggatggcggagaggtcgcctacaagactgtggttggtgttcaggttgggagcgtggctgcctccaaggataagccctttaccggaaaagaaacgactttcgggattctgtcccagatagatggcaacggcatcccggcctcccttgtaatgcgtgtcgtgcaaggactcccggctgacgggcaggaacttactcttgtcgttggtggtacccgatgatttggcaaaccaacgtatttccgaaggccaaagcagattttgctcaccggcacgcaggcgggttacataaggttttacttcttcgtaagtttgtatgggaaggcgcttcttgaaatcttcataagtacggatagaggcatagtcatgcttctttccccattccgtgtttgccgctgtccggacgaggcgctgcagtacaagctgttgcaattcaccggcatggctggtgtattgttcgatttctttcagacggggagcaaaatataccttattcagaaactttgtaatattcatcgttctttgtgaaatcttattttaaaccgcaaaaataatcttatttatcggcatctctatcttttttctcttttttttctatctttacggacctatagaacaataattcaaacaaaaatatcatgagaataggtattttgacttcaggaggcgactgtcccggcatcaacgctaccattcgcggtgtatgtaaaacagctatcaaccattatggaatggaagtaattggcattcacagcggttttcaggggctgctgaccaaggatgtggagtcgtttaccgaaaaatccttatccggtttgctgaacttgggaggtacgatgctcggtacttcgcgcgagaagccctttaagaagaacggcgtgatgtccggcgtggacaaaccggcactgatagcgcggaatatcgaagagatggggcttgattgtgtagtctgtatcggcgggaacggtacgcagaagacagccgccaaactctctgctatggggctgaacattgtgtctgtacctaaaaccatagacaacgatatttggggaactgatttctccttcggattcgattctgccgtcagcattgctacggatgccatcgaccggttgcacagcacggccagctcgcacaaacgggtgatggtgattgaggtgatggggcacaaggcaggttggatagccttatactccggtatggcaggcggtggtgacgtgattctgattccggagattccctataatatccaccgtatcggagaaacgattctgaatcggctgaagaaaggaaagccttactccatcgtggtggtagccgaaggtatacagacggacgggcggaagcgtgccgccgagtatatcgctcaggagatagagtatgagacgggtatcgagacccgtgagactgtgttgggttatattcagcggggcggctcacccacaccttttgaccgtaacctttccacacgtatgggcggacatgccacggaactgattgccaacgggcagttcgggcggatgattaccttgaaggggaatgaaatagcttctgcaccgctggaggagattgcgggcaagttgaagctggtgacggaagacaatgacttagttgtccagggacgtcggatgggaatctgtttcggctaatttttcttgtggggattcttcaacagcttctgccatgggattttcttctgtggaggtttctgttgcatggtttcgctccttggctgcctggacttcctccttgaaagcggcatccttaatttttttcaatgccatctgtgccgcattttgttgcgactccttcttggaataaccggtgccggtacctgccgatatcccttcgatgcggacttcggtgtggaacatcggattgtattcttcgtcgagaaactgctcgataagctcgaatgacacctccattttgttcttctggctccattcgatgagttttgacttgaagttgacctctttgcgagacatcttgtcgaggtcgatatagtttttgaaaatcttctcttccatgaactgcttgcagcggtcgtagccctggtccagataaatggcgccgatgaaggcttcgaatgcattgccgtacatgtagctgttgtgggatgaggagcgggtggagtatttcaccagtttgtccagtccgatttccacggccagtttgttgagtgtttcccgctgtacaattttggaacgggtattggtaaggaaaccttcgcggcgtccttcgaaatggcggtagacaatatctcctacaatggcgtcgaggatagcatcgcccaagaattccagccgttcgttgttgatgggacgtcctttttcggagcgcatggagatggatttatgcagcaaagcctgctgatagaccttgatgtcacgtggaaagaagccgagaattctgtaaaaacaaaaataagactctctatccttgcggaacaagagccttattttatctatttggttacgtaacacgaccttattattctgcgtatttcttgaaaatgacacacgcattatgaccaccgaatccaaaagtattggacaaagctacgttcacttcgcgcttttgtgctttgttgaacgtgaagttcaggtcatagtcgatgttttcgtcgttatcaccctcttcgtggttgatggtcggaggaacaatgccattcttgatggcgaggatgcttgcaatggattctaccgcaccggcagcgcccagcaagtggccggtcatggattttgtcgaactgatgttcaactcatacgcatgctgtccgaatacctctttgattgcttttgcttccgaaatatcacctacgggagtagatgtaccgtgaacattgatataatctacttcttcgggtttcatttctgcatcttccaacgcattcagcatcactaacttggctcccaaaccttcggggtgagaggctgtcaggtgatgagcgtcggcagacattcctacgccggcaacttccgcatagattttggcaccgcgtgccttggcgtgttccagttcctcgagaacgagacaaccgccaccttcacccatgatgaatccgtcacggcttgcgctgaacggacgggatgcagtttcgggagaatcattgcgggttgacaatgcatgcatggcattgaaaccacctacaccgcaagcggcgatggcagcttccgaaccaccggacacgataacatttgccttacccaaacggatgaggttaaacgcatcggcaatagcatttgtggaagtggcacatgcagaacaagttgcgtagttgggaccatggaaaccatacatgatggaaatttgtccggcagcaatgtccgaaatcatcttggggatgaagaacggattgaatttggggccgttttccttaccggtcagggcatagttgcccgcctcttcttcgaatgtacggatgccaccgataccggcgccgaagatgacaccgattctgtttaaatcctcattttcgacgtcaagcccagagtcacctaccgcttctttggctactgcaatggcatattgtgtgtacaagtccatcttgcgggcctctttgcggtctatatatttggtagcatcgaagccttttacttcgcatgcaaactgagtcttgaaaagcgatgcatcgaaatgagtaataggtcctgctccactaaccccattcacaagattttcccagaattcgggaacactgttgccaatgggagtaatggcgccgagacctgttactacaactctttttaattccatgttataaacgaatggataagattacttagcgtgttcttcgatgtaagatacagcatcacctacagtaccaatcttttcagcctggtcatcgggaatagagataccgaattccttttcgaattccatgataagttctacagtgtcaagagaatcagctcccaggtcgttagtgaagctagcttcgttagtaacttctgattcttctacgcctaatttatcgacgataatcgctttcactcttgatgcaatttcagacataactttaagtttttaattaataattagttttatttctttaaatttgcggtgcaaaggaatgaatatttatcattcctcgcaaatatttgatgaattaaatgcacctttttgcacatttttcacggttttgtgcagtaattggagggattatgggaaaaaatatcgcagttttagcgtcgggaagtggtacgaatgccgagaatatcatccgttatttccgggaaaaaggttcggcatgtgtggctctggttttgactaaccggcagaatgcgtttgttttagagcgtgccaaggggctgggagtgccttgtgtctggtttgccaagagcgattgggaaagtggagagcttgttttgtcgacgcttcgagagcatgatattgattttgtggtattggcaggattcctggcacgtgtgccggacaatattctgcatgcttatcccaataaaatgataaatatacatccttcgttgctgcccaagttcggtggaaagggaatgtacggcgaccgtgtgcacgaggcagtgattgcttccggcgaaaaggaaagcggtattaccatccattatacgaatgagcattatgacgaaggcggcattatctgccagcagaaatgccccgtattgccgggcgatacgccggaggagctggcgcaacgcatccaccggctggagtatgaatactatccgaaggtgatagaggagttggtggaaggcctctctcccagttatttatagaatcggttaagggagaggatggcctcgttcagcttacggttgtctatcttgtaattttccaggggattcaatgcactgtcgctgatctctatatatccggaagggtgtttttccagaatagtatgattttctacgataaaggcataattgagattgtcgcccacgatatgccagttccgtggacaagtatcggttattaaatgccccatactgtaatcggaaggcggattggttacacccagcactttattcattagggttggtgcaaaatcatagtgcgtggtacggtgatggtaggtatgtggctgttctcccggttcatataataggaaggggatatgtgtttgtaccggtgaataattactgccgtgtccccaataatttttatgattctcattgaattcttgtccatggtctccggtaatgatgaccagggtattgtctagcagtttcttttcctcaagtttgtggaggacgcatcccaccagtgagtcggcttccgccacgcagttgtagtagaggttcaggaaaggagtagggtctatgtcgttgttcagtttcatatagtcggcgaactcccaggacggttggaaacgataaagcttgtccttcggtacttcatatccgtgtgccaaatcatagaagagaaaggaaaagaaaggttttgtaccgctgcccagcgtatcgagtgcttgcagataatctgctgtaatacggcagtcgcggtcataaacggtttttccttcggtatgggtacgcaagtcgggtacctttgagaaaagtattttggcaaatggcgggttgacgattgtagcactgggataaatacctatctgataattctgcttcaatagttcttctatgagcaggggctgtatgcccgatacctcaaaatcagtccagtagatggatgagagactgaagaaaagcccgaagatacttccacgtgtgccattgctgctgcttagatgggaggtgaatctgctgcaactgtcggcaaagtggctgatatgaggtgtaatgtcctggttaaaggcgcggtagttccatgagtctatggctatcagcactacattcttggggttggaatggacttcgtatttcaaagaatctatcggatagttgaggtcagcagactgctttttgttgttgaagttcattttaatgacatccttggatgagaccactcctaacttcatcatcaggcgggttgccgtaagcgggaagtaatagggcaggcagggggcgctgcgaatcactgaagtcttttgcgctacagcggcataggcatgataaaagttagagaatagtgcaaacaaaatcagagtggcaagtacaggacggaagccacagcggtgaaagcgggtataacaatggcctgcaagtattcttagcaaagtattggcggcaaatatacccactaatactcctgcaatcttcagataaagccagaagctgaatgtgaaaatctcactgttgccctctccaaccaggagattcagtacaaaaccattgatatggaacttgtaaagactgtacacactgccgtctatgtaagcaagtatattgagtaatgatacaagaataatgtgtgtgatggcggcggcttgatggcgccggacggtaatggctacgattaaggatacgatataaggaataagtgcccacaaggcggcatgtgagcaagcggccgttatataaaacatccagcctcccacgtccatcatggcgagccggggactgtgaatcagataaaacagaaattgtatggcaatcgtcagagttgaaattgcataaaaaataaatccttcactgagtgatttctctaactgtattttttgcattgatattgtaatgttttgcctatagtttcctctgattcggcattgatagtaaaggcgtgaggagcttatatagtgacgtcttttgtattatcgggctgtatttctaaatgtatgtgctactttgggatataagtgtaagcatctttttctcttcgtagcgggtagtctccccgcaatttttcaaattgttcgggatgtgttttcagtgcttcgctgtcccttctcgggtcatacatttgtagatatgcttctgccaggttgccggcggtaataatcgggttccggggttgggggggagcgatgcggtagtcggctttgatgtgaaagaaacggcaaagggcatccagagacatacgggtggcattggcttttccgtcggctgaataaccggctatatggggagttccaaggaacactctatttaataaggtaagattgatatcaggctcattctcccatacatcaatgatggcatcggaaatcagtccgtcttctaaggcattcaggagcgcattggtttcaatcacctctccacgtgaggtattgataatgacgggacagcgttttaatgaccggaagaaagtatggtctgccaaatggaatgttttgtatggcccttccttatataaaggtacgtggaaggtgaggatatcacattctgctgcgagtgcttgcaaggaactgaaatcgctctctccttccttgtcttgccggggcaggtcattcttcaggacacgcatgcctagttcttgccctacttgggctattttgctacccacattgcctacgccgatgatgcctaatgtcaattcggacagttgtactcctttgagttgttgcaataatagtaaggctgattgcacgtattgggctacggatgctgaattgcatccgggggcattggtccaagcgatgcctgcttcacggcaatattccgtatctatatggtcgaagcctatggtggcggtagcaatgaagcggactttactgccttccagcaattccttgttgcagcgggtgcgggtacgtataatcagtgcatcggcatcttttaccaactccggagtgaagtctctgccgggagtataaatcacgctgtcggctattttttcgatggcttctttaatgaaaggtattttgttgtcaacaatgactctcataatgctgctgttcttttcgacgattttccatcgtgcgaagatacgactaatccgtcaaagtggctaagtaatgcccggaaaataatttgactctttccgtttttaagtttgcatttctgccctcaccgctctcactcttttcttcaacttccctattcatcggcattgcaggggtgggtgagagcaatcgaaaagggtgagggtaaattttgctctcacccgtgttttcttccgttccgtatccttctttcttctgttgcatccttttcattctttcgttttacttttggattcttcagcagcccacgttagtgagccgtaatgttcacttgagtgaactaaatagctcactagtgtggttgaattggttcataacagtgggccgatgatgaataaagtagttttcgggaaggagataaggtgtttgaaggataaaacaatgggccagtacggattgaacaatggggatgtgcccgattccgtacttggtttttgtaacagacagcaagtgattgctcatctctatcttatgttttataggtgaatttgtgtttttgtcaaaaaaggaaagcgaaatagactgctatatgaggattatcttgtacatttgcagctgaaactttttagagatgagaataggatacgacggaaaacgggctgtgcagaattttacgggattgggcaattacagccggtatgtggtgcagtcattgtcagcctttgctccggaaaacgagtattggttgtatgctccggtacaccgtgaaaatcagcaactctcgtcgatggtggccgaaagccggggaacggtatcggtacattatccatcttattggctctggagaggaatgacttcgttgtggcgcgtgggaggtatacgcaggactttgaaacgggacaacatacggctgttccacggattgagtaacgaacttcccctgaccatccatcgggtacgggaagtaaagagtgtggtgactgttcacgaccttattttcctgagactttcacattgtttttcgttggtcgaccgcttgatttataactacaaatgccgctatgcatgcaagcatgcagaccacatcattgctgtgagtgagtgtaccaagcgtgacatcatacattattatggaattcctgcggataaaatttccgttatttaccaagggtgtagttctctgtatgcctgccgtgtcggtaaggataagcgcaaggaggtgatgcggagttatcggttgcccgaacgctatatcttgtcggtgggcaccattgaggagcgtaaaaatgcgctggccattgtgaaggctttggagtatctgcccgatgaactgcattttgttctggtagggagacccacagcctatatccatcagctgaaagagtttatgacaaaagccggattgcaagacagagtacattttctgcatggtatcccttcggacgatttacctgccatttatcagtcggccgagacttttgtatacccatccgtttacgaaggttttggcatccctattcttgaggctttgcattccggcattccggtggtagcagcaaccggctcttgtcttgaagaagcggggggggagcattcattgtatgtgagtccccacgatgtggagggattggcagcggcgattgcccgtacacaagagccttctttgcgtgccaccatgattgaggaggggctgaagtgggcacagcgtttcacgcaggagcagatggcgcgtgagacgatggagtgttatcggaaagtactaacaaaagaaatctaagatatgaattatttggaccgaaatgagtttaactatgcaccttcgcaagaggtggtggaggctctaaagaattttgatataaacaaactctgtttctatacccgtatctacgacgaaggcaagaagagcattctgtccgtttatctgtccgagacttacggaatcgatgaaccgcaggtactgttgggttatggtggagaagatatattgaaacaagcagtccactatttcctgacccaagaggatgggaacaagacgatgctcattcctaaattctcgtggtggtactataaatccatagccgacgaggtgaacgggcgtacgctgcaatatccgttgtatgaggatggcaatacctttaaatatgatttcgctgccatgaaagagatggtacagcgtgagaatcccaaggtcttattaatcgcttcgcccaataatcccaccggtaacggtctgacccctgtagaactggacgctttgttggctgagttgcccgtaacaaccatcgttttggtggacgaagcctatgcctctttcgtatctactgatacggactatattaagatgctggttgataaatatcccaacctgattatttcacgcacgctttccaagttctacggattgcctggattgcgcatgggttttgggtttatgagtaaggagttggccaactttggcaaatacagcaacaaatatctgggttataaccgtatctctgaggatattgctattgccgcactgaaatcggatgcgcattaccggaatatagcacggctgatgaatgagagtcgcgcctgctttgaagcggagatagggacgttgcctggtttcaaggtatatgagtcggtggcgaactttgtccttataaaatatccgattgtcttgaaagaacgcttacagaaagcttttgccgacgaggattataaggtgaagttcatgaatgaaccagacatcaatacccatttgcgtattaccttggggcgtcctgaacagaaccgtattgtcattgacaccattaaaaaaattgcattacaatgaaagcggttatattggctgcagggatagcttcgcgtttgcgtccgttgactgataccactccaaaatgtctgttgaaagttggagagcgttgtttgctgcaaagagcctttgatgcattgctgcagaatggctttcgggagtttgtcattgtcaccggttatagacagcagcagattgtgaactttctggaagctcattatccggcattggaggttacgtttatctataatgagaaatatgcttctaccaataatatctactctttatggcttacacggccttatgtagataaagaggacattctgttgctggacagcgatatcctttttgacccgcagattgtagccaagttgcttggatatggtcaagcggatgcgttggctctgaaccatcatacattgggggaagaggaaatcaaggtaatagcggacaatgatggcaaggtgttggaaatcagtaagacgtgctccatatcccgagctattggcgagtctattggcatcgagaagatgtctgccgcttatacagaagcgcttttccgggaattggaggttatgattaccaaagaaggtttggataatatcttctatgaacgtgcttttgagcgtctcataccgcaaggacactctttctatgcgcttgacactaccgaatatttttctgtggagcttgatacggtgaatgactttgaacaagcacagcggttgattccttcacaactttattaattaatgggctgatttttatggcagattatgatatacgtcctttgcagcttcgtattttgaagatattgcttgctgtggataaagtttgtaaagaacatggtttgcgctattatataatggccggtactatgcttggtgcagtccgtcataagggatttatcccttgggacgatgatttggatatcggtatgccgagggctgattatgatttgttgatgtctcattccaaggaatggcttcccaagccttatgaggctgtctgcgcagaaaatgatccgaattatccattaccttttgccaagatacaagatgcggatacgactcttatcgagcgtatgcatttgaaatacttgggaggtatctacttggacgtatttccattggacggtgtaccgcaaagcaacctgaaacagaggattcattttgcccggtatgaattttacaagcgggtgctctattttatctaccgcgacccttataaacatggaaaaggtcccggctcatggttgccgctgctgtgccggagactttttactactgccggcgtacagaggagtatcagaaatgtgatgaccacctatgactttgacaagtcttctttagtctgtgattatgacgacggtatgcgcggtattatgcccaaggcagagctgggagctccgactcccgtttcgtttgagggcgaaacagtgtggggagtacaagattatgacgcctatctgacccgaaaatatggagactacatggttataccgaaacaaagcgggcagagacagcataatttccactatttggatttggataagccctattcttcacaagaaagttccaattctattttataattttgctcttttagggaaatgttagacaaatgtttttttccaaaatttccataagggaccgaaatctttggttaataaataaaatatggcttttaggcggccgcgtattaggcttattttgaatctatttcctgttttgaaagttcctatcttttgggatttgaaatcttttcctttgtaagtgaaaactttgcggaatgtggatgaagtcatgccccattttaatagaaattgcatttgaccacaattcttgcgtatgcgggtagttgattttgtttcaaaatgatagatgcgactggcttgtagccctttcatgaatctgactccacacatatataattttgcggtgaaatctgggtcgctgtacattccgggtgagtattctatactataaccgcctactaaatcccaaatgtcccggtgtacgatattgggaggaatggtagctcccatccagtcgtttattttgtagttcatgtattctttcagtaatttatcttcttgaaaagtttcgatactgtctccataattggctaagatggttgatgcgctttgtgtatgtggttgtattgatgtagctgaaagaaagaaataattgtcagacagtttttctatttcgtcatagagaaccttgtcccaaaaagggagtacatacatatcatcattcaaaaatagaatataatcagttttgactttagtgcgcatcatattcatagcaaaacatactccgatattctgctcagaatgtgtgtaatcaatacctgctttttttatccactctaaggttccgtcacttccatcgtttacgtgtacaatgatttggtgattgtagtaagagtttctttggatactttgtatgcatagttttaggaaagcaaggttattccatgtaggtataacgattgaaaataatctgttttgagattttatagctgtcatcttttgctaattgagaaaataagtacaaagatatttatataaatggagtttttgattataattacttgaaaacatttatattttataatatgcaaaaacaatattggtgtgaaatatactgttttatgagtgatatataatacctctagatttcttgtagacaatagtttggacttggattgaatttttatgtttgtgttttgtgtaggctgatgttctatattgtatgattagcctatatcgctatttgcgaaacttgaattaagttattacttttgtgccgaatcagcaattctaataaatttgttatgaccaaattcttaattatccgtttcagttcgataggggatattatccagtgtatgggaattatcggtggaatacgtgaacggtttgcagatgtggaaattcattggattacccggaaagatatggtggggaccttgtcgatggatggcaggattgataaaatctgggcgtttgacaaggagaccggacttgccgggttgttgaaaatggcggctgatttgagaaaagagcatttcgactacatttatgacgctcatagtaatatccgttccaacatattgaagctgatagtgtctccattgccttttgtgaaaccttacgttgctctgcggagcaaagagagaggcaaacgctttttgttgttcaaactgggaatcaaccatttcgacaagcctttcagggggatggtgtcttttcagaaaccattgaagaaatggggaattacgcattttccggacaactatcacgactggcatttcccggatgaaatacgtagcaagtatgagaactttgtaaccaaagatatgattacgctggtgccgtctgccaactgggaaatgaaacgctggcccgtttcctattggaaagaattggttgcccttcttcctgagtataaatttgttattctggctggtccgaaggatactttctgtgaggaaatcagaagtgctgcaccggaacgggtagttaaccttgcgggacaaacctcattgatggagtcttcttacatagtgttgcgttccaatctggtaatcagcgctgatacgggttttatgcatgccgctgatttgttccgtgttcctgcttttgccttgatgggacctacggccttcggtttccctacgggacctacggtggaaatactcgaaacagccctgccttgccgtccgtgcaccaaagacggacggggtaaatgcaagctggctgtttatcagaagtgtatggtggatattaccccccaacaagtcgctgaaaagattattgcttctcttggttgatggcgcctatagtctttgtagtggaataaccgtctacgaaagggatagttactgtttcttgggcgtactccctgcctacaatgttttctatggcatagtcgccaccttttaccaacacgtccggtgcaactgttttgatgagattcagaggggtatcttccgtaaaaatcactacgtagtccactgcttccaaggctgccaggactgtggagcgggcgttttcatcattgatagggcgcgattcccctttcagacgttttactgagctgtccgaattcaatcctacgataagtacgtcccccagtcttttggccttttccagatagcacacgtgtcctttgtgcagaatgtcgaagcagccgtttgtgaatatgattttgcgctcctgcgcacgcagttgttttatagtatctgcaagttgggaaataggaataagtttgctggccggtttcccgatttgtagctcgtcctgcaattctttgaacagaatggggctggtgcctattttcccgactacaatgccggccgctttattggcaagataaatggcatctgcaatagggataccggctgccagcgcagctgctaaagttgccacgacagtatcgcctgcacctgaaacgtcatatacttcccttgcttcggtaggaatgtcctgcgaggcatcgggagctatgtatgacatgcctttttcggaacgtgtcactaatagagaagtaaggttatactccttcagtatccggtctgctgcgctatggatttctttatcctcatttctcacatccactcccgaaacagccgaaagctctttcaggttgggggtgatgatggttgcggaacggtatttctcccaatttgtccctttggggtctataatgaccttcttcccttgcccggcagaggcggatataacctgctggcatactgtatcattgcatactcccttgccataatccgaaatcacgacaatgtccacttcggggagtgcacgcttcacggcatccagcagtttctgctcagtctcttcgttcaggcattcattttctgtttcaaagtccagccgtactacttgctggctgttgcctattacgcgggttttggtgatggttgggtgttctgtatgaaacagttcgtttctgatacccaaatcagcgaacatctcctgcattgtgtttccgttgtggtcattgccaagcaggctgacgacatacggcgagcaacccagtcccaacagatttcttgcaacattggccgctcctcccaatacattgtaggtacgggtgacacggaccactggtacgggggcttcgggagaaatccttttcacgtcccctatatggtaagtatccagcatcacgtctccgataacgagtaccttctttccctttatactgtttaattctgtattcataataggttgttttttaattggtttgcccagtatataagcggatgttcctctgtgacccggaaagacttgacaccgcttcgctcgccgcattccgtatccgacttcttgtctccgaacatataggattgggacgggtcgatgtcatacttcttcatcgcttccatcaccatgaaaggagaaggcttgcggcattcgcaatgttcctccggagcgtgggggcaagtatagaaatcgttcagtataactccatgtttctccagctcttgggcgagtgcccggttgaacagttcggcgtcctccggtgtgaaatagccacgtccaatgccggattggttcgtgatgacaatcagcagataacccagttcctgaaagatgcggagtgcttcggctacgccgggcagcaattccagctcttggggcttataaacgtagccgaaatcgacattgatggtaccgtcccggtcaaggaaaatcgctttattcatgagaaaacagtttattgtcgacgatgccgcacaggatatgtccgatggtaatgtgtacttcttgaatcctggcagattcggtgtgctgtataatcagcgggtaattgcaaagttccttgcaccttcctccattccttcccagaagtcccacggtgatgattcccatggactgcgccttttgcaaggcatactctacgttgggggagttgccgctggtggaaaggcctatcagaatatcacctttcgttcccaaggctgccgtctgccgttcgaagacgcattcgaagccatagtcattgctgactgcggtcaggatggaagtgtcggttgtcatggcgatggcgggcaggccttcccgttcggtcacgaaacgtccgacgagttcggcagcgatatgctgggcatcggctgcactgccgccgttaccgcaaagcaagactttgtgcccttgtcgaagggcttgtactatcagattgccgacgttttcgatgtcggcaagcatttgccggttgttcaggatattttctttgagcctgataccttcttggatggactggatgatataatcttgcataattttctaatctcgttggtacaaagatacgacatttcagaaatgaagcttgcttttgacgaaatttttaaattgtctttgctttctccatttcagtctgctgaagagagtgaagaatatgcattcttcaatatcgaatcctctttgctcggcatatagaggtattattttcatgaagtcatcggcgggaatacccagttggctgaaggcattcatggacattctgataccgggtactttaccgagcttcaggcggttgatgtcaatgagggcgaagtgatatttgccgtttgtcttccggtaaaatatattcttgggattatagtccagtggcaagaccttgttcagatgtaattggagagtgaagtctacgaggtcatgtcttagccgttttttctcttcttcctccatttccgtaccgaacatatccgtaacaagcgggtaggggaggtattcggaaataaagtatccggtgtggaagaaaccattctttttgatttctatataagctaccggaggggcggtctctattccccgttgcagaaaaagttctgcatattcaaaggcgcgctgcgctttgcttttgcggaaccaagtgtaaatgaggcagtttatgagggcaggtcttttgtatttcttgattacgaagtccttgtctccgaaccgcactctttcgactgtgttccttcggttacaataaacctcttcccgttcatattcttccgatgggatggctcggatataactctcgtaggcggcatagtgcggatgaatatgtaccttcattgcttttatttacattttacttcttttgaacggtgcaaagatagtgcaaaccgaaagcagaacaaaatgaacttgttcattttttattttgaggtgccgcctatcttcgcttttgagcaaagataatcaaaatgtatcatctggtcggaaatatcgtatgcttttttagcgaactcggcttctgccggggtgggctcttcacctaccacctccatttgggggctgatggcgaatcctttcttgcatgggtcgaggatgctttggcccaatccgctccagtagtaatcatccagttggagcaggttcagtaaggtggggtacatatcgatttgtcccatcactttatcataacgcatgcctaccggagagtttactatgatgaaaggggtgaatgtcttgtcggatacgatacccttgccaccgggggcgttacacaattcttcacggtaggtagccagtccttcgtggtcaccggtgatgacgataagggtctcgtcgtattgtgggagtgttttcaagtactccacgaattttcctatcgccttgtccgtatagcgtgcagtggtcatatagtcattcattttctgtggaatggccggagagaaatgaatctctttcaattcttcaggcaatttgaagggagcatggccggagtaggtcaccagctgcatgtaaacattctcccccttcttccagatttcccccttctctattttttggctgcattgcgccaggaaggagccgtctccggtacgtttgtgcgtgccaaaggcttctgtcagttcaaagtcatgataagcaatgatggtgtcggtcccgaaactgtaggctatgacgccttggttccaggtcgatactttatcaatggtcaggaggtagttgcgcgagttcttctgctgatgcatggctttttgcagggttccgtaggtgtggtcaggatattggctgctgtatgtgccgctgttgataggcagcataccggcgcaaagcaacagctgtgcatcaatggaacgtcctcctttcacttgcgtcagtacgtggggagcgtataaggaggtggagtcttgcagcagtttgttgagatatggagtaatctcttgcccttccacttccctttcgagtacccagctttccaaagattctgccaggatgacgatgcagttgttgcggattccgatacgtccggtcaaagggtgatgtccgggtttctggctcagccactcctttatctcttgctgtatctgtggggtggcctcctgcttctggttgatgaggtcatagtataggcttccgaagacagtatacatggaagtggtgcttgcacacagataggctttctggcggacggtgttgtatgcttccttgaatcctcctttggccagggtggtgatggcaaacagcaggataccgattcccaaagctcctccgtaatacttgtatgatgttcttccggcggtatttcttttgtaatgccaataaagggggatactggcaatggtagatagagggaagaagatgtcgtaccagcggaaagagtcgtaaacgcttccggtgaaatcggcgaggtttccagaaagtccatagctgttaagtgggatggcagtatagtaggtgcggaaatacatcaggttgacaatcagtagtatatccagcaaaagcatgatgactatctctgttttccagagccggaagaacttataggggacgagaagtacgagggtggctattattttggttgcataaaattcgatggtagagaatgaagcgaatgtggtggttatgctccagatgaaatcgaatagcaggaatttgaaaaaaatggtgattccgaacaaaagagtcactttatctgttgccccttgttgactgtcggagcaatgaaaaaggtttcttctcataaaatagtatttttaaaatattggggtgcaaagatagatattttagagaagaaaaagcttcataaacagcaacttttggaggaaaattgataaaagtcatttttttttctggattgatgcagtatatgcagaattcttgtatttactttgcagacgtttaaagcaaagaaagcaaaactgttacaaactaagggctggattttattgttctattggtaatttgaggtgacgattgtgtcgttgccgtgatattttgagtgtatgaagaagcattatttatttttcgtttcggtagcctattcctatcctatacttcgcccgcttcaggacgaaatcaggcgtagaggagacgatgttgcatggtttatcgagccagactgtccggttctgttgaatcaagatgaaaggtggcttcaatctgttcaggaagtgatggattatcagcctattgctgtttttgcaccgggtaattatatttatgatttcttcccgggagtgaaagtttcccttttccatggctaccccatcaataagcgtggcgatgaaaaggatgaccatttttctgttcgtggatggttcgatgtctattgcacacaaggagaaacgagcactcttccttttaaggagcttgagaggaaatacggtttctttaaggtatacgaaactggctggtgcaaggcggatactttcgtgaaggaacgtgtacatactcctcataatgcacgtccggtagttttgtactcttctacgtttacaaaaaatataacttctgctcctcatctgtttgataccatcaagagactggtgcgcgagaagaactgggattggattatttcgttccatccgaaattctcggatatggaagtcctcaagaaatacaaggaactggctgcttcctgccccaatattactttccacgagagtggacttgttgatgccaagctgctaaacagtgcagatgtactgttgtccgatgcttcgtctgtgattgttgaggcgatgatgttggacaaaccggtggtgacttattgcaacaccatgccaggagctcatttgctgaatgtcactgagacggatgctgtagaaggagctattgaaaaggccatttcccgtccggcagaactgatggagcggatgcgtgcttatgtgcacaagcatgaagcccatctggacggtgagtcctcttcacgggtactggatgccgtaaacaactacatctggtattttcaaggtaagaccagaaccaagccctggaatctggtgcgtaagtttaaattgcgatggcgggtgggctatccgttgatggccactttgcggttatggtaggcgatagataatctgtcggcctatttttttgttttataaagtatgaaatctgcataaattttatggataattctcctatggtgagtgtaatacttcccaattataatcatgttgtttatttgaaagagaggattgaaagcatcctcaatcaaacctatcagaactttgaattgattctgctggatgattgttctgcggacaatagttgtgatattttgaatgcctataaagaacatccaaaagtgtcggcattagtgttgaatgaaaagaatacaggcaatacttttcttcaatgggataggggcattcgccttgctaaaggaaagtatgtttggattgcagaaagtgatgacactgccgatattcattttttggaggcaacagttgccgcattggagttgaatccaagtgcaataatgtgccttactggttccattctgatagatggacagggacaaaggatgaaacgtaagagccgtgaccgttggaaagaaaccggagaagtgaaaacattcgatggcaaagaatatgtaaaacataatctgttatataggaattatgtgtataatgccagtatggtgcttttcaagagggaggtttacgataaactagataagtcctttcagcaacttcgctgtgcgggtgattggcagttctgggtagaagtggcacaggaggggaaagttgtagaggtacgccggaaattgaattacttccggcaacataccaataaagtaaccagcaggtctaaatatacaggggaaggaatgttcaatacgatagatgtgatgtcgtatatgttttcttgtacagacgttggctggtatagaaaatgcttggtgaggggagagtgttatagacttatagcgaaactaccggtttcaccggacatccgtgcccgtctgtatgttgaggcaagagggaaaatgggggttctgccagtacattactatctggaacgtataaataggatattagcatttgtgattccttttcttcctactcatagaaaagataaattcaaataaaggtacattatataaaagaggatataggaatgctgtcaattatcatttgctctatttcaccggaacgattgcaagaaatcagccaaaatatacatgctactattggagtggaacatgagattatcgctatagataatcgggagaagtgctggtctatagctcgcgcttataatgaaggtgctcggcaggctcgctatccttatttgtttttcgtccatgaagatgtgaaattccattcgcaggattgggggacggttgttgctgagaagttggcggaaccgagttgtggagtaataggttttgcaggaactaaaataatgttcgactgctattcgggatggatgcagcatcgtcgttttgcttgtacttcttatttacaaaaaaaaggaaatgtgacggcattcactgggttcaatgtggtacaaggagagtggtttgcggaagttgtagcagtggacggtttcggaatgtttgtccgaaaagaggtatggaaggcatatcctttcgatgaaaagatgctgactggatttcattgctatgatgttgatttctctttacagatagctgtaagcaaacgatataggaattatgtttgttgctcaccggaagttcaagtggaacatctctcggaaggtaattataatcgcaactggtgccaagatacggtcaggatgtataatcggaaatggaatgttattttgccgataaagatagatgacctttgtcttactaaaagggagatggaaagatatagagaaaagagctttaatcgtttcttgcaaaaatcttttaaagttgatttccctgagaagaaagaagttttgatggcttttttgtcttatcctttttctttagaacatttgttgcattgtatttcgggagtatatagatatttagtagggaaagattcttaactttgtaaattgattattgtcatctgctaaataatttagataaaatataaacatattgtatggacgcattaaatgaaaagggtatggtgtctgttattgtaccttgttataatcaagccatttatttgcccgaagccttgaactctttattggctcagacttatcagtgctgggaagcgatagttgtgaatgacggttcgcctgatgaaacagaaaaagtggcattggagtatacgcggaaagactcaagaattaaatatgtattcaaggaaaacggaggattgtcttctgcgagaaataaaggtatagaattggctcagggagaatttatattgccgttggatgcagatgacattatacatccggagtatatggaaaaggcgatggaggcattcgaggacaatccattcctgaaactggtattttgtcgaggagtttttttcggagtaaaaaataaggtttggaatttgcgttatgaagggtatgaggagttgcttcagagaaatcatattttttgttctgctttttttaggcgcagtgattgcatggccattggcggctatgatgagaatatgcggaaaggacacgaggattgggagttctttatcaggttgttagatgaaaatagtcttgtgtatcagataccctctccactcttttattaccgtgtcaaggagcaatctatgataactgcggcaaagcaggccgatgtatttaatgaaacggagttttatatctattcaaaacacagaaccctttatgcttccttttttggaggcagtgcattgcacatcattcgcgaactgctttatctgcgcaagaagcgcgaggcgcatagaaataaatggtatagaagatttttccgtcaatatataaaaggactttttcacaaatgaaactatctgtcataactatcaactataacaatgctgaaggactggccaagacaatggacagtgttttcagacagcgcttttctgactttgaatatattgtcatagatggtggcagcactgatggcagtaaggacttgattgtgaacaatcaggataaaattgcttattggtgctctgaaaaagattcgggcatatataatgccatgaataaaggcatccgggaggcatctggagagtatttactttttttgaattcgggtgattttcttcatgactttgctgtattggaggacattcatccttttttgtcgggcgaagacattgtttacggggatttgctttttgtacacggcgatggaaaggaggatttgtttgtatacccggatgtcttgagctttgaatattttttggaacgctctttgggacatcctgctgcttttataaagagagcattatttgaggggtgcctttatacggagacgcttaagattgtttctgattgggaattctttgtgaagaagatagtgcttgaaagctgttcttatagacatgtcgagagggtgataagtatctttaatatgcaaggcatcagttctgtctctttaagtctttgtgaggaggaaaagaaatatatcctgcagggaatatttcctcccatgatactcgactctttgcagttggctgcttgcctgaaaaagcagcctttgtttgaacttttccgtgagatgagcaagacacaccgtttccagaagagggtaaagcctgtcctgaccttcttgctgaaattgaacaacgctttctctatgcggaaatgaatggtcagaagactgcttttgctactttccggtagacaagttcggtttggcgggttgccttttcccaagagtaaagtttaatcctttctttgccggcaagtataagtctggtgcgttcagcttcgtcgtatatcacacttttgatagcttctgccatcgaagaaacagagaatgggtcgaaatatgccgctgcattttcggcaatttcaggaaagcaagaggcttggctcaaggctacggggcagttgcaagtgtaggcttctaaaatagggatgccgaaaccttcataataagatggatatacaaatagcagagcacggttgtataattctttcagatgctggtcgttgaccgaaatttgcagtgtatgcggagcgatgcctatacgtgatattaattctgattcagcctttgaaaacggtttgcctgcacatattagatgtagatgtgcatctgtttgatggattatactgaaagcttctgctaatcgttggaaatttttgtaggatgtccggtcaccaacaaacaaaatgtatctttggggaagatgtagattaggcttgcttatagtggattgtagactacaaccgtggtagataacgtctattttttgaggggatatgcctaatgtttctatgatatctttcttggtatgttcgctaatggctataatgtgattggcttttgtgataatttctttcttctgttgaataatggatatggagtcttgaaacaagtctggatatttttcataggtcatgtcgtgtacggttatcacaaaaggattattgcctatttgcttaagaaaaaggggattgtaatatgtcggatgatagacaaatggagcgtgtttctgcatcagctttaagattagtttggcgttgctttgatacagtttctgttgatgatacttaaagaacaaatgggggatgtagataccgtgtctcttgattttactattcaatagataatgattttctgtatagcgtactgcaatatcgtaattaaactgtaaattggacatgatttcacagaaatagcgagaaatgccgccgaatttctgctggtcgaaaatttgtgaatcatatactataaagggctgctccatgcttgtctatatattgtaatacgatgcaaaggtaaaggaaagttttgaagttctgtgattgaaatgatttttatatcttttatattgtgtatttttgtgcccttcaaagttatagtgtatggataaaaaagatattgtagtagtagtgcctatttatttacctgctctatcagagatggaagcggtgtcgctgaaacagtgcttggatattttgtctgattactccatagtgattattaagcctgaaaatctggatatttccaatatacaatctcaatttttactccctaaggtaatatctttcccagacagatgtttccaaggtattgaagcttataatcgtttaatgcttgacgtggctttttatagaactttttcgagctatacttatatgcttgtttatcaattggatgcttatgcgtttaaagacgaattgttcttttgggcttcactggggtatgattatattggtgcgccgtggatgccgcaccaaagaaaatattggaggtttcctactcgtttcgtctggtttgtccagcgttgcttctggagtattttctatcctaagaatctgcgcagaatgaagtattgttggtttcatgttggtaatggtggcttttctttaaggaaaatcagtaagatgatagcagttacagagcattacaaagctataattgataagtgcatggcagacagtaattcttttttccccgaagatgtctttttgcttttgaatactcatgataaagaagttcatttgaaacgtccttcttacaaattggctatgaaatttgcaattgagcaaattccggcatggtcatatagggcaaatggatgccagctccctttcggctgccataattggacgcatcctgagatgctccctttttggtctcaattcataaagctcggttaaggagcatgaccgcatgatttcttccggtgtggtttgctctttccttggaccttgtttggtgcttggtttgaaaacagtatgaataaagtagtattattaactatacgtgaattcgatatagctgtactatcagccatcacagccatcagcttcgttcaaaacctcttttgattcatatcgaattcacgttaatatagtgtttctgttatgtcttggagaatggttagggtttgattatatatccgtcaattccgaaatattgttcaccccatttagctttggcatactctacggtcgcatagctgttggtgtaccaagtgtcttttgtgtgtgtgctcttgagatgatgcagtggtacagtattgggttgctcgtcagcatatacatatccatctattccataatactgttcattccatttctttttagcatattcaacatcagcgtaactgaaagcataccacgtgtctttggtatgtatgcttttcaggcgatgcattggttttgtattgggtgcaggttctactaatacaaatcctaaaaagtcagttaaataatcaccgcttacttgatttatatagtttacgtcatcttgtgaaaaaacccaccagttgtcttttgtgtgtggactttttatttgaaacattggttttacctctataatcggacgaattttgcttttgatgtatttttctgcagcgtctttaatttgctgtttttttatagggtctttgatgaattcgtatatggggtatgtcttattgaaattaatttctgtcaatacacaatgcgttttgtcaacagactgctgccatccgctaagattgaatgtgtggttggttgctccgtcggatgttattgtgattgtatgaccatcgtgctggccgccatacatgttgacgttgcatgaccagttactatttctcctttggtattgttctacttcggttgtagtagaacttccggagaaggagaggttaaccgttttaatggcaccagtgatgcctcctttggcaattttggttttagactctacttttagattgtcggtgatagttgacttatagaatatagaaaggcgtccacctacattgaagtcgataagaatatgtgttccgaattcttcaataatggcatcaggagaggctgtagaaagtctgctcttaaagtatggagtgaggtagtcggccaaaactgtggggtcagcataaagttggtagcgttctaattgcttgatttggtcgacccgaatgtaggtctctttggtcgtaatggaagtcttattgcttgattctttgtcaaaagagacatttgctgaaaggctatagggtacttccttattggaggtgtctgtgctggttgccccatcttttttaggattgatttttgcagcaaccgaaccactaaaattcgttttattgatgatgtcttttacatagttcatgtagtcttctccagcataaaagttgtctttgatttcacctacatattccactttgtataattggggatttttcgcatagaaacctgcaatatctaatacttcgttttttatggattgtctggcaagatattctccggttatatcataaccgtagcctaatacttgatattgaccatctcccattgacttcgttgttggcatttgttggtcttcttgaacaaactgctcgtcaaaagtgttggtgcagctaatggcgaatattcccattgtaatgatgggaataaaaagaaaatgttttttcttcataattctggaaattaatttagtttgccttttgaaaggactggtttaacgcgtattcagtcctttcaataggttcgttttataaattggtgatatatatcacttccttgtcagttggatgtttctatagcgtgaagctgccatataggaatgcttcatcggactctatttgaatggagtagttgccgcatgattcttcatctaggttgatgctgatatttgttggagcatcgtatgtttctgaatagacggtttcaccggttgattcattgatgaggaggatggtgacggtgggtaatacctcgttgaagtcgacacataccgtattattatataggtaggcgttggcggtttgaatgatactacgagatataggggtatctcctttactagtcggattttttctttttgcttggattagggcgatttctgtaaaaggattgttctttttttgtgcgtatgtcacaatattgcttaaaaagaatgtcgcaattaagatagacaatagattcttcatcattatacacttttttgattattgatgccgcaaaggtcggtttaatacggcaggataagtgtataatattgtataatttcggtgtataatggcgtataatattgtataattgttgtacttgctaatgattgttatgattggcaagatgattggagattcttttttaaagcttccttaagagatatctctttgtgtgcaaatcccattttgttttctaatatgcggtctgcctttttgtaaatagtatcccgttcgcagctcaatatatggcaaaaatggcttatcgggaggtttgtcaggtacagacaacataagtagatttcgtcttctgtcaggtgatattttgattgtagttcccgggcaatattattccaacatttgttggtttctgcaattagttgtagccagtcaccttgatgcattatttctgattctgccttttctttatgagagcggatgattagagtcatcttgttgtatacctcagattgttcgaatagaacaagtcctgccttatgcggcatttctttttcggtttggttattgggcttttgttttcttttcttataggataggatgattacagctacaatgagggttaatatgattattgatatacctatgatacgataatgggtgtgtttgctgattatgttttgcttgttgcttggcatcccttgttctgcgcagacaatggcatcgggctgtctggacttctgcatgctgtccaaataggcagagtagttgcgttccatctctaaggaagtagctaagtctccttgctctttggctatgtctgccagatacatgtaagccccggctttggtggcatagtctgttgtgaaaagggatttttgtaggtagtagcgggcagaatcatattgcaatattaggtaatatgcgcttccaagtagttcgaaagctttgtagcatgttgtgcggtctttctgtacgccaagattctgtttggcgaattctatagctttctctccgttttccatccagttgtatagttggcatagtgaggagaacacattttcttttaattgtatgttggactgtttttggacgatagcgagtgccttcaacatcattttttcggcttcgggatagaattcttctcctttttccatacagatgactcctcgtcgtgacagaacttctgcttgaagaacagagtcctttagctgaatacctatttgttgtgccaattgatagctggaatcggcttgtgtatttaggttttgtgaatagtatagataacctatattcaggtagataagacttaatagacgtctttctcctgctttttcagccaagggctttgctatgaggtattgagtcatagattctgttcttctctgtgaatcccggtagacgcagccggaatagtaatgggcccttgcccgcttttctatgtcgtttgtgccgttgtagtaggtcagggccgattgtatcagggaatcattggtttggataatgtagttcttatctcttgcttctgtcattaataggccataataagcactgtcagcttgggtctgcaggctgtttgtcgggaatgcttcgagcatagatagggcagtgtccggttgctgaacgatgagcgagtcaattgcaattaggtacttattatagttcactcgggtattgcaagcaatgaacagaagtacgattaggacagatagggttgcgataatagcttttctcatgtggtgaacaaagttctcagttaagtcgggtgcaaaggtacatctttttcattatttactcatataattgcttgggcatattgaagtttgaagaaaattgtgtggaagttaggagtaaagatggaaaataaatgagccggctattattaagatgacaatgtatgagtgtacatggtgctggagaagtatgcaaggacacaaaagaaagtagagaatgtgggcatttaggcagaaataacctgaaacccttttccattccctcgttttcttgtatctttgcgacctcataattcacttaactacaagcaatgaaggaatttctgcagctgatgcgacgctttgtgtcgccttacaagagatatatcggttgggcaatcgtgctcaatgtactgtctgccatattcaacgtattttcattcacattgttgattcctattctcaatatcctcttcaaaacgggggagaataccaaagtgtacgagtacatggagtgggggagcgaaggcatcaaggaagtggcggtgaataatttctattactacgtcacccagatgattgagacacacgggccacagatgacattgctgttcatggggctcttccttgctttcatgaccatgctgaagacctcctgctatttcggctcttctgccattatgattccccttcgtacgggagtggtacgcgatatccgcgtgatggtctattccaaagtgatgcacttgccgctcggctttttctctgaagaaaggaaaggggacatcattgcacgtatgagcggtgacgtaggcgaaattgagaactccattaccagttcactggatatgctgctcaagaatccgatcttgattctgctttatttttccactctgattgtaaccagctggcagctgactctgtttactgtcctggtattgccgggtatgggctggctgatgggaaaagttggcaagaaactgaagcgtaagtcgttggaagcccaagggaaatggagtgataccatgtcgcaattggaagagacgcttggtggactgcgtataatcaaggcttttatagcagaagacaagatggtggaccgttttaagcaatgcagcgacgagctgcgtgatgcaaccaacaaggtagccatccgtcagtcgttggcacatccgatgagtgaattcctcggtacgctgctcattgtattggtactgtggttcggtggtctgcttattctgggcaacggcacttccatggaagcatcaacgttcatcttctatatggtgattctgtacagtatcatcaatccgttgaaagactttgcaaaggcaggatacaacattccaaagggtctggcatccatggaacgtgtggacaaaatactgaaagccgagaatcccattaaggaaccggtaaacccgttgccgctgcacgggatgaatgaccggattgaatttaaggacctctccttcagttacgacggcaagcgcgaagtgttgaagcacgtcaatctgatggtgcccaaaggacaaaccattgcacttgtcggccagtccggctccggcaaatctacattggtggatttgctgccgcgctatcacgatgtgcagttaggtgagattacaattgacggtgtgaatattaagaattttcgcatccacgacctgcgtgcgttgataggaaacgtgaaccaggaggccatcctgttcaatgacaccttcttcaacaacattgccttcggtgtggaaaatgcaactatggagcaggtgatcgaagcggcaaagattgccaatgcccacgacttcatcatggagaccgaactcggttatcaaaccaacattggcgaccgtggcggcaagctttccggcggacagcgccagcgcatcagtattgcccgtgccatcctgaagaatccgcccatcctgatactcgatgaggctacttccgcactcgataccgaaagcgaacgactggtgcaggaggctctggaacggctaatgaagacccgtaccacgattgccatcgcccaccgcctttccaccatcaagaatgcggatgagatttgtgttctttatgaaggtgaaatcgtggaacgtggtaagcacgaggaactccttgagaagaacggctattataagaggctgaatgatatgcagtctctctcatagaaataaaattctgcgtactttgcttccacccgcttgtgctaggctgttatgactaaataggaagttaatttcctgcaaacagcctattaattcttctttctcttctatatttcttacgcagaatctatgatgcaggtgggtgttgacggctgccggcagagtgtttcacggctgttaggcgatgatgaataaagagtgttcttttaccttttacgcttttttaacatctgcttgcttccattctatcgctaattatcctatttttgcaaagaacacatacataaacattgcaaatatcatgaaaaaattatatccaacgtctacgacgacagctactatgactatcagtccaagtactcttaatcatgtaattcaattgaccccgataatactataactgtaaatatttaatattcgcctaccatgaaaataaaagttggtttgatagggttcggcagaatggggcaaatgtattgggaggaaatgcagaaaagcggtcgatgggacatcgcatatatctgcgataccgatccggcctcccgagaattggcaagaaacctttccccttcatccagaatcatatccgatgaacaagaaatctttgatgaccagagtgtagaagctgttggtctttttgcattggcaaattccagaaaagaacaaatagagaaagctgtccggagccataagcacatcctgacggagaaacccattgccgacaccatcgacaaggaatgggaaattgtggacctgattgaaaagtatgaccgcattgccgctgtcaacctttatctgcgcaattcctggtatcaccagactatgaagcagtttatcgatgaaggcgagattggcgaacttgccatcctgcgcatctgccacatgactccgggactggcaccgggcgagggacacgaatatgagggtcccgcctaccacgactgcggcatgcactacatagacatcgcccgctggtatgccgacagtgaatacaagagctggcatgcgcaaggcatgcggatgtgggactacaaggacccctggtgggtgcagtgccacggcactttcgagaacggcatcgcgttcgatgtcacacaaggattcgtctacggacaactctccagaaaccagactcataacgcatatacggacattatcggtacgaaaggtatcgtgcgcatgacgcatgacttccggactgccgtggtggagcttcacggcgtgaaccgtacgcttcgcctggagaaaccgtttggcggaaagaacctggataagctatgcaatattatggccgactccatcgagagcgggaaacgcgatccgagattgccgcagatgcgagactcggccattgcttcccaatacggatggaccttcctggaggatgcgcgccgccacgacctgcccggcataggcgacttgcagacgctggaggaaatcagggagcgccggaggcatatgaaagaaggttacggactgctccgtccgaagaagacggtagtctgatgcctactgtaattaaggattgttttaaaactcattatattaaccgattttaaaatctaaagaaccatgtcgaaatttacaagaagagaatttcttaagaccggaggtttagctttggcgggtcttaccattgctccaagcagcattttgggtaagagccacggacacgtgcctcccagtgaccgtttgaacattgctgccgtaggtatcggcggtatgggacacaccaacatcaaccatgtgaaggctacggaaaatatcgtggcgctttgtgacgtagactggcgctacgcgaaaggtgtgttcgatgagcttcccaatgcgaagaagtattgggactatcgtaagatgtacgatgagatgggtaaggacatcgatgccgttatcatcgctactgccgaccatacacatgccatcattactgctgatgccatgacgatgggcaaacatgtatattgccagaaaccgttgacgcactccgtatatgagtcccgtctgcttacccgcctggccgcttctacgggagtagttacccagatgggtaaccagggttcttcggacgagggtaccgacttggtatgcgagtggatatggaacggcgaaatcggtgacgtgacgaaggtggaatgtgctaccgaccgtcccatctggccgcaaggattgaatgttcccgaaaaggaagaccgcattcccaaaactctgaactgggatttgtttaccggtcctgccaagatgaatccatataacgaaatctatcatccctggaactggcgcggatggtgggattatggtacgggtgctttgggcgatatggcttgccacatcctgcatcagccgttcagagctttgaagttgctgtatcctaccaaggtagaaggttcatctacattgttgctcaatgcctgcgctccgcaagcacagcatgtgaagctgactttccccgcacgtgagaatatgccgaaggtggctatgcccgaagtggaagttcactggtatgatggcggcatgatgcccgaccgtccgaaaggcttccccgaaggaaagcaactgatgcagagcggtggcggtctgactatcttccacggaacgaaggatacgctgatttgcggttgctacggacagaacccgtggttactttctggtcgtgtgcccaatgcaccgaaggtttgccgccgtgtgccgaaggctatgaatggcggtcatgagatggactgggtacgtgcttgtaaggaaagtccttccagccgcgtaatgcctaagtctgacttctccgaagcaggaccgatgaacgaaatggtggcaatgggtgtattggctatccgtctgcagggcctgaacaagacactggaatgggacggagccaacatgcgctttaccaatattggcgacgacgagacattgcgtacagtcatcaaggacggcttcaagatacacaacggccatccaagcttcgacaagacatggacagatccggtaaatgccaaagcttttgcagaagagctcatcaagcataactaccgtgaaggctggaagttgcccgatatgcccagataaacattaaaaagagtatcggaacctggttccgatgctcataaacgaatactaatcatttaatttttcagattatgaagaaaatatattattctttggcttgttgccttatcggaggtatgctcgcctcttgcggtggcggtgcaaagaaatcgaacgctacggaggaagctgcagctcctactactactgcggtgtcttattccaagtctctgaaagcgcctgaaacggacagcttgaacctgccgattgatgcggacggttatatcactatctttgatggaaagagcctggacggatggcgtggatacggtaaggacaaagtgccttccagatggattattgaggatggttgcctcaaattctgtggaaccggtaccggcgaaggacagaccggtgagggcggtgacttgattttcgcccataagttcaagaactttgagctggaactggaatggaagatttccaaaggtggtaactccggtatcttctatctggctcaggaagttacttcaaaggacaaggacggcaacgaagtgttggaacccatctatatctctgctcccgagttccaggtgctggataacgccaatcatccggatgccaaactgggtaaggacaacaaccgtcaggctgcttccttgtacgacatgataccggctgttccgcagaacgccaaacctttcggcgaatggaacaaggcaaagattatggtatacaaaggtactgtagttcacggacagaacgatgaaaacgtactggaatatcacttgtggactaagcaatggactgaaatgttgcaggcaagcaagttcagcgaagagaagtggcccttggctttcgaactgttgaacaactgtggcggcgaaaaccacgaaggctttatcggtgtgcaggatcatggcgacgatgtttggtaccgcaacatccgtgtaaaggttctcgactaattccttctaaaaagatagtactatgagaatcaaacatatgatgattttgtcggcactgtgcttatccatgatggccacaagctgcagcagccacagcacggaaacggcgccggaaacgacgaaaaaggaagtagccatccagctctattctgtaagagacttggtgaaggacggcagtaacctcgaccagattctgaaggatttggctgatatgggctataccagtgtggaggccgccaactacaatgacggtaagttctacggcaagactccccaggagttcaaacagatggtggaaaagagcggtatgaccgtgctttcttcgcacactacccacgggttgtcggacgaggaactggcttcgggcgactttacggaagccttgaaatggtgggatcagtgcattgctgcccataaggaggccggtatggagtatatcgtgactccgtatctctccgttcccaagacattgaaagacttgcagacctactgcgactattacaatgaagtgggcaagcgctgccaggctgccggtttgaaatacggttaccacaatcatgcccatgaattccagaaagtggaagacaaggagctgatgctggactacatgctgcaacacaccaatcccgaatatgtattcttccagatggacgtttactgggtagtgcgcggccagaacagcccggtggattacttcaacaagtatcccggacgcttcaccatgctccatatcaaggatcaccgcgagattgggcagagtggtatggtaggttatgatgctatcttcaagaatacggatactgctggcgtgcgccacatcgtagctgagattgagaaatacagctgccccgtagaagagagtgtgaagcagagtcttgactacttgcttgatgctcctttcgtgaaggcatcgtatagcaaataaaacatgatggcggctattcattcataagctcggccgcatcattttcttgacgcgggcacaaccggatgaagaatccggggtgcccgcgtttttttacttccttccgaagtcggccggaatttccccccattgctttgtctcccattttaggatgcgggtggtgtaggtgttttcgcgcaaccacttctccgcacgttctattaggtggaaaagctcttcggtcttggcgtcgcgcggcagtttggtcttgcattttttctgttttatccagttgatggcgttcacgctgtcactgtagatgggcatgtcgaaacctttctgtttcaacaaggcaagtccgtggacaatggcaaggaactcgccgatattgttggttccgtacatcggcccgaagtggaagatttcctgacggctggcgacgtgtactccccggtactccatggcaccggggtttccgctgcaagccgcgtctacggcaaggctgttttccgcgacggcggtggggaggggagcgtcggtgccgggagtagtcttggcaggagagggagccgaccgtttgatgtacgcgtacggcgaagaggcaaaggctttttccgcttcctcgcgtgattcgaacgacttgtatttcgctccttcgtaacctttggtctgtagttggcagtctgtccaggaagtgtagatacccgggctgactcccgcccatacgacgtaatatttttctttcttcataactgcggacaaaggtaaaaaagaaaatccgaacaacttaactcttttatttgtttctttgtatggcggatataaaataaataagagaaaactcaataaaaaaagaaaggacaaaaaatgaagagaacatttgcagaagccatggcgcatcgccgtagttattactctatcggcagcgattcgtcggtgctggatgaagaaatagtacacattattcgtgaagccgtaaagaatgtgccgtcagctttcaattcacagtctacaagaattgtattgctgctgggcgacgaacataagaaattgtggaacattgtgaaggaaaccctgaaagcacgcatctctgccgaggcttttgccaagacggaagccaagattgacggctgttttgctagcggacacggtactgtgctctattttgaagacacttctgtagtcaagaagctgcaggaagcattcccttcctataaggataatttccccacttggtcacagcatacctccgctatgcaccagtttgccatctggactatgctggaagatatggggttgggcgcctccctgcaacattataaccccttgattgacgacgaggtacgtcgcacctggaacctgcccgacgactggatgatgattgcacagatgcccttcggtacacccaccggtgaaccgggagaaaaggaattcgaagatttaagcaagcgtatcaaaatttttctctgatacagaggcgttttcagcttggaattgctacctttgcaggaaacctgtaactcgtagcagatatgatacgtattttcttgaccggctacatgggagccggtaaaactactttaggaaaggcttttgcccgcgaaatgaatgtgccgttcattgatttggactggtacatcgaagaacgttttcacaaatcaatccgtgaattgttcaccgagcggggagaagcctcttttcgtgaattggagcggaacatgctgcatgaagtaggggaatttgaggatgtcgtggtctctaccggcggtggtactccttgtttttttgacaatatggagtacatgaacggttgcgggcagacggtgttcctggatgtacaccccgatattctgttccgccggctccgggtggcgaagcagcagcgccccatcctgcaaggcaagacggacgaggatttgcgcaccttcattgtggaggcgctggccaagcgtgcgcctttctactcgcaggcccgttatcgttttgatgccggttatctggaaagccgtagccagattagcgaatccgtgcaacggttacgccaacttttaggactttaatcccttgtaaatgtgtatttttcagtccgaggagctggatatattagatttatgtgtatttttgtcgccccctttaataagacacactatagtgggaaaatagtaaattgtaaatagtctaatagtaaatgtactgatgagaaaatggcgtattgaagattcagaagagctgtacaacgtaactggttggggcacttcgtactttggtatcaatgacaaaggtcatgttgtggtgacaccgcgtaaggatggggttgccgtcgatttaaaagagttggtggacgagttgcagttgcgcgatgtagcggctccggtattggtgcgttttcccgatattctggacaaccgcatcgagaaggtgtcctgctgcttcagacaggcagccgacgagtacgggtataaaggagagaactttattatctatcccattaaagtgaatcagatgcgtcccgtggtagaagagatgattaaccatgggaagaagttcaatctggggctggaagcgggttcaaagccggagttgcatgctgtgataggggtcaatacagacccgggttccctcgtggtttgtaacggatataaggacgagagcttcattgaactggcactgttggcacagaaaatgggcaaacgcatttttcttgttgtagagaaacttaatgagttgaatcttattgccaagatggcgaagcaattgaaggtgaaacctaatatcggcattcgcattaaattggcttccagtggaagtggcaaatgggaagaaagcggaggagatgccagcaagttcggactgacatccagtgaactgctcgaagcgctggacttcttggagaaaaaagatatgaaggactgtctgaagctgatacatttccatatcggcagtcagataaccaagatacgccgcatcaagaatgctttgcgtgaagcttcgcaattctttgtgcagctgaacaagatgggcttcaacatcgaattcgtggatactggtggcggtatgggagttgattatgacggtacacgctcttcaagtagcgaaagctccgtcaactattccatccaggaatatgtcaacgatgtggtgtcgactttcgttgatgttgccgacaaacacgggttccctcatcccaatatcattaccgagacgggacgcagcctgactgcccatcactccgtgcttatcttcgaagtgctggaaacggcttccctgcccgaaatggacgacgactgggaaccgggagaggatgctcacgaactggtgaaggaactgtatgacatctgggataatctgagccagcgcagtatgctggaaccttggcacgatgcgcagcagatacgcgaagaggcactcgaccttttcagccatggcatcgtcgacctgaatacgcgtgcacaaatagagaaactctactggagtatctgccgcgaaatcaactccattgccagcggcatgaagcactgccccgaggaattccgcaagttgagcaagctgcttgccgacaagtatttctgtaacttctcgctgttccagtcattgcccgattcctgggctatcgaccagatgttccccatcatgcccatacaacggctggatgaaagacccgaccgcgaggctaccttgcaggatatgacttgcgactcggacggcaaaattgccaatttcgtcagctcgcgtgccgatacgaccaccctgccgctgcactcgttgcgcgacaaggaacactactatctggcggtttttctggtcggagcttatcaagagattctgggagatatgcacaatctgtttggtgatacgaatgccgtgcatgtgtctgtcaattccaaaggctacaccatcgaccaactgattgacggcgagacggtggctgaggtgttggactacgtgcaatataatcctaaaaaactggtacgtacgctggaaacttgggtgacgcagtccgtcaaggaagggcgtatctctgtggaagaagggaaggaattcttgtctaattaccgttccggactgtacggatatacttatttggaataaaatggagaaactgactgtaataaaggtgggtggcaagattgtagaagaggaagccaccctctataagttattggatgactttgcagccatcgaaggctacaaggtcttggtacacggaggcggacgctcggccacgaagctcgctgcccaactgggtattgaaagtaaaatggtgaatggccgccgcatcactgatgccgaaacgctgaaggtggtgaccatggtgtatggcggactggtgaataagaatatcgttgccggcttgcaggcgcgtggtgtcaatgcactgggcttgacgggagccgatatggatgtaatccgttcggtaaagcgtcccgtgaaggaggtggattatgggtttgtgggcgatgtgaagcaggtgaatgatgctttcttggcagacctcattcataagggtgtggttcccgtgatggctccgttgacacacgatggagacgggcacatgctgaatacgaatgccgacactattgccggagagaccgccaaggctttggcaggtttgttcgatgtaactttggtgttctgctttgaaaagaagggtgtgctgcgcagcgaagacgatgatgacagcgtgattccacagataacgccggaggaattcaagcaatatgtagccgatggagtgattcaaggtggcatgattccaaaattggagaactctttcgaggcgttgaatgcgggtgtgtccgaagtcgtaatcactttagcatcagccatcaacgggaacagtggaacccgtatccgaaaataattcaaaaaaaaacggcagtagactgtaactttctgaatacttaaccgtcaatttattagagatgcaagaactcagctttcgcaatgacattctcccgctgaaggacaagctctttcggttagccctgagaattacgttcgatagggcagaggcagaggatgtcgtgcaggaaacgctgataagggtctggaacaagcgtgacgagtggtcgcaattcggctctatcgaagcctattgcctgacagtggcaagaaatctggcgatagaccgtagcgagcgaaaagactcccgtaccgtggagctgacccccgaaatggagcaggcctccgatgcatcgggcccttacgagaagctggtgaacaaggaacggatggcgttgatacaccggctgatgaacagacttcccgaaaagcagcggctgattatgcagcttagggatgtggaaggtaaaagctataaagaaatagcagcagtcctgaacttgaccgaggagcaggtaaaagtgaacctcttcagggcgcggcaaaaagtgaaacaaacgtttattgatatagaaggttatggactctaaatatatagaacaactcttggagcgctactggcagtgcgaaacttctttggaagatgaggctgaattgcgtgctttctttagcggaagcgatgtgcccaagcacttgcttcgctacaaggacttgttcgtatatcagcagcttcagcaggaagtgcatttgggtgaggattttgatgcccgggtgcttgccgaagtggaagttccggtggtcaaggcaaagcgcatgacattgaccgcacgtttcatgccgttgttcaaagccgctgcagtagtggcagtggtcctttctatggggaatgtgatgcaacattcatttttctcggatgtagaggaggtggccgcagccgatactatcggtaaacagatttccgcaccgtcggtagctctttcgggagatgtgcccgtgtctcatgaaaagcaggtaatggatagcctgcgtcgggtggacaagggtctggaaatcagtgaatagatattttcatttgcttttaaaataacattttcatttgctttaaacataatagttagtgtgctttattaaaacaacttgaggctgtgaagtttcaattctctcaaaatcttataaaaactaactaaaatagaagggacgccgcgtgatgcagtgtccctttattgttcttatgcgtttgataggatggagatggaaggacatccgttcaataaaaggacgaagagcttcctctcggaagcccttcaccatttcgttaatatatatttcagagagaattcggtttaggctcaattaatcttaaaacctatatttcctatttaatctatgttttctatgttagagtttatacagtcctttcttgggatagtccagttccggattacccttgtagcctacactgccgcttccgctggtgcgtactttcaggaaatctgtggcatggcacttgatgtcgcctgaaccggcaacactggcagatgctttcttggcaacgaaatcggaagcaagcaaatcacccgaacctgccacgctgtattcagcttcttgggtactgccgctcaggatggcggtacccgaaccggcaacggatgctctggtgaagttggcggttacgttattcagcttcatgtcgccggagcctgcaacggatacttggaggtcattgcaagtgatattgctgctgttgatgtctcccgagcctgcgatggaaatgtcgaggtctgtgcaggagatgttgtttccactgatgtcacccgaacctgccacagagattttgaggtcatccgtcttcagtccgtttttcagttccacgtctcccgaacctgccacggcaatgccgttcagcttttctgcggacacacgtacttccagtttattataggatacgctgacgttcttcttgaagccgatgtagagggtattgtccttgacatgaatatccagcaaatcgacaatgttgtccgaggtatatacttccactgtcggtttcccggacttctgcgtgtaggtcacgtcggggctgccggctacgctcagcttggtgaagttgttcacttttatgtctttggtcacataattcttgcttgccttgaccgtcttgccgccgaagtttccggaacggtatgtgtgttgttgtgaacaagcggttgtactgaatgccaataaggcgattgagataaatgttgttagagctttcatattcttttgttttttgtgattcagcatttattagttagacgtgacctgccttgaaaaagttgcatgtagaaatgcttttttcaaaagaaacccgttcagcatactttaatcaattattgtgccataagtgtaagatggtgattgttaaaggataaccgtttttgtgcagtgttcattatcggacactccgtccgcttttgtcaggtatttgcttgcgtttttggacgattctttgttcatttgcaaagcctcttccccccctttcctatgggagaggctttgatttatgacagtaaaccgcattatagaagataaagagcttggtcctttgtttgtccgggtcaatgcccgggcacggcgcctcactttccgtacaaaggaggacggaatttacgtgactgtgcctccccggacttcccttgccgagatagagaatgccatcgagcagcttcgtccgcgtctgaaggctgccatacagaagcaggtcagaaagctgattgatttggattaccgcattgatacggagttctttaaactgacattggtcagcggacaacgggaacggttcttgtcccgttcggaattgggggaaatgcagataatctgtcctcctgatgccgatttctcggatgagaagctgcaggcttggctgcgcaaggtaattgaggaagctttacggcgaaatgcgaagattatccttcctccccgtctgtatatgctttccatgcagcacaaccttccttacaagagtgtgaagataaattccagcagcgggcgttggggaagctgttcggcacaaggcaatatcaacctttcctattatctggtacttcttcccaagcatctgatagactacgtgctactgcacgaactggcacatacccgcgaaatgaatcacggggagcgtttctgggatttgctcgaccggatgactgatggaaaggcacaagcattgagagcggagcttcggaaatatcaaacgaaaataaatggttagagattagtatggacggtaagtagttccttgttttacagacagtgatactgcaaaactactgcatacctcttgcactgtcactgcactccttttgcagtgctgctgcaacacctttgcagtgacactgcaactgttttgcagtaacgctgcaaaaggtatgcagtatcgctgcagtgtcactgcaggagttgtgtaatgtctttgcagtagcactgcaaaagttatgtgatgtctttgcagtggctgttggtaagccaggaaacagcttgtcggctccgaaatatgagagcaaaatgccttacaactttttatccctaattttttgccaactgctttacctcttccccttccttctcgaaccggtattctcctcctttttcgcttagctcaaataaggaaagcttttcagttgcattgtttacaatcatgagtgcgttttgctcggcaaagcgtttcacttcgatggtgaaaggttcttctgcaatggtgcggttcaccagcaggctgtcgttgatgaatatggaagtggaatctccggcaaatcctttcgtcagtgtgatggtgtatgtctcgatgaatttgcgttctccttctttccgttgttgcagcctcatgctcatgtagacaaagatgacaactacaaaaatcacggcgaaagcaaggatgccgttgcctatcataaactgcttgttggtattcagtcggtgtgccatggataaaaaggttttttaagaatggtacaaatgtaatgaataaatttgaaccgaccggctttttacttgctgtattcgctcggcgtcgtcccaaattgtttcttgaagctggtcgagaaatgggacagtgtactgaatcccgtcatgtccgctatctctgagatggtatatttcccttcctttatcaatttggcggcacggttcagcttgtaggtcttgaagaatacgctggggttctcacccgtcagcccctttaccttgtaatagaatttggtgcgggagattttcagcagctcggtcatgcgcgccacgtccagttccggattggagagttcgttttccatcaggtggtaaagttcggtcatgaaggtgttgtcttgcggggagagcacgttctcctcaatctcatccgtttgggtggaacggctcaggagactgcgcactttctcacggttcttcagctgggatttgataagcgccagcaggtagttgggctcgaaaggtttcgttacgtaggcatctgcaccggtattcagaccttccacctggttctctacagtagctttggctgttaccagtatcacggggatgtggcatagttgcaagtcttcctttatctgtcggcagaggtcgtaaccgtttcttccgggcatcactacatcgctcagtacgaggtcgggagcttcttcgctcatggctttgaaggcgctgtcggcatcgaagcggcagacaactttgtagacgggagaaagcagggccttcaggtagtgggccacttccgtatcatcgtctaccaccagcagggtttgcttttgttgccggatgctctctgtgttttccagttgatactgttcttccgtttgtatcggaaacgccttgttctgttcttcttcggggagggtacattcttcgggggtataggagaggtcattcaccggcagcagcagggtgaagacggctccgcttccttcggtacggttaccggctttcagatagccgtgatgcagcagcgccaggctgcgggcatagtacaagccgatgccggttccccagttataggtgcctttggattgattgtccagttggtagtagcgttcgaataccttctccaactgttcctcggggattccgttcccgctgtcggccacggcaactttgacgtattgcgtgtcgatgtctttgtcggtcagcgtaaagagacgcgcagcctcttcgcgggtaatgacgtcgaagcacagttccactttcccaccgttcggagtgaacttcaaggcgtttgaaagcaggtttcctacaatcttgtccagcttgtccacgtccagccacatgaggaaagtatcctccaggccataagtgttcagtgcgatgcctttctcgttggcgttgatgcggaaaatatctacaaagcgttgcagttgcgagatgatgtcagtccgtttcactcgcagcttcagggtgtcattctccagtttgttgaagtccatcagctggttcaccagacggagcatgcgccccacactgcgttgtacgatgtaaagcagttgtttgttttctccctctattttgggactttcgcaaagttgtgttaccggacccgaaatcatggtgagtggggtgcggaactcgtgcgagatgttggcaaagaaactcatgttcatgcggttcacccgttgttcctgctccttctcctgtttggcgcgtcgggcggtttctttttcctgcttaatgcgtagccaggcacggatgaagataccgatgatggcggcggcaataagcagatagatacaccatgcccaccacgtttgccaaggggcgggctttacgatgacgcgtatggaattctccctttctacaatgctcttgtcgttattggttattttaactttgaaggtgtaggtaccggcaggcagattggcatagtaggcctcgcggttgttgcgggcatcaatccaatatttgtcgaaaccgtccatcttgtaataataatgtacgcgttcatattcgcagtagtccagtgcggcaaaggagatgctgaaaccattctgattgtggtccaggcagatgtccggtcggtaggagaggtgcttgtctatactttcgctgtcttgtgggcgtgccaaccggttgtgtatcttcaaatcctcgaagagcagtggaatttcccgtttggtacttacgtccatagggttgaagaaagtcagcccgtgcgtaccgccaaaaacaagtgtcccgtcgggcaggcggcatgaagaacggtcgtaaaactgattgccgcctatgccgtcggcggcatagtagttggtaaatttccctacggtgcggtcatatttgcccagcccgtattgtgtgcctgcccatatattgccttgtgcatcttcctcaatgcaagagatgtcccggcagggtgtaccctctatggtctcgatttttccggtggcggcagaatagtgcagcagtccgttgctgacggtcccaatccatacatctccacgactgtcttcgaagatgtcggtagggatgaatactgaacgttggatacaagcttgccagtcggtgttctcgaatggtacttcagcgctttcccaattgtcgggattgatttgcatgactgggttcatgaaggcagtggtccacatctttccgttgttgcgtggaaggagtccgggtatgaaggttcccgtccaggaaaatacttttgtttggacaaattctttttctttacgctttttggcataaagtttagggctgtatgtacccacccaaattgttccacaacgatcttgtgcaaacgacagtggtaggaagatgtcatgaatagactctgtcttcagtatgccgtttttatagctgcatttcatcaccttgctcgcatagagggccgccagccagatgtagccctcatcatctacgaatacgcgtgtgatgtccggtttgtcggtagcgctttttcccggaagtccagccgagtccacttctttcacttcgtggctgtccatgttgtaaacgtacagcccgtctatcatggtggccatccagagatttcgctccttgtccactgccacggacagcactgactttcggttcaggtatgagctgagatgattattggtgttgaaacgttctttatagttgtaacgcacgacatagccttggtctacagagcctatccacaggtttttctgtgagtcggtaaacatggtgcttatcttgaagtgaggcacttcgaagggaaaaccgttttcgctctgatgtatcacgtatccttccacgtagttgtagagaaacattccttgttggtcggtattcagcagcaggctgttgctgccgtaagggtggatgtagttgacgttggcatgcagcagcaacggatggctccgaagggcttggggtgtttccttgaatttgtgcgtatgtgtgtcgaacaatgttatctggcggtttcccgccagccataggattccgttggtgtgcatgaagaagtgggtgggaaaaatgccttgcattggaatggagtcttccagcgctagtgtggaggagttgtagcggcgcagagacagtggggtcactgcccacagtttgttgctctggtctatgaagcagcggttgttgaaggtatagtttgggtcaaatatcttgatgggtacgtcaaatttgtgtgtttgtggattatatacggcaaggttgtgcatcatgttcagaaaaatctttccgtctttgttctcgagtatttggatgccgtttttattggggaagtccagtgggatattttggaaattatctttgtctgtgtataggctggttccatttacggtgactacccacaaccggccttgtgaatcacggaagaggtcgttgatttgattgtcgggtatatccagcgagtcatccgtacagtaatactgatgatattcgtgtacattatatttgtttacccctcgtgaagttcctatccaaatgtgtccttgtgcatcttcggcaaaggcggtgaccttctgattggagaggtcattggtgatgacggggctttcgatgctgccttccggtgcgggctttgtgtccgacgggttgcatgcggtgattaaacacaatagaagtaagtatttaatgtatttcataatatatagtgtagactaaaagcattggcatgtcatccatttgttttgttcaacgaatctctgcattacgatgcgaaaatactcataaaaattgagagagagactgccggagagcatgttttgaacaaatctgcaaacatttgaacattggagaaagctgttttgaacatcggggaaagccgtttggataacgtagaaaatccttctggggagaatgtgctaatattgcaatcataaaaacataaaactaatacataatatgaaaaagcaattcttgtcagtgttagcattctccgccatcctactttcctcgtgcggagggacagctaaaatagagaaagcatctgcttgtgggcaggagggggagattacggcttcttcggcaaccgccattgccgagactgaatcaggaaaagtagccggatatgtggaaaatggtatctatatatataaaggtatcccatatgccaaagccgaacgttttatgccgcccgtggccgctgataaatgggaaggcgtccgcagcagccgtgcctacggccctacttgtccgcaaggcaagcgcatgggatggtacagcgacgagcaggcgtttgccttcaactgggatgacggttatcctgacgagaattgtctgcgggtgaatatctggacaccgggactgaaagacgggaagaaacgccccgtcatggtgtggctgcatggtggaggttattccgccggcagtggtcaggagcttccctcgtatgacggaacaaatctggcaaagaaaggggatgcagtggttgtgacgctgaatcatcgtctcaacgtcctgggttttctcgacctttccgcctatggcgataaatatgcaaaatcgggcaatgccggactgcttgatctggtggcggcactgcaatgggtgaataagaatatagaatccttcggtggagatgctcggaatgttaccatttttggtcaatccggtggaggaggcaaggtctctacgctacttgccacgccatcggcgagaggcttgttccataaagccattgtacaaagcggatctatgcttcgcacgatggagcaaaagtattctcgtcgcattggcagtgccgtgatggaagaacttggtctgaaggcttcgcagatagacgaactctgcaagatgccgtatgacaaggtgcttgccgccggtgacaaggcgatagccaaagtgcgtgcagaggcagagaaggagggggtgtcttccttcatttttggctgggcgcctacggtggacggcgatgtactgcccgtacagcctttcgaccctcaagctccagcacaaagcaagggcattccggtgatgattggcactactctgcacgaatttaccatgagtacttatgtccccgcttttcgtaccattaccaaagaaaaagcggtggaattcctgcaaaagaaatacggcgaacgtacggacgagttccttaccgctttcgagaaagcctaccccggctatcagcctaaagatttggtggatgtggacttcgtgttccgtcccggtgctgtggagcaggctaaactgaaagctgcgcagcagggtgctccggtctatatgtacatgttcgcgtgggaatcgcccgtacttgacggcatgtttcgcagcacgcactgcatggacattccctttgccttcaacaatgtagtgcgccacgcttccatgaccgggggtggcgctgaagcacaagctttgggcgaaaagatgagcagcgcgtggttgaactttgcccgtacgggcaatcccaatgccgaagggttacccgagtgggaaccttataccgcagaaaagggagcaacgatgattttcaataacgattgccaagtgaagtataaccatgacaaggaactgctggaggtagtgatggcatttcctacacgtgggttctgacactttcttaagaaaccttttattattaacataaatctaatttaatcaaatgaaacaaaatctgaagcaaacagctcggaagagacttgcagctatggcactcttcctattgatctgtcttcctttcagtctggcacaagcccagactataaaggtgaacggtagggttactgacgacctgaatgaaccgatgattggcgtgagtatctttgagaaaggcactaccaacggtgtcattacggatatggacggcaactactctttgtctgtgaaagaaggagcgacgattgtctattcctacatcggctacctgacacaagaaaagaaagcagtggcaggagtaatgaatgtgatattgaaagaagacactaaaacgctggatgaagtggtggtggtaggttacggcgtgcagaagaaaagttcactgaccggtgccgtatcttcggtaaaatcagaagatatggaagcacgtaccattacccgtgctgagcaggcattgcagggtaagactgccggtgtgcaggtgctcagtgcatcggccaaaccgggtgcttctccgcaggtacgtatccgtggaataagctctaacggttcttgtgacccgttgtatgtagtggatggacgtattgccagcgatattggtggtatcgaccctaatgacattgagtctatggaagttttgaaggatggtgcttctgcagctatctatggcgctgctgccggtaacggtgtagtattgattactacgaagaaaggaaaaggaaacggtaaaatcacatacgattttcaatatacttcacagagtttgggtaaagtacccgaagtaatgaatgctgcgcagtacaaggaattcttcttggaaaacaagaagcttacccagagtgcttttgatacctattgggatggaaaaaccgatacggattgggtcgatgaggcttttgaaaacagttcgatggtacgtcataatgtgactttccaaggtggtagcgacagaggttctttctatctgtcattgtcccaccttgataacgacggtatgattgtcggcaatgccgatacttatgaacgactcacgggaatggtaaatgccagctggaaaatcaaaccttggctggaggtaggtaccaataatcagattgagcactacaaaactcagtccgtagccgagggcaatgagtatggtagcatgatgctttctgtattacaattagaccctctgaccaagcctctttatcctattgatgacttgccgttgaatatggctaccatctataaggatcataagaatatgttgggcgatggaaacggcaacctttatggtgtatcagctttcactggcaatgccgaagctatcaatccttttgccatgcgtgacaactcttataccaagaacagaggctttaatatcaatggttctacttatttgaattttatgcctatcaaggggcttaccgttacttctcgtctttcttatcgtttggcttcaacttcctcttatggcgtggggcaatcttattactatactgacaaggctaaacgtgattgggtggaggtttcggcttcggattatagcccaacctattatcagtgggagaactttttgaactacacccgttcttttggcaaacacaacgcaacattgatgttgggaacttcttatagtcagagccgttcttatggcgttagcggaagtaagaagggatataatgaagatactacagatatgtggggaaatgtgattaacagagtttcgcatttgggtttcttgcagaatgatcctaatttcttctactttgcctatgctacatctgatgctgtaaaggatgtaagtggtggtgagcctacctatactcgtaaattatcttacttcggacgtttgaattatgactatgccggaaagtacatggctcagttctcactgcgtgccgatgctgctgacctctctgtgttgccaaagaacaaacgttggggctatttcccggcagtttctttgggttgggttctttcggaggaaaattttatgaaaggaactgaagactggctgtcacaattaaagctccgtgccagttggggacagaatggttctactgcatcattgggcggttataaatggaatgtatcaattggtgctaccgggcatttggctgtaggtgataataataatttctcttacatcaatggttatgctccctctgctaccggtaatgacggacttaaatgggaaacttctgaacaaaccaatataggtattgatgcccgtttcttgaatagccgtttgactgttacagccgattatttccataaaaagacaaaagacctgattgtttcgggcattaaggcttcaactgtagtaggtaacagtttctcgccagttaatgccggtaatattacgaacaaggggtttgaattggaactgggatggcaagatcgtattggtgactttgcttatggtgtccgtgccaacgttgctacattgaagaataaagtgaccaagatgcatgagtctttatcaagtattgatggggctacttatgtgacttatggagccattactcgttttgaggtaggtaagcccgcgtggtatttttatggttatgatttcatgggtgtggattcaaaaaccggtgagccaatctttagagatattgatggtgtagaaggtattacggataatgataagacagaaattggtaagggaattgccgactatacttatggtattaccttgaatgcagcttggaagggatttgattttatcttgtttggtacgggttctcaaggtaacgatgtgttctgtggcttgaaccgtgtggattacaatttgaatcagctgacttattttacaaaaaaccgctggacagaaagcaatcgcaatgggaagactcctgcatcaggcgctacagattataccaagtatctgacttcttccggttgtgtatttgacggttcttattttaaaattaaacagattcagttaggttattctttcccgaagcaactgattaagaaggtagcaattgaaaatctacgtatatatggctcacttgaggacttctttacttttacagactatcctggttttgaccctgaagttaccggtgtcggaaattcattaggtgtggataaaggtagttatcctaattcaaagaaggttgttcttggtttgagtgtgacattctgatttttatgaacttattaaaatgaaaaacatatgaaattaagatattctttaatgctcggagcgctccttatattggctggcacttcgtgtgaagacaaattggatatacctcaaaaaggtgtattggacttttccacttattataaaactgacgaacaagctcaagcagcggctgatgcgctttatatacaactcaagggtacatactataactatacgatgatgaagaatgccctttcggacgatgtttgggcaggtggtggtggtcgtaatgacaatgcagagctggaaggctgtaatgaatattcatttggctcagaccaaagttttatcggaggcgtatgggaaagctactatcagcttatttataaggcgaatgtgattctgggacgtgttgagcctgatactgatttgaagaagaaggcttgtgctgaagccaagttcttccgtgcttttgcttattttgatttagtttctatgtggggtgatgtaccattggtagaccatgaacttgataaatccgaatatcagttggctcgttcgcctaaggctgatatttgggcgttgatagagcgggacctgactgaagctatcaattcaggactcttggaggaaaagaagagtgtagatgataaaacgacatggcgtgttaccaagcagttggcacaagctatattgggtaaagcttatttatggcaagaaaaattccatgaagctgctgttgtcttgaatgaagttagagctagtggtaagtataaactttatgatggaaattatgaggatatcttgacctacaaggctgagtataattgtgaaagtatgctcgaaagtaaccgtatttttgatgcaagtaattccatggatgagttcagtttctttgaggtgatgaatcattggcgcactgataagttggatatgtctggctctaacaatcagtttaatggtaccggatggggatttatggttcctcagaaaaagttgtatgatgcatttgttcaggaagagggtgtagatggttatcggttgaatcagacaatgaaaacctatgaccaaatttctcaattgggtgtcaaggttgccaaagggcagagtttgattaatgaaggttatttcatgtggaagcgtcgcttctcgaatgtagaatctcctgctgggttctggtgttcatataataactatcgttggatgcgttatgctgaagtcttgttactggcggctgaagcaaacctgaaggatggcaatcaatccgaagctgatgcttgcttgaatgaggtgcgtcagcgtgcaagattggatgcaaagacggctaccttggatgccattaaattggaaaagagactggaactctgttctgaatatacccgttatcaggatattatccgttggaaagatgcggaggctttgcttaaggatcagggtgaaagaacacctatcttgtcaaataaggcaggaaaagatgagccggataatgtagcggtagaatacattcagtataacaaggataaaacgcgttatggtttcaaggaaagacattatttgttgcctattccggcaaaggagatccgtttgaatccgaatatggaacaaaatgcaggttggtaaagcgtataaagaatcaaaatctaactttgtcatctgatgcagatagacaaaattagatttttctaactgattaattgtttgtagaagaagtcccccgtgggaatcagctaattgtacgggggcttcttttgtagctttttaaatataatatatatgagaagattgtcaattactttattttcactctgtctggcatctgctttgactgcacaggtgaccggttcgaatcagtcagtcagactgcgtgccgacaatatcgacgaagtggtcagtgccatgaccctcgaagagaaggtacacctcgtcatcggttgtggaatgtcgatgggaagtgataccaagtttccaggaacagcgggacgtacttacgacattccccgactgggtatcccttccgcctatcttgccgacggaccgcaccggttggcgatggctgccaagcgggaattcgacagccgtacttatcatgctacggaattcccttccagcaccacggtggcagctactttcaatccggatgcagcccataaggtgggacgtactttgggtatggaagtgaaggattatggtttggatgtgttgctggcaccgggtgtcaacctgatgcgaaatgtgctttgtggacgtaaccatgaatattattcggaagatccggtgttggctggtaaaatggctgctgcctatatcaacggagtccagagccgggggacaggtacctgcctgaaacactttgccgtgaacaaccaggagaccaaccgcaataacaacgattctcatctgacacagcgccccttgcgcgagctgtatttgaagtgcttcgagattgctgtcaaagagtctcagccctggagcgtgatgaccgcctacaataaggtgaacggcaaatatacctgcgaggaccgcgaactgacagaggacatcctccgcgacgaatggggattcaagggactggtgatgtccgactggaatgccggaaaagatgccgtgacctccatcgtagcaggaaacgacatgctgcaaccggggcaagaccgccagtataaagctattttggaagccgtagagaacggtacactggatttggcactcctcgaccgcagcgtgaagcgtgtgctggagtttgtggtcaagagccatacctttgccggctacgagtatcccaataaaaccgatttggaggctcatgcgcaagtagaccgtgagataggtgcggaaggtatcgtgctgctggataacaagcaggcgctacccatggctgccggcatcaaaaaagtggccctttatggaactacttcctatgacatggttcctgccggcatgggctttggcagtacgggcatcggctattacacggtttctatggtagaaggtttgcgcaatgcgggttacatcgtggacaaagaattgctgaatcgctacaagaagcatatggccgacgagcagaaacggctttttcctcacggaaaaccgcctttcgcctttactccgctgccccgtgccgaggagttcctgcccactgccgaggaactggctgcacaagtgaaggccaacgacattgccgtgcttacgctggggcgtgtcagtggcgagggctgtgaccgccgtgtggaagatttcctcctgaaggagaacgaattggctctgattaagcaagtgtctgccgcttatcatgctgcaggcaagaaactggtggtggttctcaacatctgcagcccggtggagactgcttcttggaagggactggcagatgcagtggtttgtgccttccagccgggacaagaggtgggtaattgtatcacggacatcctgaccggaaaggtgaatccttcgggcaagttacccatgacgtttgccgtgaaatatggcgatgcgccgtcggatgctaacttcccttttgattacgagttcaagatgccgtcgtttgctatgggtaccggcatgaacttcaagtccgaaaagaaagaggagaaaccgaaggaaccggagaaaaatgtggatttcaccaactatgaagagggaatctatgtgggttatcgctatttcgacactttcggtaaagaggtttcctatccgttcggtcatggtttgagctatactgcttttgactatgcggtagagaacgccaaaatggatgccgatcgctgtgagttgaaagtgagcgtgaagaacatcggcaaggtggcagggcgtgaagctgtacaactctatgtgaaagctccgaatgggggacttgacaagcctgccaaggagttgaaggccttcggcaaaactgccttgctccagccgggcgagagccagacactgattctgacttggaacgtgatggacatggcttcctttaatgagaaaaacagctcttgggagttggctaagggtgaatatcagtggatggttgccgcatcttcggccgatgtgcgttgcacagcggtacagagggtgacaaaggcacgcaagcagaaagtgcatgatgccatgcgggcgcaagtgcctgtggctgtgtatccgatggtgaagagatgagggggatatgcgtgaaaaaactgatatatatcaattagttttagagtggaaaacgcttattttgtagtacatttttaaatcgataccatgaaaagattgatactctctctttttgccgtctgcttgctgtggatggcaaatgcacaaaatcctgcatggggaccgcaaagcaaggtagtgaccgacagcatctacagccaggtattgaaagcacaccgtgcctacaccatctatctgccgcaaagctatagcaatgaaacggataggaaatatcctatcctctatttgctgcacggcatgtcgggggtgaataccagttggtttacagaccaacgtgtgaaggacgtgatggaccagttggtggcatcgggcgaggcttgcgagatgattatcgtcagccctaatgccggaggcaatccggctacttgctggaacggctacttcaacatgccgggctgggcttacgaagatttcttctataaggagttccttccttatatagagaagacttaccgggtgaaaggtgataagcggcatcgtgccattgccggactttctatgggcggaggtggaacggcaagctatgcacagcgctatccggatatgtattgtgctgcttatgctatgagtgctttgatgaacatccccgttagtggtgaggaggtgggaagagaccccgaccccacaaacaagatggctgtactgacgcgttctgtgcaggagcatagttgcatcaggtatgtggctgaggcagatgttgcgcgtaaggcacagcttcgtactgtacagtggtttgtggattgcggagacgatgactttctgctggaccgtaatatagagtttttccaggtgatgcgtaatgccggtatcccttgtcagttccgtgtgcgggatggcggacataccagcgaatattggcattcggcactttatatgtgcctgccttttgtaagtcgctgctttgctaaataacaagaagctaattcatttaatataagaaattatgaaaagattattaagtttggcagcgatgctgctggtctgctgtgtcaccctttttgcacagcaagctctttggggaggtgcggcagttgtctctcctgatattcatgacgacaacacggttacttttcgcttgaaagctcctaaggctgtaagggtgcagattaccggtgattttctgcctccacaaactattaagactcctcgtggcgattatgatgcaccgggcattgccgatttgacagaggggaaggatggcgtttgggaatttactactcccgaaccattgaagccggaactttatggatactcctttattgtggacggattgagaatgatggacccgagcaatgtttacatgattcgggatgtggctaccgtgaccaatgtatttatcatcggtggtgaccgtgccgatttgtataaagtgaataaggtaccccatggaacggtaagtcgcatgtggtacaatagtccttcgctgggaatggaccgccgtctgacgatttacactccggctggttatgaaaccagcggcaagcgttatccggtattttatctgcttcatggtgcaggtggtgatgaggaagcttggattgctcttggccgtacttcgcagatattggataatctcattgcacaaggcaaggctaaacctatgattgtggtgatgactaacggcaatgcttggcaagatgctgctgcaggtgaatctcccaagggttttgttgccccctccatgcgtcccgacgaaagagcgaaggtggcggaaggtgcttttgaactctcgttccccgaaatcgtgaagttcgtggagaagaatttccgcactcttgccaataagaagaaccgtgccattgccgggctttctatgggtagtttccactcttgcaatatttccaagtattacccggacatgttcgactatgtaggtcttttctccggtgcaagtaccggaaacgataaatcgacttgtccggtctataccgacttcgaaggtaagctgaagactcagtttgccaagaaaccggctctttacttcatcgcatgcggcaagacggactttgtttataaaggtgtggccgattttcgcaagttgcttgacgacaatggttataagtacgagtatcttgaaacgggcgagggacatatctggaggaactggcgaatctatctgacggagttcgcgccgaagttgttcaaataagaggatttggtataactaatttaataacaaaataacatacgtatcatgaaaagaatttctattttgtcagctctgttgctgatgtgtgcgatgactttcgcgcaacaagctctctggggaggcgctcccgtggtctcacctgagatacacgacaacaatacagtaactttccgcttgaaggcgccgaaagccgtaaaggtgcaagtaaccggcgacttcctgcctacgcagaaaatcaagactccttttggtgagtttgatggtccgggtgtggcagatttgaaagagaacaaggacggtgtgtgggaattcactactcccgaaccgctgaaaccagaactctacagctacactttcctggtagacggactgaagattaacgaccctgccaacgtctatatgattcgagacgtggcaagcgtgacgaatgtattcatcatcggtggtgacgagcgcatcgatctctacaaagtgaataaggttcctcatggaacggtatctaaggtatggtacaacagccctacgctgggtatggaccgccgcctgactgtctatacgcctgccggatatgagacaagcggcaagcgctaccccgtcttctacctgctgcacggcatgggtggcgacgagaacgcatggagcgaactgggacgtacggcacagattctggataacctcatcgcccaaggcaaggccaagccgatgattgtagtgatgaccaacggcaacgccgcattggaagcagctccgggtgaatcttcactgggctttgccgctcccaacatgaatctgcccaagacgatggaaggctctttcgaaacggctttccccgacgtggtgaaattcattgataagacttaccgtacacaggccaacaagaaggggcgtgccattgctggtctctctatgggaggtttccactccatgcacatctccaagcaatatccggacatgttcgactatgtagggctgttctcggctgccatcatgcccaacaaagatgtgaagtctccgatttatgacaaccttgaagccaaactgaaaacccagtttgccaagaaaccgtcactctattacatcgctatcggtaataaagacttcttgttccaggccaataacgactaccgcaagatgttggacgagaagggttacaaatatgaatattatgaaaccggagaaggtcatatctggaagaactggcgtatttacctgacagaattcgcaccgaagatatttaaataagattatgaagaagaatatcatatccatggcagcagcaatggctgttttgtcagcttgcggaccgggtgtgccgcagcttggaaagtcctctctggatgaggtgattggcgccatgaccttggaagaaaaggcgcatctggtagtgggtaccggtatggcaggcttctcgggtgacagtgccgtaatcggtgcaacgagaaagctggtgccgggtgcggcaggaaccacatacccgattgaacgcctcggtattcccgctgtggtgctggctgatggtcccgccggactgcgtatcgaccccaagcgtgagggggattcggctacgtactattgtactcatttccctatcggaactttgctcgcctctacctgggaccaggaactggtggaaagtgtaggtcaatccatcggtaacgaagtgctggaatacggtgcggacgtgctgttggctccggcgctgaacattcaccgtaacccgctttgcggacgtaacttcgagtattattccgaagacccgttggtgtcgggtaagattgccgccgcctacgtacgtggtgtgcagagcaacggtgtgggtaccagtatcaagcactttgctgtgaacaaccaggaaaccaaccgtatggctacggatgcgcatgtatctccacgcgccttgcgcgaaatctacttgaaaggattcgagattgccgtgaaggaatccgctccttggaccgtgatgtcctcatacaactacctgaacggtgtctacacttcggaaaacaaggagttgcagacaaccatgttgcgcgacgaatggggcttcaagggtatggtgatgaccgactggtttggcggcaaggatgccgtggcacagatggtggcaggcaatgacatgttgcagcccggtctgcccaagcagtacgaagccatcgtgaagggtgtgcaggacggagcgttagatgaagccatcctcaatcagaatgtgaagcgtattctggagatgattctccagactccccacttcaagggatataaatactccaacaagcctgatttgaaggcgcatgctgccgttactcgccagtcggcaacggaaggtatggtattgctgaagaacgataacggtgctctgccgctggctgccgacgtgaagaacgtggcactcttcggttgcacttcctacgatttcattgcaggcggtacaggttcgggcaacgtgaaccgcgcttataccgtttcgctattggacggcttgaagaatgccggctatgtggtggatgaagcgctgaagaatagctatgaagcttacctgaaagccgagaaagaacgtctgtccaaagataagaaagagtggttcatgcccgatacccgtccggctgagatggctgtttccgcacaagtcatccgcgagcaggctgccaaggccgatgtggcactggtgacgctgggacgtacctccggtgagttccttgaccgtatggtagccgacttcaacctcaccaaagaggaacagaacatgttgaaagctgtgtccgatgttttccacgctgccggaaagaaggtagtggtggtgctcaatatcggtggtgtgattgaaactgcttcttggaaatctgctcccgatgccattctttgtgcatggcaggcaggccaggagggaggaaacagtgtggctgacgtactgagtggcaaggcttctccttcgggcaagctgacaatgactttcccggtgaagtttgaagatgctgcttcttccgacaacttcccgatagacatgcgtgtaagcaccgaccttatgaacaaaggcgggaagaagaacgacgtgaagaacgtggactataccaattacgaagaggacatctacgtgggttaccgttacttcgacaccttcggcaagcaggtttcctatcctttcggttacggtctttcctataccacttttgcttacgacaaggctgctgtcaaggcagacaacggtgtctataccgtgtctgtagaagtgaagaacaccggtaaggtagcaggcaaggaagtggttcagctttatgtatccgctcccgatgctgcagacgccaacaaacccgaaaaggaactgaaagctttcgccaagaccaaggaactgaaaccgggcgaaactactgtggtgacgctgaaagtgaatgctgccgacctggcttcctacgatgaggctgcatcggcatgggtggtaactcccggaaactacaagttcctcgtcggggcttcctcacgcgacatcaaggctacgctggaggctgaagtagctgccgcaacgcagaagacgaacaacatcttgaaacttcaggaaccgatgagcctcttgaagagatgagagtaggattgtctgaaaagataacaaatcataccctaaaaaacatcctgttgtaccctttggtatggcaggatgttcttatctttgtgcctcgtataaacagatagtgcaactattataaaccaatatcacaaccatgaataaaaagttaatcttatctttagccctatcagggttagtgcttactgctacggcgcagaccactgttgcgcctgccattccaagagacgagaaaatagaacagcagattgagactttgctgaagaagatgacgcttgacgagaaagtcggtcagatgtgcgaactcactatcgacctcctgcagaaacgcgccaatccctttgccggcctcgacccgaagaacatcacggtgaaggacctgcaaaaaatcatcaagagatacaagcttgaaaaggaattcaagctgggcaaggagatgccttcgcaggatgtgatgatgaagctctatatgcgtatccaaggcattgagaatgccaagggcttccagttggatgaggcgatgctcgactctgtcatcggaaaatacaaagtaggctccatcttgaacgtgcccaacggtgtggcacagagcgtggagaagtggcaggaaatcatcaaacgcattcaggagaaatccatggaggtgatgggtattccttgtgtgtacggtgtagaccagatacacggaactacctatacgctgggtggtactttcttcccgcaaggcgtcaatatgggagctaccttcaaccgtgaactgacacgtgaaggtgcacgcatctccgcttatgaaacaaaggcgggaagcattccctggacgtatgccccggtgaccgacctcgggcgtgacccgcgctggccgcgtatgtgggaaaactatggtgaagacgcctacgtcaatgccgaaatgggacgtgaagccgttatcggtttccagggagagaaccccaacctgattggcgggaacaacgttgccgcttgtatgaagcattatatgggttatggtgtccccgtttccggtaaggaccgtacgccgtcttccatcaccgagcaggatatgcgtgagaagcattttgctccttatctggaaatggtgaaggcaggtgccctctccgtgatggtgaactccgccatgaacaacggcctgcctttccatgccaactatgagctgctgaccaagtggctgaaagaagacctcaactgggacggtatgatcgtgaccgactgggcggacatcaacaacctttatagccgcgaccacattgccaaggacaagaaggaagccatcaagctcgccatcaatgccggtatcgacatgtctatggacccgtacgactggaagttctgtacactcttgaaggagctggtggaagaaggtgaagtttccatgagccgtatagacgatgctgtacgtcgtgtgctgcgtttgaagtaccgtctcaacctatttgaaaagccctattatgacttgaaagacttcccgttgttcggtagtgcggaacatgccgctgctgcattgcaggctgccgaagagtctttggtactcctgaagaatacagacggtatattgccgttggcaaaaggcaagaaactgctggttaccggtccgaatgccaattccatgcgttgcctcaacggtggctggtcctattcatggcagggcgacaaggccgacgagcatgcaagccaatacaatacgattcttgaagccttcaccaataaattcggtgcggacaatatcatttacgaagccggtgtcacttataagcaaggtggcaactggtgggaagaaaacactccggagatagagaaagctgtagctgccgctgccggtgccgactacatcgttgcctgcatcggtgagaactcttactgcgagactccgggtaacctgacgaacctcttcctctcccagaaccagctcgatttggtgaaggctcttgccaagaccgggaagcccatcattctggtgttgaacgaaggtcgtcctcgcctgattgctgacatcgagcctttggctaaggctgttgtcaatactatgcttccgggcaactacggcggtgatgcgttggcaaacctcattgccggtgacgccaacttcagcggaaagatgcctttcacttatccgaaggaaatcaactctctgattacgtacgactacaaaccgtgcgaacacatcggcaagcagatggaaggtgcttataactacgatgcgcaagtatctgtacagtgggcgttcggttatggattgagttatactacttttgcatacagtaacctcaaggtggataagtcggactttaccgctgatgatgtgcttactttcactgtagatgtgaagaataccggtgaccgtgtcggcaaggagagcgtgttgctcttcagcagtgacctcgttgcctcccttactcccgatacccgccgtcttcgcgctttcgagaaagtggaactgaaaccgggcgagacaaagaccgtgactctgaaactgaaaggctccgaccttgctttcgtaggctatgatggcaagtggattctggagaaaggtgacttccgcatccagacgggtgaccaaacggtgaacgtggtttgtacggataccaagaagtgggagactccgaataagtgatacgacaaggtcttttagacctttagaaccatagtaaaagggccgatagcatgaaacaagctatcggccttttatttttccgcgttgtctttcaacagtatcttctttccgtttgtatctccttacttcttttcctgaaacaatagagattgtatgcttgagatgtacatctcatgttgtccgagatgcacatctcgttgtgcttgacatgtgcatctcatgcagtatggaacgtgataattcatttcataaagtataagcttctgtctcataagattatatgttttaccccttatcttgaagtgttgaaagggtgtgtttgtaatataattcccgtttgaaccgttaaatcaatctttttttctctaatattttgtagtcgaacagattatttatatctttgcaaccgaaaacggatgaaaggtggaggggcgattaagctcctcttttttgttcctaatggttaatctatgatagaaaagaaaactgtttgtcagattgttgacgagtggctggcaggaaaggactacttccttgtggaggtgacaatcagcccggatgacaagattttggtggaaatagaccacaaagaaggtgtttggattgaggactgcgtagagctgagccgctacatcgagtccaagttgaaccgtgaggatgaggattatgagttggaagtcggttcggccggcatcggacagcccttcaaggtactgcagcagtacattaaccacatcggcaaggaagtggaagtgctggcaaaggacggccgcaagctcagcggcgtgttgaaggaagccgacgaacagcatttcgtcgtgaccattcagaagaaagtgaaagaggaaggtgccaagcgtcccaagctggtggacgaggacttgacctttacgtatgaagagataaaatacactaaatacttaatcagttttaaataagactatggccaaaaaagtagaaactgtcagcttgatagatacattttcggaatttaaggaactgaagaatatcgacagaaccacgatggtaagcgtactcgaggagtcgttccgtagtgtgattgcgaaaatgttcggtaccgatgagaattacgacgtaattgtaaacccggacaagggtgacttcgaaatatggcgtaaccgtgaggtagtggcagacgaggatttggaaaacccgaacctgcagattgcattgtccgaagcacaaaagattgatgcttcttatgaagtgggcgaggaagtgacggatgaagttatcttcgcgaacttcggtcgccgtgccatcttgaacttgcgccagacactggcctccaagatattggaactggagaaagatagtatttacaacaaatacattgataaagtgggtaccatcatcaatgcggaagtctaccagatttggaagaaagagatgctgctgctcgatgatgaaggcaacgaactgttgctgcccaagaccgaacagataccgagtgacttctaccgcaagggcgagaccgcccgcgccgtagtggcacgtgtggacaacaagaataataatccgaagattatcctgagccgtacgtcgcccgtcttcctgcaacgtctgttcgaaatggaagtacccgaaatcaatgacggactgattaccatcaagaagattgcccgcatccccggcgagcgtgccaagattgccgttgagagctacgatgaccgtatcgatccggtaggtgcttgcgtgggtgtgaagggtagccgtattcatggtattgtccgcgagcttcgcaacgagaatatcgacgttatcaactatacgtccaatatccagttgtttatacagcgtgccttgagccctgccaagatttcttccatccgcttgaacgaggaagaacgcaaggctgaagtgttcttgaaacccgaagaggtgtcgctggctatcggtaaaggcggtttgaatatcaagcttgccagtatgttgactgagtacaccatcgacgtgttccgtgagttggatgaggccatagaggatgaagacatctacttggacgaattccgtgatgaaatagacggttgggttatcgatgccatcaaggctatcggtatcgatacggctaaggctgtgttgaacgctccccgtgagatgttgattgagaagacggacctcgaagaagagacggtggacgaggtattgcgcattttgaaacaggagtttgaagaggagaatgaatgatttacgattttacgatttacgatttacgattagagtttgattgtaaatgtaagtcgttccgctccgagtattatcaatcgtaaatcgtaaatggttaaatcgtaaataggaaaaaattgatgacgataaggttaaacaaagtaacaagagatttaaatgtagggattacgacggctgtcgagttcctgcaaaagaagggatttaccgttgaggcaaatccgaacacaaaaattacggatgaacagttcgaactgctcaaaaaggagtttagtacagataaggaccttaagataaagtcggagcgtttcagccaggaacgtcagagcaaggaccgcaacaaggcgtccgtgtctattgacggctatagggaaacgcaggagaaagcgaagcccgaggagattaagacggttgttccggaagacgcacgtccgaagttcaagccggtaggcaagattgatttggacaaactgaaccgtagacctgctcctgctcaggaaaaagagaaagaagcggaaaaagcggtagaggagaagaaggtggaggaaccggcagttgtagaaacgccgaaaccggaacctgctcctgctccccaaccggaaccacagccgcaaccggaggtacagccggcatctgagtccgagccgcagcccgtttcggaaccgcagccacaacccgttgtcaaggaagagcctgctccggttgtagaggctcaacaagaatctaaaaaggaagaaatgatagaagcgcctgctcccgtaccggtggctgaagaagcaccggttgaaaaagaggggaaagaagaaggagaagaaatcttcaagatacatcagcctgagtttgtttcgaagattaatgtcatcggacagatagacctggcggctctgaaccaatccacacgcccgaagaagaaatcgaaagaggagaaacgcaaggagcgtgaagagaaggaaaagattcgccaggatcagaagaagcagatgaaggaagctatcatcaaggaaatccgccgtgatgacagcaagttgaaggataccgctgccggcgatgccaacggcaagaagaaacgtgtccgtatcaataaggagaaagtggacatcaacaatgcttccaacttccagcgtggtggcaacgaccgtggacacgctggtgcccagcaaggtcagggtgcccgcccgcaaggtggaaaccagcctggtggaaacaatgccaataataaccgcaaccgcaataaggaccgcttcaagaagccggtcatcaagcaggaggttagcgaggaagatgtagcaaagcaggtaaaggaaactttggcacgcctcacttccaaaggaaagaacaaaggtgccaagtatcgtaaggaaaaacgtgacatggcttccagccgtatgcaggaattggaagacatggaaatggcagaaagcaaggtactgaagattacggaattcgtgacggccaacgagttggcaagcatgatggatgtttctgttactcaggtcatcgccacttgtatgagcattggtatgatggtatccatcaaccagcgtctggatgccgagaccatcaacttggtggctgaggaattcggcttcaagacagaatatgtaagcgcagaagtggcgcaggccatcgtagaggaagaggatgatgaggaagatttggaacctcgcgctccgattgtaacggtgatgggtcacgtagaccacggtaagacttcattgctcgactatatccgtaaggcgaatgtgattgccggtgaagcgggtggtatcacacagcacatcggtgcctaccacgtgtcgctggacgacggacgtaagattacattcctcgatactccgggccacgaggcgtttaccgccatgcgtgcccgtggtgccaaagctacggatattgccatcatcattgtggctgctgacgacaacgtgatgccgcagacaaaggaagccatcaaccatgccatggctgcgggtgttcctattgtatttgcaatcaataagattgataaaccgactgccaaccccgacaagattaaggaagagctggctgccatgaacttcttggtggaagagtggggcggtaagtatcagtcgcaagatatctctgccaaaaagggtatcggtgtacccgagttgatggagaaagtgctgctcgaagcagaaatgctggagttgaaagcaaacccgaaccgccgtgctaccggttccattatcgagtcctcattggataagggtcgtggctatgtggctacggtactcgtttccaacggtaccttgaaaatgggcgacatcgtgctggcgggtaccagctacggtaaggtgaaggctatgttcaatgagcgtaaccaacgcatgcaggaggctggtccttctacacctgccctgatattgggcttgaacggtgcacctgctgctggcgacacgttccacgtaatcgaaacggagcaggaagcacgcgagattgccaacaaacgcgaacagttgcagcgtgaacaaggtttgcgtacgcagaagatgctgacgctcgacgaagtgggccgccgtctggcgctgggtgacttccatgagctgaacgtgattgtgaagggtgacgtggacggttctgtggaagcgttgagcgactctttaatcaagctgtctacggagcaggtgcaggtaaacgtaatccacaagggtgtcggtcagatttccgaatcggatgtctcgctggctgccgcttcggatgcgattatcgtcggtttccaggtacgtccttcgggtgctgccgccaagatggcagagcaggagggtgtggatatccgcaagtactccgtcatctacgatgccatcgaagaggtgaaggctgccatggaaggtatgctggcaccgacattgaaggagcagataacggcaaccatcgaggtgcgcgaagtgttcaacatcacgaaggtgggactggtggcaggtgccatggtcaagaccggaaaggtgaaacgcagcgacaaggcccgtttgatacgcgacggtatcgtaatctttacgggtgccatcaatgccctgaagcgcttcaaggacgacgtgaaggaggtaggtaccaatttcgagtgcggtatcagcctgacaaactgcaacgacatcaaggtgggcgatattatcgaatcttacgaagaaatagaagtgaagcaaacattataattgaataatgtacaaatatgctaatgtgccaattggctgcgcgtacagaaaatgccgcagggcaattggcacattttgcatattagttatttgctcattgacccattagcatattggcacattagcatattgtcacattggtacattaattttatggcaattatagatatcatcatattggctgctttcggcttgggcgcaatcatcggcttcatgaaaggttttgtgaagcaattggcctctctgctggggctgattgtcggtctgctggcggcaaaggctttgtatgcctcgttggcagtgaagctgtgccccatgttgacagactctatgacagtggcgcaagtactggcatttgtcctcatctggctggctgttcccttgctcttctccctggtggcttctctgctgacccgggcaatggaggccgtctcgctgggctggctcaatcattggttgggggctggtctaggggctttgaagtacctcctgctgacgagcctgctgattggtgtcatcgaatttatagacggagacaatacgctgattagcaaaacaaaaaagaaagaatcagtgttatattatcctatggaagagtttgccgggatattctttcccgcggcaaaggcggttacggagcagattgtaaacggagactttgactgataccgtgaaccgtgattttgtaattcataatttgtaattatagaagtgatgcaacaagaagaacccaataaatatgtaaaggaactcactcaggagaagtataagtacggtttcacgaccgacgtgcatacagacatcattgagcgcgggctgaatgaagatgtagtgcggcttatctctgagaagaagggagaaccggaatggttgctggagttccgcctgaaggcatatcgccactggctgacattggagatgcctacatgggcacatctccgcattcccgaaatagattatcaggccatatcctactatgccgaccctacgaagaagaaggaaggaccgaaaagcatggatgaggtggaccctgagttgataaagactttcaataagctgggcattccgctggaagaacagatggcgttaagcggtatggctgtggatgccgttatggactcggtgtctgtaaagactaccttcaaggagacgctgatggagaaaggaatcatcttctgctcgttcagcgaggctgtacgcgagcatcccgacttggtacagaaatatctcggttcggtggtgccttatcgtgacaacttctttgcggcactgaactcggcggtgttctccgacggttcttttgtctatatcccgaagggggtacgttgtccgatggagttgtccacctatttccgcatcaatgcccgcaatacggggcagttcgaaagaaccttgattgtggcggatgatgattcgtacgtttcttatctggaagggtgtacggctccgatgcgtgacgagaaccagttgcacgcggccattgtggaaattgtggtgcacgaccgtgcagaagtgaaatacagcaccgtgcagaactggtatcccggtgatgccgagggccggggtggtgtctataactttgtgacgaagcgtggccattgtaaaggggtggacagtaaactgtcttggacgcaagtggaaacaggttcggccattacctggaagtatccgtcttgcatcctttccggcgacaattcgacagcggagttctatagtgtggcagtaaccaataaccatcagcaggcagacacgggaacaaagatgattcatctgggcaagaatacccggagcaccattgtgagcaaaggcatttctgccggaaagagcgaaaactcttaccgcggcttggtgcgcgtggcacagaaagcggacaatgctcgtaattacagccagtgcgactccttgctacttggtgacaaatgcggcgcgcatactttcccctacatggatattcacaatgaaacggccatcgtggagcatgaggccactaccagcaaaatcagtgaggaccagatattctactgcaatcagcgcggtatttctacggaagatgccgtggggctgattgtgaacggttatgccaaagaagttttgaataaacttccgatggagtttgccgtagaagcgcagaaattgcttgccatttcgctggaaggaagcgtggggtgatttataaatagtaaattgtaaatagtcaaatagtaaatataaagatgttagagataaaagacctgcatgccagcatcaatggcaaagaaatattgaaaggcatcaacttgaccatacgtgatggagaagtacatgcactgatgggacagaacggtgctggtaaaagtacgttgagtaatgtgttggttggccatcctgcttacgaagtgacgcgcggctcaattacctttaatggcaaggacttgcttgccatgagtcctgaggaccgtgcacatgaaggaatctttctttctttccaggctccggtagagattccgggcgtgtcgatggtgaacttcatgcgtgcggctgtgaatgagcaacgcaagtaccgccatctgcctgctttgtcggccagtgagttcctgaagctgatgcgcgagaagcgtgccattgtggagttggacaacaagctggccaaccgtagcgtgaacgaaggtttcagcggcggtgaaaagaagcgtaacgagatattccagatggcgatgttggaaccgacttttgctattttggacgagacggattccggattggatgtggatgctttgcgtattgtggccgacggtttcaacaaactcaagactgcggaaaccagtgccatggtcattacccactaccagcggttgttggactatatcaaacccgatacggtacatgtactgctgggtggacgtatcgtaaagaccggtggaccggaattggcgaaggagattgaaacacgtggcttcgattggataaggaaagaagcaggtgaattataaactcataatctgaaaacatgagtgtagagcaacaatacatagaccttttctcccaaacggaggcgatgatatgccggcatagtgccgaggtgctgaatgctccgcgtgccgctgcttttgctgactttgagcgcttgggctttcccacccgtaaggaggagaaatacaaatatacggatatcagcaagttctttgagccggattatggcttgaacttgaaccggttggaaattccggtgaatccttatgaagtgttcaagtgcgatgttcccaatatgagcactgctctttattttgtggtgaacgatgctttttatggcagggctttgcccaagtcccatctgcctgaaggggttatcttcggcagcctgaaggaggtggccgagaaacatcccgatttggtgaagaaatattatggcaagttggctgatacggcagaggatggggtgacggcgttcaacaccgcttttgcacaagacggcgttctgttttatgttcctaagaacgtggtggtagagaaacctattcagctggtgaatatcctgcgtggtgacgtcaattttatggtgaaccgccgtgtgctgattattctggaggagggtgcacaagcccgcttgttggtgtgtgaccatgcgatggacggcgtgaacttcctggcaacgcaggtgatagaaatctttgccggtgagaatgcccttttcgatttttatgaactcgaagagacacacaccagtacggtacgtatcagcaatatgtatgtaaggcaggaagccaatagtaatgtattgctgaatggtatgaccttgcacaacggaactacacggaatacaacccgtgtgacgcttgctggtgaacatgcggagctgaatctgtgcggtatggccattgcagacaagaatcagcatgtggacaatcatacgacaatcgaccatgccgtgcccaactgtaccagcaatgagctttataagtatgtccttgacgagcaggctgtaggtgcctttgccggtctggttttagtgcgccctgacgcacagcacaccagttcgcaacagaccaaccgcaatctttgtgccacccgagatgcacatatgtacacccagcctcagctggagatttatgcagatgacgtgaagtgcagtcacggcgctacggtggggcagctcgatgaaagcgctctcttctatatgcggcagcgtggtattccggtgcgcgaggcgcgcctgctgctgatgttcgcttttgtcaacgaagttatcgacaccatccgtttggatgctttgaaagaccgtctgcatctgctggtagagaagcgtttccggggggaactgaacaaatgccaggggtgcgccatctgcaagtgatagcttataatttcgattcattatgaacaacgatataaataagagtagtatcttggctcccctccctatgggagaggggctgggggagaggcttcgagctgatttccctatcctttcccgtgaggtatatggcaagccgttggtctatctggacaacggcgcgactacgcagaaacctcgccaggtagtaaatgccattacggacgaatattattcggtgaatgccaatgtgcatcgcggagtgcacttcctgtcgcagcaggctacagagctgcacgaggcctcgcgtgagacggtgagacgtttcatcaatgctcgcagcacgaatgagattgtcttcacccgtggtacgacggagagtatcaacctgcttgtctccagctttggtgaggaatttatgcaggagggggatgaggtgattctttctgtgatggaacaccatagcaacattgttccctggcagctgcttgccgccaagcgtggaattaccatcaaggtgattccgatgaatgacaagggcgaactcttattggacgaatataggcagttgttctccgaacgtaccaggattgtcagtgtggcgcatgtttccaatgtgctgggtacggtcaatcccgtcaaggagatgattgcttttgcccatgagcagggtgttccggtgcttgtggacggtgcccagtccattccccacatgccggtagatgtgcaggatctggatgccgatttcttcgttttctccgcgcacaaggtgtatggtcctacgggggtaggggtgctttatggtaaagaggggtggctggataggatacctccctatcagggcggtggagagatgattcagcatgtatcttttgaaaagactaccttcaatgaattgcccttcaagtttgaagccggtacgccggattatatcggtactaccggacttgccaaagctttggactacgtttcgctggttgggatggacaagattgccgcctatgaacacgaattgacccagtatgccatgcaacggctgaaagagattcccggtatgcgtatcttcggcgaggcagaagacaagggtagtgtcatatcgtttctggtaggtgatatccatcattttgatatgggtacattgctcgaccgtcttggcattgccgtacgcacgggacatcactgtgcccaaccattgatgcagcgtcttggcatcgaaggaacagtgcgtgcatctttcgggctttacaatacccgggaggagatagatgtgctggtggcaggtatagttcgtgtcagccggatgttctgaccaaagcaaagctttgcaacctttctttcattccttgcgtctaatatgtcaacaactaaaaaaatgaattatgttagtaacaacaaccccgactattgagggtggacgtatcacccgctattatggcatcgtttccggtgaaacgattatcggtgccaatgtattccgcgatttctttgccagcatccgcgacgtggtgggtgggcgaagtggctcttatgaagaagtgctgcgcgaagctaaagatatagccttgcgcgagatgcaagaacatgcccgtgctatgggtgccaatgccgtgattggtgtagacttggactatgaaacggtaggaggcagtggcagcatgttgatggttacggcatgcggtacggctgtaacggtggaataagttcgctctactatattacaacataggaagatataagaaatggcaaccctgtgaatggttgccattttctttataaggagtatcttttatcggttatttgtaccaatccttataatctgttccattggaattgacccaatccataaaatgttcaaagctcttgtctatcggctgggtttcaggagtattgaagtttgtggctccacttagatgaatggcaaaaggatagttgccattggctacataatagcttgtcggtacagaggacaaatcctcttcggtatggaatagagccatgtctgccttttcagtaggaggatagttgaccaaatgcacttcgatgcgtgattctttcaattcgtcatgtaccatgatgaatggattataagggggaattccaagcgtttcgtgtgatagtggagtcttgaaggtgttctttatcttatatgtagcggtttttgtatttctctctgttacatcgagcgcacttagaaatacattgacggtagctttggaaaggtctgtatccagtccttgtccgttgaaacttgtgggggcttccaatatttcagttgacatattgctgcgttctgtattcagttggtaagcgaaaccatttttgaaagtggcaccggaccaaagcaactcataggtgtcttctgtagaaaggacctgattggcatcattgaagttcaatacggactggtattttacaataacatcattcaagtcatagtcaccctttctgggccaattatcttcgaaagcgatgattcctttgtattccagactgtatttcttatcctcgttgccaccgtcaggtttgatatcaggaatatccggattgatgatggcttcgatggggttggaccatacgttgaattgtatatcattatagtcttggtctgtccaatcttcaaaggacaatacgacaaaatcatcgatgcggaatgcagctgtatgtgtacggccgtccccattcagctttgtagtagagtagaaaggcttattgtttccgccatagaagctgtcattcaataggaaccatccgatttttactccattgggaaatacggtgccttggtccactccgtcggggtctatgtaatgaagctttacactttcaccgccttgtagtccggaagcctttttattataataattatccatcagagtgtttggaaaaacaatgcatttgggggcttttttaatttcacttaaagatgcgtctgccctatagcaataatagccaaaggcgctcgctgcaccgctggttcctccaattatccggatggatacttccgcattgcgcccttccggatcattgatttcaaaatctatggcttgtcggtattgcttagggcatgtgcctccttccttcaaggtcgtattgatgattgtcaatacatcaccgggaattgtgattttgttgtctgtgtctaaataatgaggatatcctttggagctccatgttcctaatacatggtatcctttgggtgcctgccatccctccgcccgtgtttgcggattatcatcggtggaatcccatttgatgtcggcagtaatggcatctcctgcaataactgttttgaagagggtggggacccctatataagaagtatagatatatgcttcgtccccatggtccgaattgatgatttccttgccgctatatgcaccgttaccgtctgtcatgcgtctgatgaccggttccaggtctgtgcgttttataatctggccatctttgtcaatcgtgaacgggtcttcaagatagatttcaaaaagtactttatagccttcggggacatcatactttacgtttacttggatggaagatgtcgtagaaaaatcaaaagagttgggagtcttctcatcgtcttttccattattgggattgtagacgtcatgttcgcatcctatggataggaatgccagcataatgctgcataatgtcaaagccagcatcttgcatgttaggttagaatagattggtttcataatgcctttgtttttagcttgtttacttgttgcaaaggtactataaaagttgtaatatatatctatatgtgctctattcttctcattaaatacaaaaaataggtaaaaaagggtactgcttgttgttttattcgccagtataaatacatgcttgcttggatttcttttctttttcatttgcttatttcgtttcaaatcaatatttttaggctttcgttcaaccttttaatacgaataaatgctatggaccaaatcctattctggctggttccagccgcttctattatggcactttgttttgcctggtatttccatcgtcagatgatgaaagagagtgagggtacgcctcagatgattaagattgccgctgctgtgcgcaaaggtgctatgtcttaccttcgccaacaatacaagattgtgggctgggtatttctggggctggttatccttttctccattatggcatacggtttcggagtgcagaactcctgggtgccgattgctttccttaccggaggattcttttccggactttccggctttttgggtatgaagacggccacctacgcatcggctcgcactgccaatgcggcacgcacatcgctgaatgccggactacgcgtggctttccgtagcggtgcggtgatgggactggtagtggttggccttggcttgcttgatatatctttctggtatctgttgctgaatgctgtaattccggaagatgtaatgactcccacccataaactctgcatcattaccactaccatgctgactttcggtatgggcgcttccacgcaggcattgtttgcacgcgtaggtggcggtatctatacaaaagctgccgatgtaggtgccgaccttgtgggaaaggtggaagccggtatccccgaagacgacccgcgtaatcctgccacgattgcggataatgtaggcgacaatgtaggcgacgtggcaggtatgggggctgatttgtacgaaagttattgcggttctatccttgctacggctgccctcggtgctgcggcttttatccactcgggtgatacgctgatgcagttcaaggccgtaatcgttccgatgctgattgcagccgtcggaatattgctttccattatcggtatcttctccgtgcgtaccaaagagaatgcgaagatgaaggacttgctgaactcactggctttcggtactaatctcagctctattttgatagttgtcgccactttctttatcctgtggttgctgaagttggacaactggctgtggatttcctgctccgtgatagtgggtttgatagtaggtatcatcatcgggcggtctacggagtactatacttcccaatcctaccgtcctacccaaaagctgagtgaaagcggaaagaccggtccggcgacagtcataatttccggtataggcttgggaatgctttctacggctattccggtgattgccgtggtgataggtatcattgcttcttatctctttgcttcgggcttcgacttctctaatgtgggtctggggctctatggtattggcattgccgcagtaggtatgctttctacattgggcatcacgcttgctacagatgcttacggaccgatagctgacaacgcgggtggcaatgcggaaatgtccggtctgggtgaagaggtgcgtaagcgtaccgatgcgcttgactccttgggcaatactacagccgctacgggcaaaggctttgccatcggttccgccgctttgacgggattggctttgctggcctcttatgtcgaggaaatccgtatcgggctgacccgcctcgggactaccgaactgtcgcttcctcatggcgatgccgtggctcttcaagatgccactttcttcgactttatgcatcactacgatgtgacgctgatgaatccgaaagttctttccggtatgtttctgggctcgatgatggcatttcttttctgtggattgacgatgaatgcggtagggcgtgcagcggcccatatggtagacgaagtgcgccgccagttccgcgaaatcaagggaatccttacgggagaaacggagcctgattatgagcgttgtgtggcaatctcgacgaaaggggcgcaacgcgagatggtgattccgtcactgatagctatcattgctccgattgcgacgggacttattttcggtgttcccggtgtgctcggcctgctgattggcggattgagcagtggtttcgtgcttgccatcttcatggcaaatgccggtggtgcatgggataatgccaaaaagtatgtggaagaaggcaactttggcggcaaaggcagtgaagtccacaaggctacagtcgtgggtgacaccgtaggagacccgttcaaggacacatccggtccgagcttgaatatcctaatcaagctgatgagcatggtagccattgtgatggcagggcttacggttgcgtggagtctgttctagaaagagtttttccccgtatcccaccaaaggcgggtggcgccgttatctgcgccacccagtttttccgtgagggtggcgtattgtgccgggtcggcagtggcggcgtccgtcgagaacggaaggcggcggatcatgatatccgtatcaatcacttttccggtgttgttttggaccttgaaaagtttggggtatccggtacggcgttgctcagcccatgcctcataactttcgggccagcatgccagccacttctgggtaataatcttttcgagtttcgtctctatgtctgcatcttcttcccatttgggggatatggtaatcaaggctttcatgtccttgcctaccttaccgcccgagactacatctttataatcggcaggggttttgtcgctttccagatattcggaggcaccagcacagtcccactgtgtaaatgaagtacttaccccgtattcatagcatgtgcggggattctctttggtatagccgcggagggctgcttcggccctgagcagccagacttccgccgcactcatcaatacggctccggtcttttcgccgatggtacttgtgttgagggaagagcaaaaactgtaaatgttggcgtcaccgtctttcatgggtaagccgatgggaatgcctaacaactgtttttgataaccttcgagaagggcggtgttataccatttcttgccacgcgggtcctcataaccgttgacaatggattccatcgaggcattcatgtagacttcaccccaaccggcaacggcacacaaaggattgatatagttcttgcccattacagcgatggtttcccttgcaccttccagtacaccttgattgtcattcagtgctttggttgcttggtctttggcaagtgttgcatctacattggagatgcgcatggcaaggcgcaaacgtagtgagttggcaaactttaaccactccttcaaggtcttgccgttggtcagcatatcatactctttgaatttgttgttgtcaccgccctcgtccaggtattcccttatcaattgctgcccttcgtccaggtctgcaaagaagcgtgtataggcttcttgctgtccgtaaacccggggtgtctcacccagttgatggtagaccagcggaccgtatgtatcggcaatgcggtgcatcagttccactttcaaaatttcggtaatgccgaggtagcctttcaagttgtcattgccataaaagttcttttctgccttctgcacctccgtgtagacatatccgtaagtacattgccatgcggcattggtccagcctgagttcaggttgtagcaggcgttggatttcatgaatttaggaatagggtccatgaagtagccggagaacatgtcatggttcagggattgtgtcatctgccatacccaatttaagcctacagaacctatattgaagtagatgcccgactgtatgggttcgaatggagcagtcaggttctggaaatctatttcctttttgtcgtccgagaaacctcccttgatttcgttgtcgttctcaaaaccgccggtgcaagctgcaagcagcaatatgctatggcagaaaaggaatatgatgcacttgtttttcataaggtattcattttaaaaggttaatcttaggttaaagccgatattccgggtagtaggcatgccaaacacgtctactccttgattgttgttgcctacggacattactgcatcggggtcgaacggtgcttccttctttaagaaacacaagttgcgcgctgccaatgatacgtcgattccctttatgaatctactgttttccagtatcgttttcgggaaagaatagctcagtgatacttcacggagtctgatgcaggttgcgtcgtacatataatattcggagatggcatttctgccgcctactgcgctgtaaaatgctctcgggtcgttgaacttctgtccctggtattctacatatccccgggtgcgggcatcttcggtgactttggtcacgccgttggcatccaactcagactgtgtcagtgacatgacttcgccgccaaagcggaaatctatcaggaaatagagctccaggttcttgtaggtaagtgtgttgctccatcccatggtgaagtcaggattggcattcccaagcaaatccttgtttccggtatttcctaaaggccttttgctggtttcatcaaccatgatgctgccatcctcgttacggcggaaagcatttccataaatatcccccaggctgcctccttctttgacgcgcatctgatagcctgcgttgaaaccttcttcgtagtaggaaaattctggatagtcaggatgcagggtcactactttgttcttgttggcggacatgttgatgagactcttccacgaaaagtttctgtatagtagcggagtggcgtctaccgtcagttcaaaaccctggttacgtatttttccggcattgacataccggtatttataggtggagcccgtaggattgtccattctcaacaactggttcttggtattggtctgataccaagtgaagtctattccgaagcggtgatggaagaagcgccattctgtaccgaattcgatggagctgctgatttccggtttcaggtcaccgcgctgttctacggtatttacattgatactgccgcctaccatgatgatgtctaccggattggtgattcctatcgggaggtcattaccgacttccgcccatgaagcgcgcacttttgcaaaacttatccatttgggcagggagcaggttttgttaagaatccaggtagctcctatggagggatagaagaatccggtattcttgctgtctgtgtgggctaatgtggatgaccagtcgttacgtgcggtaatgtccaagtatagtagtcctttccagccccactgcatggtggcaaatactgattggagcgtgcgtttgctgtcgatgctctgatttacggctgctttggagtccatcactacattggggacggtaaatacattcggtttgtagagggaagcaagccttgagtctatcgtcagtgaattgactttactcatgttgatgctggctcccagtgccgtattgagggaaaagtcatcaaattccttgttgaacaagaccattgcgtcaccgtagacttggatttcctggctgtccgaccagatgtaacgtccgttttccttgtcctcgtatttgccggcgatgttgggagctgtagtggcatacatcttattgtcgaatttatcactgatataatccacattaccccgtacctgcaggctgaagtagtccgtaatgtgcagattggctctggccgatgccacagcgcgataacgcttgtagccactgagcacgcggtttttcagccagtagggattctgtccccattcactgacggtaccatctccattcttttcaatccagttttgtgtcatcatattgcggtcggcattccacgtttcaaagttttctctgtaagtgctcatgtctacgccacgtgggaaactgtacaagctgaccagcggattcagataatagccgccggtagcaggggagttcttgacggtttgggtcattagtgttgcaatgccgtccagtttcagcttgttgttgaagaggctggccgtttcgtgtaggttcaggttattcttctgtagtttgttattgtccacaattcctttagccgtggtgttggcgtatgagaaataagtttgtaccttttcatttccggtagtgatagccagcgaattgaaagtggtgatgccattgctgaagaactcgcctatgttgtcatagtccgttacattgccttttgtaccccagcttgccgtaccgccatcttcgttccggccgtatgtattttggaattcgggggtactgatggcgtgacttacggtcaggttggaggagaatgtaacgcgctgcagtccggcctttccctttttagtggtgatcagaatgacgccattagctgcctgcgaaccataaagcgcggcggcagaagaacctttcaggatgttgatgctttctatgtcgtccggattcaagttggaaatcccgtcaccggcatcacggttcaatccatcgtagttaccgccgattacggtggaggtggattctgttgagctgttcagcataggaacaccgtcaattacgtacaagggctggttgttgccgctggcaaatgcagagcgtgcaccgcgaatgacgactttggcagaacctcctaaattggcggttttattgatttgtactccggccgtctttcctgccagtgtattaatcatgttcggctctttggcacgggtcagctcattgctgcttatctgttgggtagaataggtcaatgaggacattttcttctggatacccatggcggttaccactacttgctccagggcgaggttcttttcttccatccggatgtggagattatttctaccgttcagggcaatggtttgcggctcataactgatgtaggatacgacaatagtggcataaggagggatattcatactaaattctccttcggtattggtgataacaccattggcggtccctttttcaagaatgttggcaccgataatcggttcgcctttggagtccgtcacctttcctcttacaatagccatttcctgcagagtgtttgtcttatcctcagcactcctgctgtttttggttaaaacgatgtttttgccttccatcacatacttgatgtctgtccctttgaacatttggtcaagtacttcggaaacagtttggttgcttgcattgatgtcgacggtacggcgtacatcgacgttctgtttgttatatacaaataagtattctgtttgcgattcaatttgctcgagaacttgccctaccctcagccgggcattttgaatgctgaccctggcattctgagagtagcagttcccgctgtacacctgaaatataacaagcaggagaaggaataatgtgattttcataggtttgcaataattgcttaaaatctaatttttttagataaaaaagcctcatcaacaaaatttttctcatatctttgtcactgtgttaagttaataaattgattaaggtcgatttttgactgtttcggatcggaaagtatgggggtactttccgatctttttttcttactcatatataacaattgaatccttttcttcgttgatgcggaacttgaaaggatggtctttcgagatggtccgcagtatatgttcgatgccgtcctgctctctgaacttgccggtaaagctgccgtagttcagcagttgaggactggcaacggttatctttacattatagtatttctccagtctaccgaggataccgctgaatggagcgtcgtcaaaacagtatagtccctctttccagcgtagatattcataggaaggaaggacggcctttctacattttccgttttcattgagaaatacctcgtctttctgcaacctggtgattatctggctgctgttggccggatagatatcgacgataccttccaccaatgtggttccgaactcatggctctcactgtaggcacagacgttgaaactcgttcctacaacttttaccttgttcgtttctgtatgtacatagaatgggatattcttgtttttggctacttcaaagtaggcctctccgtccaattccacatttcgttcgttgcgtccgaagttggcggcatatttcatggtggacttggagttcagccatacgcgtgttccatcggcgaggataatttgggcccgttgtccggcaggcacagtgactgtttgcaactgcacctccttgttatataaaaagtcggaggtgatgaaataaccggcaatggcgacaatggtgacggcggctatacgggccgcccagcggagcatcggcatgatgtgcaccgttttcttttcattgtttccctgcttgtccgagaacaaggaaatgtcgtatatcatgcgctctttcaggaagatgtcccggttttcatccgaggcgtctatccagtcgagtatcatcttttcttcttcaacggaagtaatacctttgaaatatttatataatagctcttggttcattgtcaataatttatttcttttctaaaacgtgctctttttaccttttgtatatataaccggaaagtgggcggtaaccctattccgtagaagcattttttaggatattaatattatgagtatggtaacaagataatctttcagtctcagccggagaatccgcagcactttggtgatgtgtgcctctacggttttaagtgatatgtccagactatcggcaatctgcttgtttgccaggttctggtatcggctcaacatgaatatcttccggctttgctcgggcatttcctgtaaggtcttatttacgatatgctgtatttccgtgttgaatatctggtccggttcgcaggctttcaaggtggagatgcgtaagtccagttcgcgcaggttgtggctgctgatggtttcttccgctcgcagacgcacctgcttgtgctcgagtacgtgcagggctttgttctttatgatggtcagcagcagggcatgcaggttactgttttcttcccagcggtctcggttttcccataaggcaatcatggattccatcacaacgtcttccgcttctgctttatccctgagataagaataagcaaaagccaaaaacttttcttggttttcctggaaaaagcgtgagaaaagattcatagtatgtaggctccttaaaccggacattaattgaggttctttatggaatataaggctttacatagcaaaaaaacataatctttttggaatatgcaagcattatgccttgttttttcagagccatttctggcagtattgacaaaaagaaagcctgatggggttccaccaggctttatatacttaaagaataagaaatttcttatttcttttccggtctttcttgtctttccggtctcggaagcaatactttgcgtgacagcttaaattttccggtcttcgggtcgatgtcgagaagttttacgtcaatttcatcaccttccttgataccggcttcttctactgtttccagacgtttccagtcgatttcggagatatggagcaagccgtccttacccggcaggaattcaacgaatgcaccgtaaggcataatggagcgtaccttgcctttgtagacttcgcctacttcggggacagctacaatccctttgatgatacgcatagcatcatcgatgctcttcttgttggtaccggcgatttcgattctaccgatgttgtccacttcttcaatagtaatggtagcaccggtttcttcctgcataccttggataatctttccaccagggccgatgacagcaccgatgaattccttgggaatggtcattgtctcgatacgcggagcgtgaggtttcaggtcttcgcgaggctcggcaatgcactcggtgattttgcccaagatatattcgcggccttctttagcctgcagcaatgccttttcgaggatttcgtatgacagaccgtccactttgatgtccatctgagtggcggtgataccgtcttttgttccggtcaccttgaagtccatgtcgcccaagtggtcctcatcaccgaggatatcggacaatacggcatatttgtcttcgcctgcattcttaatcaatcccatggcgatacctgataccggtttcttgattttcacacctgcatccatcaatgccagagttccggcacatacggtagccatggaagaagaaccgtttgattcgaggatatcggataccacgcgtactacatacggatagtttgcaggaatctgacccttcaatgcacgccatgccagatggccgtggccgatttcacgacggcctacaccgcgctgtgccttggcttcgcccgtagagaacggagggaagttgtagtgcagaaggaaacgttcttttccgtgttccaatacgtcgtcgataatcttctcgtccaacttggtgcctaaagtcacagtagacaaagactgtgtttcgccacgtgtaaagatagcggaaccgtgagggccgggcaggtagctggtctcacaccagataggacggatttcggtcgtcttacgtccgtcaaggcgcttgccttcgtccagaatggaacggcgcatcgcctctttttccacatcgtgatagtaacggtcgatgagggctgccttttcttccagttcttcttcggagaactgtgccttgaattcttcgcggatggcatcgaaagcatccatgcgttcgtgcttgttcttgtttccggaagcggcaatggcataagccttgtcgtagcaagcgtcgtgaacggccttacggagttcttcgtcgttcacttcgtggcaatattcgcgtttcacggtagagcctacttcttctgccagttccatctgtgccttgcactgaatcttaatggcttcgtgtgcggccttcatcgcttccagcaagtcctgctcggaaacctcgtccatttcgccttccaccatcatgatgttttcataagtggcgcccaccatcaagtccatatcggcttgttctagttgttcgaaggtagggttgatgacgaattgtccgttgatgcgtgctacgcgtacttcggaaataggtccgttgaaggggatatctgaaactgcaagtgcggcagaagctgcgagtccggccagagcgtcgggcatatctacgccgtctgctgagaaaagaatgatgtttacgtatacctctgcatggaaattatcagggaataaggggcggagagcacggtcaacgaggcggcaagtgaggatttcgtagtcagaagcgcgtccttcgcgctttgtgaaaccgccggggaaacgtccgaatgcggagaatttttctttgtactctacctgtaatggcatgaaatctgttccgggaactgcgtccttggcggcacaaacagtagctaaaagcatggtgttgcccatacgaagcattacagaaccgtctgcctgttttgccagctttcccgtttcgagcgtgatggttctgccatcaggaagctcgatcgtcttaacaattgggttaatcataaaaaatgttttatatctaattttctttcaaaattcgtgcaaagatacataatttattcatgtaaaatggtgggaatgagataaaaagtttgtatttagttgttttttgcagttttctatatggaagaacgagggaaaatgctttgactgaacttgaaaagaagtatatttgcaggcacgtttgcaaaacaaaactgaagatacgatatgaagaaaatcttttttatggcacttgctgcaatagcattgggtgcatgtaattccgaaccgaaattcaaagtagagggtgaagtgtctggtgccgacggcaagatgctttatttggaagcctcggcattggaaggtattgttcctttggattctgtaaaactggaaggggatggctctttccacttcaagcaggtacgtccggtgtctccggaattttaccgtctgcgggtagacgacaaggttattaatttctcggtagattcgacggaaacggttttggtaaaggcaccttataccgatttcgccactgcctatacagtggaaggttctccgaatagctcgaagataaaggacttgacgctgaagctgatgaagcttcaggataatgtgaatgcattgctgcagtcggtgcaggcacataagataggtgccgatgtttttgaggacagtcttgcctctttattgaagaactataaggatgaagtgaaaatcagctatatttttgccgctcccaatacggctgctgcctatttcgccttgttccagaagttgaataattatttgattttcgaccctctgaacaataaggaagacattaagtgttttgcagccgtggcaaccagcctgaacaattattatccggatgccgaccgctccaagaacctctacaatattgtgataaagggaatgaagaatacccgtactccgcagcagaaggtggtggaaatccccgaagaggcaatttccgaaaccggcatcatcgacattaacctgcgtgacatgaagggcaatacacgtaagttgagcgaactgaagggcaaggctgttattgtggacttcactgtttatcagagtgccgtttctgctacacataattatatgttgcgcgacttgtacgacaagtatgccgcccagggattggaaatctatcaggtttctctggatgcagacgagcactattggaaaacaactgccgacaatctgccttggatttgtgtgcgcgacggcaatggaatttattcgtctatagcggcttcttataatgtgaagaatgtgccttctgtgttcctggtcaacaagaacaatgagttgagtgcccgtggagagagcattaaagacctggaggcggcagtgaaagcattgctgtaacatgttataaataagaagttttcgtttaaatatgttacaaagcagccttttatgcttgacacgcattgtataaaaggctatctttgcaaaggaaaatcggaaagagggttccagcatgctgaccatgttggaattcttttttgtttatagtaccattaaaaactaacataacatttaaggaggaaaaagtatggcttatatgtcagaagacggctacaagaaattgatggccgaattgaaacacctggagacggtggaacgtcccaaaatatcggctgccattgccgaagcgcgtgacaaaggtgatttgtcggaaaatgcagagtatgacgctgccaaggaagctcaaggtatgcttgagatgaaaattaacaacttgaagctgaccattgccgacgctaagattattgatgagtcgaagttgaaaaccgattctgtacagattctcaataaggtagagcttaagaacgtgaagaatggcatgaagatggtttatactatcgtttccgaaagtgaagccaatctgaaggaaggaaagatttccgtcaatactccgattgcacaaggtctgcttggcaagaaagtaggtgacatcgcagaaattaaagttccgcagggcatgattaacctggaagtagtgaacatatccttttaaaggaaggcaggtccgcatacgggcttgccttattttataatttatagctatggcaacaatattcagtagaattatcgcaggtgaaataccttgctacaaggtggcggaggatgacagattctttgcgttccttgacatcaatccgttggtaaaaggtcatacattggtcattcccaagcaggaagtggattatatcttcgatttgaacgatgaggatttggcggcgatgcatgttttcgccaagagagtggcgcttgccatcggcaaggcctttccgtgtagaaaggtaggagaagcggtattggggctggaagtgcctcatgcgcacatacatttgattcctatgcagaacgaaaaagatatgcttttctccaatcccaaactgaaactgacggacgaagaattcaaggctgtggcagaagctatccgtgcagtgctttaatcggtttattttcctcccctaaataaacggaagcgggagttggacttcatccagctcccgctatttttttgccttcggcacctatcctttaatttttaatttaaatgtattcctctcccagttttatctgggcatcattcacatatttgcggatggtatgttcttcatctttcttgcaaatcagtaatacattgtccgactcggctatgagataaccttccaaaccgtcgataactgcaagtttgttgtcgggcagcaccacgatattgtctttgctattatagatgagggatttacattttaaggctacattgcctgcttcatctttgggagacaaatcatacaaagacccccaggttcctaaatcagaccagccgaaatcgcctaatgacacatatacattgtctgccttttccatgatgccgaagtctatggagacattggggcaagcagggaagttctcatcaatgaattgtttctcttggactgttccatacacatctttgccgggggccagtttggaagtcagctcgggcagcagggcttcgtttgccttgatgatggtatttacgttccacatgaacagaccagagttccaatagaattctccactttccacgaatacttttgccagttccagttcgggcttttcagtgaaggtttttaccttgtagaaattatcaccggcggcttcggctatttgtatatagccatatccggtttccggacggttgggcttgatgccgagtgtcagcagattgtccgattgggaaacgaagtccagccctttttcgatagctgccagaaattcgccttccttcaggattaagtggtccgaaggagctaccactatattggcgttcggattcaaggcgcggatatgataggaagcccacgcaatgcagggggctgtattcctgcgtgtcggctccagtagaatctgttcgggtttaagttcgggaagctgttcttttacaaggtcggcatacaagtcatttgttacgataagtatattttccatggggattacctgcttgaagcggtcgaaggtttgctgcagcaaggaacgtcctgtaccgaagaaatccagaaactgttttggaagtgtcttgcggctgaatggccagaaacggctgccgattcctccgcccataattacacagaaattatccttattggttaccatgctattgattttaaaagtttctgctaatgtactgcatattttacaaacaaggaatgattcaagcaggttttatcgtttttttcgcctttttttaggaaaagtattgcaggtttagaaaaaagctgtatctttgcaccgcatttgagaagtcaaacatgcccagatggcggaatcggtagacgcgctggtctcaaacaccagtggattcacttccatcccggttcgaccccgggtctgggtacgaaataaagaagcggggaaagttttaatgcttttcccgctttctttttatacttatcttttatgccctttgctcatgggaacagatatctggcaagagatagaagtactgaatcaagaatttgtgaggcttggtatcagtcagtcggtagactatgaaaagtactacctctattcgcttattacccattctactgctattgagggctctacacttaccgaattggatacccagttgctttttgatgagggggtaacagctaaaggaaagccgttggtctatcatctgatgaatgaggatttgaagaaggcatacgaactcgccaaagaagaaagtgcacaaaatgcggaaattacgcctgttttcttacaaaaattgaatgctgctctaatgcgtactactgggagtgtatataatgtaatgggcggttcttttgattcttctaaaggtgaatttcgtttgtgcggcgttactgctggggtgggcgggtgttcttatatgagctatcctaaagttcccgctaaagtagaagaactttgttctatattgagagaaaagcaaaagaatatggaaacatttcgggaacgatatgaattgagtttcaatgctcatctcaatttggtaaccgttcatccgtgggtagatggcaatgggagaacggctcgtttgttgatgaactatatccagttctgccatcatctttttccgacgaaaatctttaaagaagataggggcgactatattctttctttgcggcagtcgcaagaagatgagaacagtcagcctttcttggactttatggcagcgcagctgaaaaaatcatttgcgtcagagattgagaaatacaatactggacgtaaaaaaggttttaatctcatgttttgaaaagcgacgattccttcctgataagctcatataggcattagctgattgtgctgtatcatccttttgtattgggttattctcaaaatattctcttctcggcattaaatacaaaataatgggtgtaaaatgcaaatttatttcgtagatactgttttcgcatttatttttttctaaatttgcagtagctggaatcttatctaactatttaattattaaatgtttgccaattatgacaaaacatgttcctctttttttacctctcggaagtattcggttactgacgatattcttctctttttgtataatctttgttcatccggcattggctgacaaaatggctgaaagccccgaacttttcgatactgctttcaccttgcaggaaaggcttgatattcccgacgggtttgttcaaagagagatggtctatatttccattcttttaggtacattggtgctgtgcctcttctttttcttcatgcagaggcggatgaagaaattgagggaaagggaccgggagaggtatctgcaactgttggaaggcattcttgataatcttcccattgcggcaaaagtgaaggatgtgaatgatgggatgcgctatactttttggaataaaaaggcagaggaactctttgaatgttcggccagagaggctataggcaagacggattttgaaacaatgccagaggctgcggctttaattaggaaggaggatgaagagttggtcaagacggggattccacaagaaggtatacgacgtttttttaccaagaagaacgaggagaggtttaccttccagaacaataattttataaagctttctgatggtcgcaagtggattgtttatactgcttgggacattactgatttgaaaatcatggagcgcaagctacgtctggccaaagaggaggctgaggagtccaaccggataaaatcggctttcctggccaatatgagtcatgagatacgtactccgctcaatgcaatagttggtttttcgagtattttggccacggaagtgtctgaggaagaacgggtggagtatctcgatattatagagcggaataatgaactgctgttgcagctcatcaatgacattctggatttgtcgaagatagaagccggtacattggagtatgtctatgctaacgtggatatcaataaaatggtgtccgagatagagcaggctacaagtatcaggctgaccaataaagacgtgcgtctggtcacggttacgccattgcccggtttgctgctgtataccgatcagcgcagaattactcaggtattcaataacttcatcagtaatgcgctgaagtttactgctgccggtagcattaccattggttacggaatgcccgaaaatagctatatccgtttttatgtcaccgataccgggacggggatatcatctgagaatgcgcaggggatttttaaccgctttgtgaagctggattcctttaagcaaggtaccggactgggactggccatttcgcaaaacattgtgaaggaactgaaaggagagataggggtggagtcacagttgagcaagggctccactttctggttcacgttgcctttttataagatggacgcgcaccgttctatctttccttgatgctgcaagctcaatccaatgaagggacatcgattgtctggctttcctcgttccagttgtcaagggtgaattctccggatgattcttcggaaaagatgtctcccagagtgagggtcagggtcagtttggagtttgcttccaaaggtccgttcaatgtttgcttgaaacttttcacgtttccatttttcagtatgatgctcatctggaattccggtttcccgaaagaagggaagagcatgacggtggcgttgctcatttgtgtaccgtcgacggaacggaccagagggaaggctactgtgcgtgggcttccttgaggagcggcggtgtagaaattcagttctccagcaatattggtgatgcgcaccaccatgctgtcgatgctcgaactgaggatgccgttgttcttgtccttgatgattactttcagtccggtcactacccgtttgagggatgctttcaggtcctcacttccaatgttggcaggctggacggcgtgtaccaggtcgaataccggataataggttgtgtccgcttccattttgaatagggagaagtgttgccgggacatgtcttcgcctaagatgtagaccgggtccctcatgagaggatgtgcataaatcggctcctcgtatttaggggttccccaataaatcatgttatagagacctgcgggtaaggataactctcgattgacgccatcgttatagaaagctccgtctttaacttggtagtaaccgtaaaaaggtgtcagcttccggtttatgtagtttccataataaatagaggtgcccgccttgcagggcatgatggtcagtatgccggtcagcgggctttgtccgctttctgtggacacgtccatcaaaagtcgtggtgataccaactcactgcttttttctatctggggcggattgtcatcggcgcagcttgccacgattgcggcaagtactgcaaatactactaattttttcattatctgttaagctttaggttgttcttccttgagaacgtttttagaaagaaatggttctttgtactccggagaaagtatattggggatggaaaagtgaggtgaaaccaattccggtattgaggggaatgggaagaatagcccctcttcaaaaggcttagagaagggacggaaaacaaattataccttttttagtaacattttagaagccttgattaacgaaatcatatactcttcgtaacaatttctcgacattcttttcttgttcctccatacatttgcatccgagttctttggtattaattgaagaacacaatgaatctttgatattaaccattaaataatgtacaatgagaaaaacattcttggaaaagtgcataaatctgcgtttatgccgtgttgcattggtacttttgtttcttgtacctgcaatcagtagcctgcaggctaatccttctcaaaacaagaccatttcgggtgttgtgacatcggctacggatagtgagccgttgataggtgtcagcgtgcaggtgagagaaaccgctacgggtggaattaccgacattgatggccggtattcggtaagtgcccaacaaggacagacactggtgttttcttacatcggttatcaatcacaggaaatcaaggtaggtacttcttccgtcatcaatgtggtgctgaaggaggacacggaaatgttggatgaagtggttgtagtgggctatggtgtccagaagaagaaattggtgacgggtgccactgttcaggtgaagggtgacgaaatagccaagatgaatacaaccaatcccttgcaggctatgcagggacagacaccgggtgtaagtattgcttcgacttccggtcaaccgggtgctgacatgaaagtgagtatccgtggtcttggtaccgtgggaaatagtgctcctctttatctgattgatggtgtgggtggtgatatttctactttgaatcctgccgatattgaaagtatagatgtactgaaagatgcggctagtgcggctatctacggttcggccggtgctaatggtgtagtgcttattactaccaagcaagggcgcgaaggtaaagcgcagattagtttcgatgcttattatggaatacagaatgtagctcgtaaggctaatatgctgaatgcaaaagagtatatggccattatggatgagcaggctttgaatagcggactttcggcttacgattggagccaataccagtctatttacgatgccaatggcaatgtgtatgatacggattgggtagatactatgttcaaagataatgccacaacggagagctatacgctgggtgtcactggtggaaacgcaacttccacttatgccctttcgttaggatatatgagtcaggaaggtattgtcggcggttcggatgtgtctaactattcgcgttacaatttccgtgtgaacagcgagcacaaacttttcaaggatattttgaaagtgggcgagcaggtgagttttgtatataagatgaataacggtatcagtgtaggcaaccaatataataataccttacgcggtgcattcggaacatcgcctatcgctcctgtctatagcgataataatctttatgattcgccttacaatgacaccagtaccagtgactggaataaaggtgatggaaacccttatggtttaatgatgaccgacagcaacaatgagaacaaaacggctactttttccggtaatgtttatgctgaattgcagcctgtcaagaatttgaagataaagtctgtattcggtgtggtttatggttccagcgaataccgtagtttcaagcctctctacaagttcagccaatatatatataatgaagaacgtactaccgtatctcaaaatgccaatcactctttgggtatgacatggaccaatacggcttcttatgactggactatgggagaacattcgttcaacgccttgctgggtatggaagcctatcgttacgagggcacttatatcgaagctaaaaatggtatgttgaaagaaggttttgatgattgggagcatgcttttgtgggcaacggaacggcctccgattcgaccaacggcttgggtgtcagtggcaatccgcataccgagagccgcaaggtgtcctatttcggccgattgggttggaactggaaagaaacttatatggtcaatgctactttgcgtgcagacggttcgagcaactttgccaaaggcaaccgttttggttacttcccttcggtatcggcaggatggaccattactaacgaaaaattcatggaaagtacgcaaaactggctcgacttcctgaaaatacgtgccagctggggacaagtgggtaatgccaacattgacgcattccaatatctggctcctatcaagagtaccaatacacactatcttttcggcagcggttacggcgactcggatgctgcggcacagctcggaaccaactggggagcttaccctagtcgtctggctaatgctgacatcaagtgggagacttcacagcagaccaatatcggtcttgatgcccgattcctcaacagtcgcctgggtgttaatttcgatttctacattaaagatactaaagactggctcgtggtggctcctattcttgctactgccggagcaggtgctccttatattaatggcggtggagtgaaaaacaccggtgtggaactcaatcttacttggaatgaccaaataggcaaagactttagttacaatatcggtatcaacggtgcctacaataagaataaggtcggagagattcctaacgacgatggtatcattcatggctctaccaaccagttgtatgacaatactcctgaattctatcgtgccgagaatggtaagcctatcggttatttctatggtttcaagacagcaggcatattccaaaacaatcaagaaatagaggattggattaaggctggtaacggtgtgctgcaagctgacgtacaaccaggtgacgtgaagtttgtggacatcaaccatgacggacgggtgaacgagcttgacaagaccgatcttggtaacggtattcctgatttcactatgggcttcaatctcggtttcaactggaaaggacttgatttctctgtagtggccaacggtgctttcggacagcagattgtccagagctatcgtaaccatacctccaagcaagccaattatactactgcaattttaggacgttggacaggagagggaaccagcaatcgcatacctcgtgtcacagaccagaatctcaactggcagttctcagacctctatgtgcaggatggtgattacctgcgaatcagtaacattactttgggctacgactttgccaagctactgagatgtaaggtcatcagccagtgccgtatctatgctcaggtacagaatgcgttcacatttaccaaatatgacggcatggatccggaaataggttatggtcccgaaggagataacggacaaggttgggtatcgggcgttgatttaggttattacccccgtccccgtaccgtattgtttggtgttaacttgaaattttaaaatatagactgatatgaagaaaaacaaaaatatatttatggcaagtgtcctgctcctgagtttgggactggcttcgtgtaccgacagttttctcgatgttacgtcgaagactgaatcttcaaccggtacattctataagactgaaaaagatgcttatcgtgctctgataggttgttatgatggttggcgccagacttcatcagccatgatggtagggttttatatggcttccgaggtgatgagtgccgagtgttttggcgctaccggaaatgccgatggacgtggctatcaggccattgaccgttttgacatctcccaatcgccggctgacctcaacctatacgaaggtgactggaaaaattattatgcgggcgtctatcgttgcaacgagctgatagctcatgaagagcagattgtatggaatgaatcggatagcaaacgtggtatctatatgggcgaatgtcgtacgttgcgtgcattgctttatctggatatggttcgtttatgggggaatatcccactctttctggaaccggtaaacgaaaatcgcgctccttcacctgccaaagaggtgttcagtgccatatttactgacttaaaatatgctatcgagaatattcccggtgacgcttatcccaaggccgactataccaagaacgacggacatattacaaaatatgccgccgaggctttgctggcacgtgcctatcttttctataccggatattacggtgaagaacctgtagaggtgactcgtgccgaagctttggctgctgtagaagacgtaatcgcttcaggagaatatggtttggtaccgcaattcaagaatttatggccggcttcttctgcaaaagtggccgaaaaaggagactatgaaactttgaagggtacatatgccggtgatggaaacaaggaaaccattcttgcgttgaaatttaccgctactcaggattataacgggaataatgactccaaccgttggcaggtgatgttgggtatgcgccagcttaatgctgctccctattgcaagggatggggcgcattgacggtaaatcctgattttgtggaagcgtttcccactggtgacctccgccgttcggcttctatcattgatttggtaggggaaggaatcaccggttcggccgactttaccaccagttttaatgactggcgtgaatataccggctatgctgtgaagaagtatgctcccctttgctatgccgatggaagccatgccggtaagcaggatggtagcggtgacttccagacacagaaccgccaagactacgtttttatccgttatgccgacgtattgttgatggccgcagaactgggtagccccaatgcgcaaacttatttcgaccaagtgcgtaagcgtgcttatcaggttgatgacaacggaacagtatcggccaactatcaagctaagagtgtgtctcaacaagctattatggaagaacgtcgtcttgaatttgcttttgaaagcattaattattgggatctcctgcgtcaaggtatagacgtggcagccgagaagctcgccttgaatggtgtcaaggtgaagagtggaggcgctgatgatgcaataaccatacgggtcgaccgtgtgaaagccaccaaaggcttgagccagattccttataatcaaattaacctttcacagagtgtacttgtgcagaatcccggatggtgagtaccattaatagagtaaataaaaaataaaaacaataagatatgagacttaaatcattcttttccatattggcaggagcggctttgatattttccgcttgctcgcccgaagagtacgagatgggggcaaaaacctatgtttccgatgatttggtggaaggtatcgcctatacggtgacccctgatgccaatgatcctaatacgattcatctgacttcgctcatcaagggagccactcccttgtgggtcactccaagcggtccttctcaaaagaccactcttgacttggcacttccttttgccggagaatatagcgtgactttcggcgcttccacaccggcaggtccggtatatggcgaaccatataccttcaaggtagagaccaataactttgccatgctcgaagaccctatctgggctaaccttgcaggtggagtgggcaagagccgtaagtgggttcccattgacaagaactttggtattggccgttgttcgggaccggtgatgtacatgagccacactgatgtgaaaaatgatggaagcaatattaccgaccttatgattggtagcgccaattgggctcccaactgggatccgggtatccaatcgtggctcattccggcagacgacccctatttccagtcgtacatcactttcggcctggatgctgtgaaaggctgtacggtggaacttcatcgggtggctgcttcgggcacgacggatgccaccggaactttcaacttgaatgtgtctgacccgaaacgccctgtcatatctttctatggcggtacctattcattgcataacgagggttttgatgatgtctgttccaactataccaacgacatcaagattatagaatgtactccttatctgctgcaggtagctacgatgcgtaccaatagcgaaggtccgtggtggctggtgtggaacttcatttccgaagaggcttataatgaccccagtatcataccgactgaagatccgggtttgcttcagcctgccgaagtacaacagcctgccattgaagatttggcaaccaaactgttcactactgaaatcaacggtgtcacctatgtgggcaatgaggcacgcttcctcatcaatgatgaagaaccttatgactggacatggtggaatggtggctctgctgcttgggaaagcgtagtgaagggacagtacggttcttcatgggcacctgtggccgatgcttccattgccgactatgagctggtattgagcagcacggccgatggctacaaatgggatgacggtaccaatgccggtaagcttgccattgaagacggcaaattgaaatttatggatgccgacggcaatccggttgagataaccgtcctcaccgctaccggtgataagcgcacggtggaagtgaagggaagcgagtttaccgtaatggcttgcgatgtcaccagctctttccagatgggtgtgcctgcaacgaccaatgacaagggagccgtggattcttatctttgtgccaacctcaactacaaacctatcgctaccggacctaccgggcctactgaaatcaaggtagacaacagcaaggtacaaattcttttcggtgacggaaatcccgatcgtttgcgcttgcagttctacaatccttggggcggtggtgacgcgggatggccgatcgacatcacgaaggtgaagttgaaaaagaaccagacgctgaagatacagtacaaagtgctgagtggaatcacttggaacgagggcgcgactcctaagaccgtgattatggacaataacatcggaaatgcttgggaagatgactgctacaacctggctcatgccgtggcctttgatactgccgaaggagctgtacagactgtgtccgtgaccaataccaccggtgccactgtgacttacgaaggaagcagttgtatctgtatcggtatccagaataagggacttgctactgtggctgccaccgaagacggacagccggatgtgaaggttgagataatttcgatgaccattgaataaccacttaaatgaatttagtatatatgaagacaaagatatatttaggaatactttcatttgtactgggtctttcgctggcttcgtgcagtgaagatgacgactatactatccacaccaccccgattctgaacgaatcgtcggtggtgacggggtcgtccgatgtgaccgccactaccgctacactccatgccacgctctccgggttggatggcatggatgccggaagctataagaccggcttcttctatggttttgcgcaagacaacctgcccgaggacgtgcaggctgcttatgacggcagcgccttcagtgctcagttgaacgggttgaacaataactctacgctctattatcaggcttatgtatgcttgcagggtaaggtgtattacaaaggtgaggtgaaaagcttgctcaccaccgatgccaaggtggctactgccgatgccgcatttgtcgacttcgcctcggctgtattgggtgggacattgaccgatgctacggccgatgctacttgtggtgttgttatctctacttcatccgatgtagaagcggttcgtgcaggccttatagtgaagagtgaggaacttaaggacagctattcattcgtccatgaagggttggtgcccgaaacgcaatactattatgcggcttacctcaatctgggtagcggcattgtgtatggtgaggtgaagagcttcactactcctgcctatgacttcgatctcgacaatgaccttgtcgacctgggactctccgtgaagtgggctcgcttcaatgtgggtgccaagagcgagactggactgggtggccttttcggattcggtgacctgaccggatgcaacaatagcatcgaccctgccgactatgcttcggccgatacttataaaacggcttccgacttggctttccgtgcatttcaagggcgtgccacactgcctactgccgatgatttcgaggaactcttcacgttgtgccagaaagagtggactgagcagaatggagtgacaggtttcaagttcaccggtcctaatggtaattccatcttcctgcctgcagccggtacgcgtgtggcaaacgatgtgacagcgctgggtactgaaggatattacctcaccggtactgtcaactcttccaatacagaatttgcggtaggttaccagtttgcagcttctgtcaatcaccgtatcactgccgcagtttatcaaggtatggctgtacgcgctgtttccacagccaagaacgtaccgttcaacaaggctctgctctatcagaagtggtatcttgacaatggccaggacggtaagcagcacgcgtttgaaggacctttcacgcagtggggtgttacggacaactggagtacggtttccaacggacaacccaacattgaacagcagattcattgggagatgggtacggataatggctggataggttatacttacggaaaggactatggttatatggagctcaaggaggacggtacggtgaatattcatcgtattgccgaagacggtaccgtgaccgatgaaaccggtaagtttacgattgacgaggcgaataaagtgattgacatcgacatagatgtgctttgtgccaatacttggattggcacgaagagtggtaagctgaacattctgtcgttgactgccgacggcctgcagattgccctgcccgatggcgactatggctattcgttgaactattacagccaggccaaggccgatgccgatgcgcaggttcctgtattgctcaatatcgccgattcatcatgggcaggaagttgggatgcactgcttgtagccatttcacccgaagacttggctggacagcacacgtttgttttcgagggaacttgtaccgatgctatggtgtttacgcttgactttgccggtatggcgaagcgctatcccaattcgtttgtacgcattgacgacatcaagctggacggtacttccatccggtttgatgccaaccgcttctattatggcgacattgaaggaaacggcaagtaccgtgttcagttgttcaatgcttatggggcgggttctgtaggcaatgctgttcctctcagtccgttcagcaatgtagaaaatcaaggtaccgagcctgccatccatttcaaggagaagcttgagattgtctgcaccgtcattaccgacggtaccggtgcaggtatttatacgcccaatctggttactgtcaatccggattggggaagtgcatggggatataacgcaggagctacgttcgaggtgaaatacgagaacttccagtacagccttgtggcttctcagttcgacattaagtacgaatctgccgactatgcggcaggttccatcatgaccttcgttgaagtggctgacatttacaagtatttccccggtttacatgccacacttgacaacctctatctggatggcaaggaagtgacatttgatgcatccaaagtgctcgatgccaatgaatccccgaagtatcgtctggaactttggaattgctatgggacaacaaaggataaagggtgcgctttcggtactcctgatggtgatgttatcaaggaacttggtttcagcagttctatggaagtgaagttcacgttccacactcttttctctgttcctgaatggtaagagggatagacggaaatatactggttagataggaaatccgggatgcaggccatcccggattttttgttttgccctcaccggtgtgcatcgttctgatatagattgaagaaccatagagagaataaaataaaggaggtggtccgtaaggcggcgctttgatagctctttgccttgtactttgttcggacgggatgggtacttattgcgataaacatagtgattttatggtatctccactaaagtggtccgccttgttcatagtagtgaacaaatcagcccacttaggtgaacaaacttgttcacctaagtgggccgttcatgaatctttgtactgaaccggacagacaaaagggcggaagcggagaaaagcaggggctttctctaagattggctgctattttccttcgtaatcaaagtattcaaagtctgcatatgcttttgaggtttgagaaccggagacggcatacaatcccagcatgattcccgtaaagccaccggcagtttctgtactgatatagcgcgtattcattcggcccagttctttgaagtcctttccgtttgtggcatactcgaacgaatagatttcgttgctgccttttacacggagttgtactttcccctggggcagaataacttccttttccgtatgggtcaattcattcaattggtagcgcaatactacagcttgtttcccgtctgccaattgcttgactaataaatcgtaatgggacgattcgaacatgtagaccgtcaggccggcttcgtcgccactggcggcttttttcagttgcatggaagtggtggctgtgaagtcgatatgttcttgccggcggccggcaaaagtaggactgcctttcccgttgttcaggtttacgggggttgctttcagacggaggttaccggaagcaaaggtatagttttccggatgatagtttctgatatgaacccattcgggacctaatttgccgtttttgaaatcggtgcgtgcaggcttgggggcaagaggatattgcggtagggttggcacatccatttgcagggctattgtgccatctccgtttactaccggccaggcattcttgtcccagcgcacgggagcaaggaacgtttcgcgtcccagcaggtgatggttgccgctttgcggacggaaagcgagacacaccatccaccacgaaccgtcaggggcttgtatcaggtcggcatggccggttccttgtatcgggctgttttgtgcattcttgttgatgtgggtcaggatgggattggcggggttctcttcgtacgggccgtctatatcgcggctacgggctattgtcactttgtggccgtattccgtgccgccttcggaaatcagcagataataccatccgtctttcttgtaaatatgcggcccttcagggtgccgtccgcccgtgccgttccagatgcgtttggactcgttgagttgttcgccggttttggggttgatttcgcacagatagatacctacgcccggattgctgacgaggtaacacttgccgtcttcaaaatagagggacgggtctataccgccttgcttgagccatacgggttctgaccattcgccacgcgggtcggtagtgtgtacaaggaagttgcctttgtcggacacgttggtggtaatcatgtagaatgtaccgctgttgtagcggatggtaggtgcatagattcctccccatgggccggcgtcgtgaagcggcagttgtgaggggcgcgtcaggcagtgtccgatttgttcccagttgatgaggtctttgctgtggaacaacggtacgcccgggaaatattggaaactactgttgaccagataaaagtcatctcctgcgcggcagatactcgggtcgggatggaaaccgggaataacgggattttgataaccttgccggttttgtgaaaagcaggacaggctgagcgccagtcctaaaagtaacatcatctttctcataaatgcattgtattttaaatagtttatcagatatatgaatcagggtagttgaaggaagtgtttatacacaaaaataaagtattctttcggttcaagcaagccggatgtgtctgatgtcattcaatgataacttttgagccctattcggaaacaaatgataccgttgcagataacatggcatcggtgtgttttccgccttttccgctacttttgctctcactgatttaaccattatttttaatacgtaaagacatgatgaagaatatcattgaaaaattccaaatttgcctggtgctgtcggcactgcttttctcttctttcgttgccgcatgttccggcaatgatgatactgtgactccagaaataacgattcccgcgaacattctgacggatggaatgactttctccaagaccggaggaacaagtacgctgaacatcaagtcgaacgttgcattggaagttaccagcagtgcaccggagtggtgtaaggttactgccgaaagttctgcttcgagtagtattttgaagtataccgttatggcagaagccaatacggacacgagtgaccgtgaagccaaggtaacggtgaaagccggaggcagcgaagtagggagcttcacagtgaaacaaacggctgcggacggattaatcatatccaactctacctctttcgacctgccagctgcgggaggagatgtttctgtggtggtggaaaccaatggtgacgtacaagccgtttccgatgtttcttggataaaggcggtcaatacccgtgccatggaagacaagattttcaagtttaccgtctctcccaatcctttgggagcgcgcgaaggccatatctcttttactttgggtagcctgacggagactgtggccgtaaagcagggtgcgggcgaaaccggcaatatggaaagcgatgccaggacacttgccgccaagatgtatgcaggtatcaatatcggcaacacgctggaagcttgtgataacaagaacaagatagcgagcgaaacgttatggggaaatcctaaagtgagtgaggcatatatcaaagggctgaaggcattgggatttaatgcggtgcgcatcccttgcgcgtgggattactacattgtgaatccatcgacctatgagatagatgctgcatggctcgaccgggtgagcgaagtggtgggctactgtgtagccaatgatatgtatgccattgtcaatatccattgggatggcggttggcttgaagagagtatcacccatggttacagcagcgaagtagatgccaagcagaaagctatctggacacagattgccaataaactgaatgcttatgacgaacacctgctctttgccggatgtaacgaacccggacagcaagaccaggggaacgttggcacatcggccatagatgtcatcttgaaatacgaacagaccttcattgatgccgtgcgtgccaccggaggaaataatgcgagccgttgtctgattgtgcaaggtccttataccaatattgacaagacggtgaatgactacacgatgcccaaggatgaggtacccgaccgtctgatggtggaagttcacttctatgatccctatcagttcaccatgatgaaccatgacgaaacctggagcaatgtattcctttattggggtaaggataatcatgtatccggttccattcataatgccaccggttacgaagaagattatgtgaagcagcaattccagaagatgaaaacggcctatgcagataagggaattcctgtgattgtaggcgagtatagtgccatgaagcgggcaaaagaagacaagatagaggggacttctgaacttgcctatcctgatattgaccaggagatgcataacaagagccgctcctattggaatgaggtagtcacccgagaggcgaaaaaccacggttgtgtccccttttattgggaaaccggcggtgacatgaaccgtggtacgggtacggcgaaggaggcttatgccattgagggcatcatgaagggagccgcagccggtcaatacccttattgattgagtggtggatagaataaaagacagtttttaaaagtatcatacaaataggttttataggttacaaggattgttgatatagtttttttgattggttacggagaagtatgtccgcgagggatatgcttctccttctttaaaaatccttgccttttcttgcttttctgttcgtttttcacttcatttgcaataaaaataacttcccttagctctgatagtatgaaaagactgcaactactgctcttgtgggtttggatggtatgtttctctgctgcttcacacgactacatgtttaaacatttggaagtgaaagacggactttccaataatcaggttaatgctatttataaagattcaaacggattcatgtggtttggtacagcttcggggctgaaccgctatgatggttacaatataaagatttatcgcagccagaaagatgatgagaaatctcttcccgatagttatgtcgaggatatacaagaagatacgtccggtaatttgtggatacgtacgggaggcgggtatgccatttacaactcggcttccgatgtttttgaccgtaatgtggaagcctggatgtggaacatcggtctgaccggaaatccttcgcttatctatattgataaggaaaagactttctggatctatattaatggtaaaggtgtttacagctatagagaggaacagaaaaatgccgtagcagtaaagggggcggatgaactgcttgcgaaagccgaagtgtccgacatgaaagaatgcggcgaaggaatcctgctggttctgagtaacggtatcttggcttgtatagatgaggaaaagcaaaatatcaagtggaccaatccggacattgccgaagattgcagggaagtaaagaatgctacctttgatttgtttgtcgaccatagtgggcgggcgtggatattcagtgtggaggggatgtggatttatagcctttctcagaaggtttgggaacagcgttctccccgaacggacacctacaataccgtacgtgcagtggcacaggataaatacggatgtatatgggtaggcagggatcaggatggcgttgaattgatagaaccggcgggacggaaaatccgtctggcgaatgaacctaataacgggcgtactctgtccaacaatacaataacggctctttatgaagatgaggccggtacgatgtgggtgggaacctacaagaaaggcatctctttctataatgaaagcattttcaagttcggtattgccgatgtaggcgacatcaattgcgtggaggacggaggcggtgacatcgtatggctgggaaccaacgaccgcgggctggtgcgctggaatagcgtgacagatgaacgtatggttttttcgcatacggcagatccccactctatctcgagtgatgtcatagtctgccttcttcgggacagtagcggcagagtgtgggcaggtactttctggggcggactgaattgctatgatgggaaccgctttatccattaccggtcccgtaagggagacagtaactcactggtctacgacaatgtatgggcattggcagaagatgcggacaaaaatatctggatcggtacgttggggggaggattgcaatacctgaatcctcagacggggatatttaccacctattctacaggtaattcaaaccttgtgtcggactatatctcatccctctgcatcagctgtgacaataatctggttatcggtacttcggcagggatggctttcatggacctgaggaccggcgagattacaaattttgcaggtacaaaatcgggtaagaccagactttccaaccaaaatatcaatcaagtttacgaagatagtcgcggtttgctatggatagccacgcgtgaaggcttgaatgtatatgacagcaaacgggatgaattgtacgaagtgcctatcaagcccggtttctccaaactattgatattaggtattacggaagatgaaaacaaaagtatatggatcagcaccggaggagaactgataaacgtggtgttgtccgttgacagcaagacggagcagcccgtgttccgttgctatacctataatgacaaggacgggttgcagagttgtgacttcaaccagcgttccctcaaacgactgcatacgggcgagattgtagtgggaggactgtatgggctgaatcgcttccagccgggcaacataaagtataaccgtacgttgcccaaggttatgtttaccggtttccagttgttcaatgaagacgtgaaggtgggcaaggagtatgcaggacgtgtcatcttgaaggaagctttgaatgaaacagaagaagttgtcttggattataagcagaatgtgttcacggtgctgtttgcgtcggacaatttcgtgctgcccgaaaagacacagtatttctataaattggaaggatttaatgagaactggctgacgagtatgtccgatatgcatcgcgttacctataccaatctggctccggggacttacatcttaaaagtgaaggctacaaacagtgacggatatgcgggcactgaagaggcttcgctcaagattgtcattcttccgcctttctggatgactccgtgggcatatatcgtttatgctcttctgatagtaggagttgtttccttttcactttatgccgtacaacggagggaacgtaataagttcagaatccgccagatagaggaagatgcgaagaagagggaggagttgagccagatgaaattccgcttttttacgaatgtcagccatgagttgcgtacgccgcttacgctgattatatcgccgatggaaagtatgatgaaggagattacggacgaaaaactgcatggcaagctgcaactgatgtaccgcaatgcgcagcgtttgttgaatttggtcaaccagttgctcgatttccgtaagaatgagatggcaggattgcatctcactttgtccgagggggatattgtggcgtatgtgcgtagcatctgtgcttctttcctgatgctttctgaaaagaaacatgtacatctgacattcttttcggccatggaatcgctgaatatgtcattcgacgaggataaaattggtaaagttgtgatgaatcttctatccaatgccttcaaatttaccccggacgggggacgtgtggatgtggcattggaaatgtcgaaagagatgtccggaagattgctgataaaggtatcggataccggtgttggcattagggatgaagacaaggagcgaatttttgaacgtttctatcaggtggagcaggaagaaccggaacaccagtcaacgggtagcggtattggcttgagcctggtacgcgactttgtgacgctgcatgagggcacggtgcgcgttgttgacaatgtggggtccggtagtgtgttcctgattgagcttccggttaaacatgtgcatgtaagtccttccaagcctgcaccgcttgcagaagaggtggaagagcatgaggaacttttgccggatatggaagaggaaccgcttccggatgatttgccggacgatatggaggaggataatgaagatgaaaaagagaagccgttggccctgattgtggatgataatgaagatttggttgccttcatgaaagatagtctgagcttgtatttccgtatacagtcagcttctaatggccgggaagcttggcagaaaataccggaactgatgccggatgttattgtcagcgacgtaatgatgcccgagatggatggaaatgaactgtgtcgctgggtgaagaccgataaacgcacgagtgacattccgatgatattgctcactgcacggcaggctgtggaagataaagtggaggggttgaccatcggtgcagatgattatgtgacgaaacctttcaatgtggaaatcctgattctgcgtatgcgcaagctgattgacctgagcaagaagcgcaaggcaaagtcgctcatcgaccccgaaccgagcgagatagccattacttcgctggacgaaaagttggtggaaaatgccatcaaatatgtggaggcgaacatcggtcggtgtgacttgtccgtagaagagttgagccggggattgggtatgagccgggtacatctttacaagaaactcttgcagataaccggtaagacacccattgaatttatccgtgtcatccgtctgaaaagagcggcgcagatgctgcgcgagagtcagcagaatgtatcggagatagcgtatcagttgggctttaacaaccccaagtatttcagcaaatatttcaaggatgaattcggtgttttgccctctgtttatcaggaaagagagggtagataacaaaagataccccttacggaaacatattgtcttttagggtaatcaaaagcgcccttttgtttcaacatcggggagacccgtttttgaaggaaactttctatttttacatcggagaaaattcactttaaaaacagtaatatgaaattgaaaaacacttcagtttatttgcttgccggatggatgctcgccgcatgttccggaggcggattccaaaagaccgagaacggtgttgttgtggaagtcaagcagcagcaaccgacggatgtgcgtaaagtaagattggaagtaatgggtgagaagctcattcatgtatcggctactcctgagaaggaattttcaaaggagcagagtctcattgtgatccctcaacagaataagaccgactttaaggtcgaagagcagggcgatgaagtgactgtcaagacatcggaattatgtgccattgtgtccaagacaacgggtgaggtacgcttcacggatgccgacggcaagcagattctggctgaagactctgacgggcggacctttactccggtggaagtggaaggtacgaaaggatatacagtacgtcaagtattccagtcggcaggcaatgatgaggctttctatggcttgggccagcaccaggcggatgagttcaactataaaggtaagaatgaggaactgttccagtacaatacaaaggtgtctgtaccctttatcgtgtctaataagaactacggtgtgctttgggacagctattcgctctgccgtttcggtgacccgcgcgattactcacagctgggtgatgtcttcaaactttatgataaagagggcaaggaaggtgctttgaccggtacatatattccgggcaagaaagacgtggaaacccttgtacgtcgtgaggattctctttattttgaacatctggaccgtgccgcacatctgagtaaggtgattaatttgcctgcggagttcccgttcggagggtccgacgtagtttatgagggagaaatagaaccggcagaaagcggcttgttccgcttcatcctttactatgcaggctacatgaaagtatatattgataatgagttggtggttcccgaacgttggcgtacggcttggaatcctaacagttataagtttgctgtcaatctggaagcgggcaagcgcgttccgttgaagatagagtggaagcctgatgccggtgtttcttactgcggtctgcgggtattgagtccggtggctgatgaagaacagaacaaactctcctggtggggtgaaatgcagaatgaaatagactactatttcgtttatggtgatgatatggacgatgtgattagcggctaccgtacattgacaggtaaatcccagattatgccgaaatgggcgatgggttactggcagagccgtgagaagtacaatacgcgtgaggaggttctctccaccttgaaggaattccgtgaacgtcagattcctatcgacaatatcgtaatcgactggctgcactggaagcaggattcttggggaagccatgagttcgaccccgaacgtttccccgacccgaaaggaatggtcgactccatccacgccatgaacggacgtctgatgatttccgtatggcccaagttctatgctacgaccgaacacttcaaggaatttgacgaaaaaggctggatgtatcagcaggctatcaaagacagcatcaaagactgggtaggccccggctatctgggctctttctatgacgcatacgatgccgatgcacgcaagctcttctggaagcagatgcaagaccactactatcctctgggtgttgacgcttggtggatggatgccagcgaaccgaacatacgcgactgtacggatttgcaataccgcaaggacctttgcggcccgacggcacttggcccctctgccaagttcttcaatgcatacgcactgatgaatgctgaagctatctatgacggacagcgcggcgtggaaccggacaagcgtgtcttcttgttgacacgttccggctttgcaggattgcaacgctattctactgccacctggagtggtgacatcgctacccgttgggaagatatgaaagcgcaaatctctgccggcttgaactttgctgtcagcggtatcccttattggaccatggacatcggcggattctgtgtagagaaccgttatgtggctggtcagatggaattcaacaagactggacgtgaaaatgctgattataaggaatggagagagttgaatacccgttggtatcagttcggcgctttctgcccgttgttccgtgcacacggccagtatccgtaccgtgaggtttggaatatcgctccggcaggacatccgtgctacaactccatcgtttattatacgaagctgcgttacaacatgatgccgtatatctattctttggcaggtatgacttatttcaatgattataccatcatgcgtccgctcgtaatggacttcacagctgatgcaaacgtcaacaatataggtgaccagttcatgttcggttctgccttgatggtggctccggtttacgaatatggcgcacgcagccgcgaggtttatttcccggcaagctgtggttggtatgacttctactccggcaagtatgtggatggcggccagaagttgacagtagatgctccttatgaacgtattccgctctacgtatgcgaaggtgccattgtaccttatggtccggacatgcaatacagtgatgaaaaaccggcttcggaaatcaccctctatgtttatacgggtaaggacggcgcatttacgctctatgaggatgaaggtgtgaactataattatgagaagggacaatatgccactataccgtttgcctataacgatgctgagggtacactggttatcggcgaccgtacgggtgacttccctggtatgctgaaggaacgtactttcaatgtagtgaaggtaagcaaagaccggccgcaaccgttcgacttaaaggctaaaggtacaacggtgaagtatgacggaaaagcacaaaccgtaaaattataatcagaatgatagacgacggtgccagggagagaaatcttcccggtaccgatctcgtcgttcctcggtgccgaacgatgccttccccggtgccaggaacttccctacttctgaatagctgtgagagaggaataggcactcgataatcttttagatatttattactatgaataaaatcatattgtctttggccatcgggctgtccctgctggccggttgcaatgctcctaaagaggtagctggcgatgaccgtagcttggattttactgccgactgggcctttcgcttgggagacgatacggcggcagcccgtccggattataatgacgcagactggcggaaactgaacttgccccacgattgggccattgaaggagaattcagtaaagacaatccttcgggaacgggtggaggtgcactgcctggtggtataggctggtatcgcaagacttttactgccgataaggccgatgagggcaaacgctatcgcatagatttcgatggtgcctatatgaactccaccgtttatatcaatggccatgaattggggacacgtccctacgggtacatctcgttcagttatgacctgactccctatatcaagtggggagaggagaatgtgttggcggttcgtgtggacaatgccgaacagcccaattcgcgctggtattccggttgcggcatctaccgtaatgtatggctgacaaagctgaatccagctcatatagcgcaatggggtacctatgttacggcagaagatgtgtcgaagaacagtgcccagttgaagatacgcaccaaactacagtacgatgcagaagcacagatggccgatgtcgtcctgcaatcccggttagtggatgctgacggcaatgcggtgggtgaggctgtgtcggaagcgcagttgatgcctcttactccggcagaagtggagcaggagatacacttgaagaatccccgtctttggagtattgatacgccctatatgtatagggtagaaagcatcctcaaggataagcagaccggcgaggtactcgaccgttactatactcctaccggcatccgtactttccgcttcgatgcacaaaaaggatttatcctgaatggtgaacaagtgaagataaatggtgtctgcatgcatcatgacttgggttgcctgggagctgcagtgaatacgcgcgccatcgagcgccagttggagattctgaaagaaatgggttgcaacggcatccgctgctcccataatcctcccgcaccggagttgctcgacctttgcgaccgtatgggcttcatcgtgatggacgagacctttgatatgtggcgcaagaaaaagacccgccacgattattcacgctatttcaacgaatggcacgaacgcgatttgactgaccttatcgtgcgtgaccgcaatcatccttccatcttcatgtggagcatcggcaacgaagtgctggagcagtggacggatgccaaagccgacaccttgagtctggaagaggccaatctggtcttgaacttcggtcacagtgcggatatgctggcaaaggacggagaaatgtccgtcaactcactgctgacaaagaaactggcggatatggtgagaaagctcgatgccacgcgccccgtgacggcaggctgcaacgagccgaacccgaacaatcatttgttccgttccggtgcgcttgatattatcggcttcaattaccatgacgactggtttgcaggtgttctcgtgaacttccccggtaagccgttcatcgtaacggaaagtgtttccggcctgatgacacgcggttactaccggatgccgagtgattcgatgttcatctggcccgaacgttgggacaagcctttctatgatgcctcgttctcttgctcctcctacgacaactgtcatgttccttggggcaaccgtcacgaaggtactatgcgccatgtaaagaacaacgactttatcagtggacaatacgtctggacgggcttcgattatatcggtgagcctactccttacggttggccggcacgtagctcttactttggcattatcgacttggctggcttcccgaaggacatctactatatgtatcagtccgagtggcgtccggacaaggcggtgttgcatcttttcccgcattggaattggacggagggacaagacatcgatttgtgggcatattataacaatgccgacgaagtggagcttttcgtgaatggaaagtcgcagggtgtgcgcagcaagggaaaagacgatttccacgtcatgtggcgcgtgaagtatgagccgggtacggtaaaggctgtttcccgcaaggaaggaaagactgtggccgagcaggaaatccggacagcgggcgaacctgcgcagattcgtctcagccccgaccgcagtaccattcaggcagatggcaaagacttgagtttcattacggttgagattctggacaaagatggaaatttgtgtccgaatgccgaaaacgatgtgacctttgccgtagaaggtgccggcttcattgctggagtggataacggaagccccatctctatggagaagttcaaggacaaccaccgcaaggctttctacggaaagtgcctggtggtactgcagaacaacggtgaaccgggtggtgtcaaggtgacggctacggctgatggactggagaaggcgacgacggcgattaaagttaaatgataatttgatgtgctaattggcacattagcatattaaccaattaagacatgaagaataaatttttagcaaccttatttcttgcatgctccatcagtaccgtgtctgcacagacaccggtctatatggacgatgcacaacctattgaagcacgtgtaaaggatgctctcagccggatgacactggaagagaaggtagccctttgccatgcgcagagtaaattcagcagtgcaggtgttccgcggctcggcattcccgagctttggatgagcgacggccctcacggtgtccgtgccgaaatcaactggaatgactggggatatgccaactggaccaatgacagcattaccgctttcccggctttgacttgtctggccgctacctggaatccggacatgtctgcaaagtatggcaaggccatcggtgaggaagcgcgctatcgtgaaaaggatgtgttgctgggccccggcgtcaacatctaccgtactccgatgaacggtcgtaattttgaatatatgggcgaggacccttatctggccagtgtgatgtgcgtaccttacatccaggagttgcagaagaacggagtggcagcttgtgtcaaacactatgcgctgaacaaccaggaactgtggcgcggacatattgatgtgaatcttagcgaccgtgctctgtatgaaatctatctgccggcattcaaggctgcagtagaagagggaggtgcctggagcattatgggcgcttacaataagattcgcggccagcacgcttgccataacgatttcacactgaacaagattctgaaagatgactggaagttcgacggctgtgtcattaccgactggggcggtgcccacgacacctatgaagctgccgtcaacggtctggatattgaaatgggttcttacaccaacggtctgacgtccgagagtgtatttacctataacgattattaccttgccaacccttacctccagatgttgaaagatggcaaagtgccgatgtctacaatagacgacaaggcttcccgcattcttcgcttgatattccgtacggcgatgaaccgtcagaaaccctatggttcggtagctacggaagagcattatgccgctgcccgcgagataggcaatgagggaattgtgctgttgaagaatgctccggtgataaagaaaggtgccccgttgctgccgattgatgcagccaagtatcagaatatcctggtggtgggcgataatgccgtacgcttgctgaatcagggaggaggctcttccgaactgaaagtgaaggatatggtatctccgctggatggcttgcgtgccgtttatggtgataaggtagcctatgcgaaaggctatgccgccggtcgtccgatgtacggccgtgcagatgaaattccgcagaatgtggtagactcactccgtgcagaagccgtggaaatggcgaaaaaggcagacttggtggtactggtaggcggattgaacaagaaccacttccaggattgtgaaggcggcgatcgtctggaatacggcttgcctttcgggcaggatgaactgattgaagctttgctgggggtaaacaagaacctggttctggtgcttctcagtggtaatgcggtggaaatgccgtgggtatcccgggttcctgccattgtgcaaggctggtatttaggctccatgggtggcaagtctctggctgacatcctgagtggtgcggtgaatccaagcggaaagttgcccttttctttccctgccaagttgacggattgcggtgcacatgcttttgatgaactcagttatccgggcgacagcattaagcaggagtataaggaagatattctggtgggctatcgttggcacgacaccaaggagattccggctctcttccccttcggtcatggcttgagctatacgacctttacatatggcaaaccggtggcttctgccaaggccatggctgccgacggtacgctgacggtgacagttgccgtgaagaatacgggtagcattgccggaaaagagattgtacagctttatgtaggcgatgataaatgcagtgtgcttcgtcctgtaaaggaactgaaacattttgcaaaagtcggtttggcgccgggcgaggagaagagcgtgactttcacccttactccggatgatttgaagttctacgatgaggcttccgcagcttggaagtacgaaccgggtaagttcaaggcatacgtttgcgcttcgtctgccgacgtccgtggtgtagtttcgttcgaaatgcaataatcttataatcagtgcgtaaccactgcaaaatcagtacaactgttttgcagtggtactgcataccttttgcagcgctactgcaattgctttgcagcgtcactgcaaaaggtatgcagcaatgctgcaaagtgtatgcagtaagtttgcagcctgaaatcagaatcaaaaaacaatatgaagacacttgccactctatttctgcttgcagcctcgttgctgcttcgtgcagccgatgcgcctgccgacagttgtaatcatcagttgtattatacgtcacctgccgctatctgggaggagactcttcctttgggcaacggacgcttgggcatgatgcccgacggaggcattctctgtgagcacattgtgctgaatgaaatatcattatggagcggaatggaggcggattatagcaatccggatgcttcgaagagtctgcctgccatccggcaactgttgtttgagggaaagaaccgagaggcacaggagctgatgtacagcagttttgttccgaagaagcaggagactgacgggagatatggaacctatcaggtattgggcgatttggatatagattttacctacaattcttcattatccattctcaactctccattaaacaactatcgccgttggctcaacttgcgcgatgcggtggcatatacggctttcaggctggaagatgtcgattatcgccgtgagtattttgtttcccgtgaccgtgatgtcatgctgattcatctggttgccggacgtgaaggagctctgaatttctctgcccgtttgagccgtgcggaacatagctcggtgactgtccaagggaacacccttttgatggacggcatgttggaaagcggtaagcccggtttggacggtatgaaataccgtgtggccatgcaactcgtgcagaacggtggtgaatcgtctgtcagcccggaaaacggtatccgcttgaagaacgggcaggaagcctggctgatactttctgccgctacctcctatgccgctgccggtaccgacttcccgggcgaacgctatgcggaagtctgcgacagcttgctccgtcctttcaccgcccccgctaattctccatgttccattctccattcttcattctccagccatgtcactgcccaccgtttcctctacgaccgtgtttccttgacgcttcctgccacgccggatgatacgctcccgacgaacgagcgcatcctccgcttcacacagcaggagtcgccggcattggctgctctgtactataactacggacgctatctgctcatcagcagtacccgtcccggcagcttgccgcccaatctgcaaggactctgggcaaatggagtatcgactccctggaacggggactatcatacgaacatcaatatccagatgaaccactggcccttggagcaagccggcctctccgaactctatcagccgctgacgacgctgatggagcgccttatcccttcgggagaggcaagtgcgcgtaccttctatggcgatgaggcagatggctgggtgctccacatgatgaccaacgtatggaattataccgctcccggcgaacacccctcctggggagctaccaataccggtggcgcttggttgtgtgcccatttgtgggaacactatctgtatacgcaggacaaggattatctgcgccgtatctatcccgtcttgaaaggtgccgcccggttctttagttccactaccgtgcaggagccttcgcatggctggctggtaactgcccccacttcttctccggaaaacagcttctatgtgctgggtgacagcgtgactcccgtcagcatttgtatgggtcccactatggatgtgcaactgctcaccgagctttatattaatgtcatcgccgccgctcgcctgctggattgtgatgcggattatgtggcgaagcttgaggcggacctgaagagattcccacccatgcaaatcagtaaggaaggatatttgcaggaatggctggaggattataaggaagtggatgtgcaccaccgccatgtctcccatctctacggcctgcatccgggaaacctgatttcgccggagtccacccccgagcttgccgaagcctgccggatgaccttgaaccgtcgtggagatgagggtactggttggagccgtgcttggaagataaacttctgggctcgtttgggtgacggaaaccgtgcttggaaactcttcaagagtttgctgcatcctgctgtcgatgctgcgacgggaggtcatggtagcggcactttccctaatttgttctgttcgcatcctcctttccagattgatggcaactacggtggtgcggcgggagtcggcgaaatgctgctgcaaagtcatgaaggctttatccatctgcttcctgccctgccggatagctggactaccggcaacttccgtggaatgcgcgtacgcggcggtgcttccatagacctggattggaaggatggacgggcaacgagggctgttgttaccgctcttgttccggggaaatttacagtaaagatgcccgcaagtactgtccgtgccgaagtgacggtaggaggacatacatatacttacaagaaaccggcattctcgttggacttgaacaagggagaagaagcgacggtgtgtttcttctgatgattcggacagaagaacagaagatgttttagacagaagaacaaaagaacagaagaacaaaagtcataaagtaaaatatgtccttttgttcttctgtctaaaaatagttccccgacaaaattatcaagtaatttgcctttcgcgcccgaatgctgtacatttgcagcgcatgtagaacaaatatcttagataattatgaaaaatagagtacgttttttcttcttgtttctcggcttgctgggagcgttggcagttcatgcacaaatcaatgagttgccacgttccacacccgaggcagaaggagtcccctccaaggctgtcactgccttgtttgattcactgatggcattgccgaaaacagacatccacagcgtggtggtgctgcgtcacggcaaggtcatcggagaaatctatccggctccgttcgcgccggaatatcgccataccatgtattcctgctccaaaacctttgtcggggctgccgtaggacttgccattgcagacaaccgcttgcgtttgacagaccgcgtcgccgctttcttcccggaatttcttcctgattcggtttccgctaatctggcagacatgactgtccgtgacctgcttaccatgacgtcgggtatcactcccgactggaatatgcgcaacctcacttccgactggatacgtaccttccttgccaaaccggtgaaaactccgggcaagaagtttgaatatgattcgattagtacctatatgctttctgccattgtgcagaaggtgacgggcatgaccttgctggattatctgaagcagaagcttttcatcccgatgcatatcacggacgttgcgtgggagataagccccgaaggcatcaataccggtggctggggactgcatatccagagcgagtcgttggcaaaattcggattgttgctgctgaaccggggtgtttgggaaggcaagcagttgcttccggcttcctgggtggagcagatgatgaccagacagataggagattatggctatcagatgtggctttgcgaatatccgggtgctgtacgtgctgacggggctttgggacaatacattctgattgttccggataaggatatggtagtggtcattaccgaatgtacattgatagacggtcgtcggcagcgtcgtctggtctggaaccgcttgttgccggagacaggtgaccaggcattagtgcccggtaaggactacaagcgcctgcagaagaaacagcgttcttatcaactgccgttggtgcaaggaaaggctgcttcctccctttcacagaaatacgcaggcaagcgcatcctgctcggagagaacaaatacggatggcaatccatcgaactgcaattcaagcagcaagaagtagtgatgactgtggtggagaaagacggaaagacatacagtcttccgtttggctataagcaatggtcgaaagcggcaattgatggctatcctccgtattcggttgctgcaaaggggcgttttaagggtatagaaggccctttccaggtggcaggcagttatgcgtgggcgtcacctgatgctttgcaactgaaagtacattatgtcaactggataagcgctcttgggcttacgctctgctttgaggataacaaggtactcctgactgttacggagaattattcttcgggtgaaggggtgactttcgaaggtacattagcgcattaaaataatgaatcgtattttgcttactctaaaacggccttttatctggctgtaccgtttccggcaccgttgcggctacggtgtacattctccttttgcctttaacctgattacgcatgtaatttacgaaagtacggcttattataaatatgaagagctggccaaggcacagaagcaactggagctggagaaagataaacgttggaagtacgaatcgaagaaagtaaaacgccttctgttccgtctggtaaactatacccagccggagaccattgtagatgccggtacgcttgccgcttctgccctctatctgaaagcggggaaggagggagcagattatacttcggcttccgacctttccgagctctttctggagagtggcgttcccgttgatttcctttatttgcacgattatcgtcatcccgattttgtagaggaggtcttccgcatctgttctgcccgtaccaggggaaagtctgtttttgtgattgagggtatccgttacactccgcagatgtctgccctctggaaacgtatgaagcaggacgggcgggcgggtattacgttcgacctttatgaccttggtatcatattcttcgataaaacaaagataaaacaagactatattgtcaacttttgattatctttaggcgtttcaatagtgattagcggttagtgattagtgcttagctccacttactggctgctaaacattaatccctaacccctaaacattaattccttatgaagatatacaccaaaaccggagataaaggaaccacctctcttgtaggcggaacccgtgtacctaaaacgcatatccgccttgaggcgtatggtacggtggatgaactgaattcaaatctgggtcttctcatcacgtacctgcttgacgggaaggataaagattttctgcagcaagtgcaagacagactttttgccgtaggctctcatctggccacagaccgggagaaaatggagctgaaagaagccagtatcatcagcccggagcaggtggaaatggtggagcgggagatagaccgtttggatactcttttgcctcctctttcagcctttattcttcccggcggaagtcgcggtgcggcagtctgccacgtttgccgtacggtttgccgtcgtgcagagcgtcggattcttgctctggccgaacaagtggaaatcgcttcggaattactggcttacgtgaaccgcttgtctgattatttgttcgttctttcccgtaaaatgaatcaagacgacaaaaaaggtgaaatattttggaataatagttgcaagtgaaataaattgttatacttttgccgaaaaatagaaataggacttaatattcacaattttaatactagagactatgtattggacattggaattagcatctaaactggaagatgctccttggccggcaactaaggatgaattgatagattatgccatgcgttcgggtgctccgcttgaagtgattgagaatctgcaggaaatggaagatgaaggcgagatttatgaaagcatagaagatatttggcccgattatcccagcaaagaggactttttcttcaacgaggaggaatattgatacgctttaaaagaaaaaacttaccggtatgtctggtaatattttgaaacatagggagaagtaattccaaaaccgataactatggttgaagaattgcttcttttctttttaatacccccacactacaataataatgaatgtacaagaagcaacaacacgccggttaccggatttgaaggaaaggcatctgcctgaaaactgccgcgaaaccataaacacgattttaaaggagacttacggctacgaacagtttcgtaatcttgagatttacgatgacttgtccaagggaaaagagaaactctgcatttcgcagggacagctgatagagaacgttatactggaggctgaaaaggcttggaaaggtgaaacgcaggtagacaatatcttgctgactgcccctaccggctccggaaaatccttgttgttccagcttcctgccatctatctggggaaggagtataatctgcttaccattgtggtttcccctttgaaggcgttgattgtagaccaggtggaaagtctgcaagagctggggtatatgcgtgtggcatacgcctcgtccgatttatcgccggaacagaagatggaggtttaccggcaggtgcgtgagggggagattgatttgttctatctctcgccggaattgcttctctcttacgacattaagcattttgtaggcgagcgccgcatcggtctggtggtggtcgatgaggcgcatacggtcactacgtggggcaaggagttccgcgtggactattggttcttggggcgctacctgactgctttgaaacagactctcggctataatttcccgttgtttgcattgactgctacggctgtctggaatcccaaaggaggcaatgacatgatattcgagactatccgttccttgcagatggagccttgtgtgctttatgtaggtacggtgaagcgccggaatattggctttgacatccgtcagatggagatggaggacggggagacatacgacaaggcaaagcagcgcgtggtggctgcgcgggtcgaggacttcctggacggacacaagacattgctctattatccttttgcgggtggcatcgacatgcgcctgaagacgtgggtgaagccggcagactggcgtctggtggcttcctattatggcaagaaggaaaaggaacagaaagctgccattgtgcaggagttcaaggaagggaccaagaaactgattgtggctacgaaagcctttggtatgggagtggacattagtgatatagaccgtgtataccatgtggcgccatccagtacgtttgtcgactatattcaggagatagggcgtgccgcgcgtgatacggagatacatggcattgccgctaccgactaccatgaacgggatttctattatatgaagcgtctgcatcagacggggaacattgcccaggaacagctggtgcttattctgagaaagctcatggaagtgtaccgcatgaaaggggaaaaaccggaaatcatggtgtctttgtccgatttcgagtttgtggtgaaactgccgcgtacaaagaacaagctggagtatgaagcagagttgggacagctcatcaagactgccttgctttggctggaagacgatttgatgcagcgttatggaaggcatctgcttgaaatcagccccaagaatctgttgaccgaaggatatgtccaggacaagacgggtgatgtctttgcccgtgaattccatagctatctgacaaaggtagaaggggaggacggggtttacgtcgtacgtctggaagcgctttgggaagagcgtttcccggagcttggctacaaggagttcaaacagaagctgaataatggaacgttgcgggaaggtgcccgtgccgtatctgtaggcaagcatgaggtgttgttaaaggaagatgccactgtcatccgtgagcggatggatgccttgttcaagagcctgacaatgatgctgaaaacggcattgataaagtcgaaaggacgttttgatgaagaagaactgcgggctgtctttgccgagcatggcatggacgtgcgctctgccaaacgctttatcggttccctgctggagagccgcacggaggaaggccgcagtgtgagctatatcagcagtgtgaaaaagaaagattccaatgaactctcttttacggtgaccaaaggctttgatttgcttctgtcgcgctatcaaaaactgtttagccaacgtatagtgggcagtaagggagaccgcctgttattttattgcactcctttctcggacttgaatatgctgcttaatctgctttctatgctcgactgcctttcgttcagtgtggagggtggcggtacgccttgcgtatttgtccgtttcaatgaccccgaaactctgcaggaacttgcgcttggcgatgattaccgcaatctgattctggataccaacgagcagatattccaggagcagattgacttgttctctttcttcttcggaacagataagctgacggatgaacagcgctgggactttatcgaggattattttacgggaatgggagtggacgacttgaaaaagaagtttgtgtccttgtagcaccaattcgttgaacagcctttccagagttacagttcatctttgcttttactgtaaagattgtgagtaattagtctaagtgctcctgcagaaaccgttgcaggatgcgtgcatggttgtatatcggtgctttggaagcatatagtaaggttatggtatggtggtgttttatggtgtcaatgaacctaagggcggcttccgaattttccagttccttgcgatacatggctgcaaacccctcccagtgttccgcttggtcttcgtgaaaccattttcttaattcaggtgaaggggtaatatccttttcccagacatcgtatttcagatgttccttttttatgccgcgaggccacagccggtccaccaatacacggtagccgtctgttgcatcgggttcttcatatacccgtttgattctgatttgtgtcatggctgttctcttaattttgcttccattttgatggagcgtgggaaaacgatattattttccagatggatgtgctggtgcaaggcctcttcaaatgctttaagctgttggagtacgaggcggtaactgttgcaggcatcttctggagctgtatagtcgttggtcagatgctctatgtggcgatagcgttctccttcaatgtcatgttctgccatcatgacggatatgggagcttcgatgcttccacagtggaattcgggcaggggagtattttccagcttagcctttaccatctcatagatgtagggaaacagtaccagttcctctttgttgagatgggcattgaggtcggagagggaatcatgaaagagagcctgcacattgtagagtgacggatgtttttcaccgtgtacgcgacatattttatccagcagttcttcaatctcgggaccttgtgtacggatattacggtggtggattttgagaatatagtccaccaataagtccagaggccaactcttgaaatcaatattttcggaggttgtcggagccagatgctctatttcttctatcaccttctccatatcggctccggcagttttactggcttcgggaagcagtgcggaaccatggcagcagaaatcaatgccatatttatcaaatatcccggcattgttgaagttgtcggctacgatttcgccgactgtcatacgtttataatccttcatatgttatcttgtttttgttttccacaacattgtggaaacctgctatatatacaattatatggcagataatgtttgaagggttatgattatttgagttttcttgcccggttctttcatttaaaggaattggaggagttatcacttcgctccgctccgtcaggagttgaagaagttaaagccgatacttctgtgaatacatacgcacgagtattggctttaactcctaagccgacttgtcggctgataactcctttaaatgaaagattcgtggtttccttgtctatccttctactttttggaatgccagccgttcgtctccattggccagaaggatgatgccgcaatatttgaatccgtgcttcttcagtatgtattgcaggatatgattgtcccggtgggtatctgcacgtaggttgggtatttgttcgtagcaccattgcaggcaggcattggccactcctttgctgtgttctgtacttgccagccggtgaatgacgccgtaaggaagcgtatcttccacccattttccttcatagatatgcgtatatgtggggtcgtttccacggataaaggcgaaggttccgataatttcttcggtatcgtcggtgcacacatagctgtttccttgttcgatgtctgctatgacgatttccctggaagggtagttgcctctccactgcagcatatttccgtctttccgcatgatgtgcttcgcttgttcaaagatgtccataaggattgcaatgtctgtgggttgcgtctttctgatttttatcatagctttttattttatctgtgtggtatctttctttgattcaggttgcaaaggtaatgcgttttgtgattcattgttctcgtaaatgaacaaatgctgacatatgttgtttctttaggaagaatttgcatatatttgtcccgtaatattaaacacaattgattatgaaaaagatttttagtgctttcatgatagctgtatgctgtatgcttatggctatgcctgctcaggcccaactattgaagtggggtgttaagggtggtgtgaatatgacgaaaatagattgggatggcggatataagggaaacaaggataattctaccggtttctttattggtccgatggctgagtttaccattcccattgtaggcttgggtgttgacggtgctttgctgttttcccagcgcggcaaggacgaggtgaagcaaacaggacttgaagtacccgtaaatctgaaatataccattggcttgggtagcttgttgggtatttatgtggcagccggtcctgatttcttcttcgacttcaagaagaaggattacgtagaccgcaagaaggctcaagtggcacttaatttgggtgccggtgtgaagctgctgaagcatctccaggttggcgtgacctatcagctcccgatgggcgactcatttacgtgggaggaggcgggtaaggctttcggtgccaagaataagacttggcaggtgtctgcggcgtatcttttctaaagaaacagtttgttatagaactttcttcgcagcttgcggatatatgtcccaaggttgcggacgtctatcccaagccttgggacgggcatccgcaaccttgggacaatctttttatttaatacttgccagcttttctcttcattcctgtagtcttttctttaagtacttcggaactttttaatgcacgccttccggacctcttttttatgccgttggattaacttttctacaatgacctcgataggtgcaggtgcattgtcatggagtgggttgcggattcgcggctgggttgtctgccgtctttgatggtgagtacccattccccttttgtttttatagggttgaatatgaaccccatactactacctggagtgccagaatctggacgtggcgtaaataaatcctacctatctttcagatacccaaaaaaatccccgacttccataagccggggattctttagttttaattataaggttctctcgatagagaattgcttattcttgaattattgcagtaccacaggtacgtcaacagtcttggtcttaccccattcgtcaacaacacttacacgaacgtagcaagtaactgtcttaccatcacctgggatagttacgttagctttcggagtgatagtgacatcatcatttgtaaagtcacctgccaaatccagatattgtttagcagcatcaccttccaaagcaacagagacgcttgctacataagcatcagtcaagtgagagttaccgaagtatataacattggtcttagtaataccacggatttcttctgctttcagagttgcttttgcattcgctgctgctacattgatagtcttattgtcgcctgtaacgtattcattcttaaccttcttcacataattcagtgaaccttcgaatacagaagatttgattgtcagagtgaagtcgtatgcagtggcagtcaagttcttgttagcatacggagtgtaagtagctttcagagaacgggcttcgtatgcaccaccgaagttaccagtcttagtagcttcattcttcgtagcaaccttatctactgtgatgcctcccgatgtagcatcagccaaccaagcattagcagtccattgaataccgtctgcatccttatagctttcaggaacagtttcagtaaatgcgatgttatcccaagttgtgataccgaacagacccttcaagttataagtaattttgctattagcaggagtaccataagcagtagcattagtaccggtgaagtacagatccaacggcttgaagtcataagaagctacattttcttctacaatcaaagtcagcttaacggtgttaaccggacttgaaccataagtcaattctgcttcgtaagttccaggaataactgtagcattattcactctgtaagtcagcgtatgcttgtagtaaccgttcggagtagtagaagcatctgcagtagcaacagcaaccggtgcagtgatacctacagcatcatttcccttagctttgtctgtattgctgttcttgtccttagcagcagcagtaaacttagcattaccgatgttggtgaagaagctaggagcacttgatgtagtattaccaatcaagctggttacatcgaatgtcaatacattcttagaagcgtctgcattcaataccaatgtttgagtaaaggcattttctgtagcaggattgatgaacttaacagtgatagttttagttgcgtctttaacctcaccgtcgtaagtcagatatttaacacttacaacgacagtcttatttgcaacttcacctttaatcttagtacctgtaatcgtagccttagcagcatcaacagcagctgtctggtttgttgcaaaataatattgcacatcgattacatttttcatatctacacagtcattcaagtcgagttctttgttgatttcaacttcttgtgtagttgcagttacatcaagagtggtagttgttgctgttttcacatcaaccgttacatcataactagacaacacttcattgtcataagcatcttttgtagcgatagcgtaagcacccttagcagccttaatttgtgcttcagtcacaccacttacaaaagtaatacccatatcatagatacccttattggctgtagcaactcttgtcaaaggctcttctgtcatattgggagttgcttcagacaaagtgaagatggagcttcctttagagttggccaagtagaaattatagaccgtagcatcggcaatggtcggattaacctgggcgctgattacattctttgcttctttagaaggaagcaggatgtcgcctttcttgaaagcagttccatcaaaatacttaccattgtcagcagccttaccataagtcaactcgatgtcggcaccttccgacaatacagcagctgaacttactgttacagccttgatactggagatggaagcagctctcggcaatacgatgtcttcgtactcgccatctttgttcgggatgtggatagtcagcttcacgccatcttctacatagtagataccaccggtagaaacgcccaaatccgtcttttcaccgtcttcaccatattgtacgtagatatggccgtcttctcctacagagaaagtcggagttgcagcagcgtcacctgcttcacccttcaagtcttccagtgaaataagatcagtccaagtagtgccattgtcatagcttacttggattttgtcattgttcactgcaattttcggagtcacaccgtctttacctgcttcacctttttcaccattagtgatagtgtagctggttccattacccaaagtaacaacaataccattggttgtagatgtcacgctggacacccattcaccgcttttgatttggctctctaaagcagcaatagcatctttgttagaggtaatctgtccttgtaagttctcgatgtcgtcatcatagtccttacaagacgtgaaagtacctgcagtacccaccattaaggcactgaacaggatcacacttagaaacttcttgttcataattgaaaactttaaatttataaatttaaaaaaataaaaagtgaataatctctcattttgaatccctttcgcatacttcttttgttactaagtattccgttacttcgcaggtaatgaaatcctgttaatttcgttaataatcagggaataaggagaaaatagaccggttttgtttggaaccttaattccgcaacactattacaaatataactttttaagtacctgagcaacaaaaagttgctcaggaatttgccatgtcagatttttcacctatcttagtgttgcaaatcaaaatatgtatcaaacccgacagacatggcaaaggtagcaattaaatccgagaaactcactccttttggaggaatattttcaataatggagcaatttgactccagactctcatctgtaatcgactcaaccctcggtatgagatgcaggctgtatggttatcaatacagcgaaatcatccgttcgcttatgagcgtttatttttgtggcggctcatgcatcgaggatgtcaccactcatctgatgtaccacctttcgcttcatccgacacttcgcacatgcagtgccgacacgattcttagagccataaaggaactgacccaggataacatttcctacacatccgacactggcaagacctacgacttcaacacggcagacaagctgaatacactgctcctcaattgcctattgtccacagggcagctgaaagagggcgaggggtatgacgttgacttcgaccaccagttcatagaggctgagaagtttgatgcgaagcctacatacaagaagttccttggttatcgccctggcgtggcggttattggcaacttgattgtcggcattgagaacagcgacggcaacacaaatgtccgtttccaccagaaggacacgctgaagaggttctttgaaaggtttgaacaaaacaagcttattatcaaccgtttcagagctgattgcggctcgtgttctgaagagatagtggaagagattgctaaacactgcaagaccttctatatccgtgctaaccgatgcagttcgctctacaatgacatctttgccctcagaggttggaagaaagtggaattgggcggcattgagtttgagctggcctccattctcatcgagaaatggaaagggaaggcataccgtcttgtgattcaaagacagaagcggatagacggcgaactcgacctgtgggaaggagaatacacctaccgctgcatccttacaaatgactacgagtcttccgagaaagagattgtcgaattctataacctccgtggagggaaggaacgcatcttcgatgatatgaataacggattcggctggaacaggcttccaaaatcctttatgggagaaaacacggtgtttcttctgcttatggcactcatacgcaacttctataaattcatcatggcgaggcttgacgtgaagaggttcggactcaaagcaacaagccgcatcaagacgtttgtctttaagttcatctctgtgccagccaaatgggtcaggacatcaaggaagtatgtgctgaatatctattcatgcaacaatgcttatgccaatgtgttccagaatgactttggataacaccgacaacttatagtcgtgattttgcgtattgcctcaagtcgcatggtggggtaaggggcatttatatgtctttatggtgacattcgatgcactgtgccccctttttactaacgatgcagattcttttcgcttctgtatcatattaggcgcgtagttgcggatttgaggttaatgggattgttgtttgccccaattattagtgtatttgcacgtatgttctgcattataaagggattgtacttatacatattattaataagagaatgtataatttaaattgaagatgaaagagattaccttacaagaaatgctgtcaactattattggagagcttcgagaaaatggaagatggggaacagcccatatttaccaatctacattgaatgtgttttccgcattcaataactatcgggatttgcatctgcgcaaattgaatccagtggttttgaaacgttttgaaatgcacctgcgtcaacgagattgcagttggaacaccgtttctacctatatgaaagtcattcgctcggcttacaatcgagctgtagatttacgatgtgttcgttatactcctagattatttgaacatgtgtatacaggaactaaagcagacaagaaaagagctttggaagcttcggatataggaactttagttcgcgggacagaaatggatttgtccaaaaggattccttcctcaagccttcaaaaggccaaaatgctatttgtttttatgtttatgatgcgtggtctcccatttgtcgatttagctttcttgcacaagaaagacctgcaagggaatgtattgtcctatcgtagaagaaagactggtcgcaccttacgggtacttctatcccctgaagccttacagctggtacacatggtatccaataaggacgagaactcaccttatttattcccaatattacgtagcaaggatggtacagaagcggcttataaagagtatcaatcagctttgaggcgttttaactatcagctgtcagctttaaaaacacatttgaatatgagttcacatcttagttcgtattcggcgcgccatacttgggcgaccatggcttaccactgcgagatacatccaggaatcatatcagaagccatggggcactcttccatcacagtgacggaaacttatctgaagcctttcagcaacagaaagattgacgaagccaatcaaagggtaatttcttttgtaaaaaacgaaggatatccagtataaaagagattacttcttttgaggaagtagagcaaacttgttgtttcttttttatagtcttcaaacaaagttttgaggagcggattgatattggctttacaaaaagtttcccaacgtaagcaataaactgaaagatagaatcttatattgaaaattagagactttttcacttcataatttctattgtagcttttctatgatgttggagattaagactatatattatctttccaatatcccaacggactgatttttactattctgaacaaaccccacctattttctccttattccttggttattaacgaaattaacaagatttcattacctgcgaagtaacggaatacttagtaacaaaagaagtatgcgaaagggattcaaaatgagagattattcactttttatttttttaaatttataaatttaaagttttcaattatgaacaagaagtttctaagtgtgaccctgttcagtgccttgatgttgggtactgcaggtacgttcacgtcttgtaaggattatgatgatgacatcaaggacttgcaggaacaactggacaagaaagcttcacttgatgacctgaatgcaaaagttactacgttgcagacggctgtagatgaagccaaaagtgccgcaaacgaggccaagaacaaagctcaggaagctttggacaaggctaattcgacagaaggcggagtatccgaggcagatttgactgctttgaagaaagaactggaaaagcaaattgagaagttggcttctttggaggcagttgagactaaaatcaacgacttgaaagaagaattggaaggcggctttgttacagacgaaaaactaaaagacttggctgctgaggttgatgcattgagcgctcaagttatgtctattatcggacatcgtttgactagtctggctgtaattcctacaagtcatatcaatggtattgctgctattacattgactactctacagtatactccacaagagtacaaggcaatggcaaaacatacagatggtcctcaaactgacgaagattctgaaggaacgtttaccgcacattccaaaactcttgtacttgaccacgttaataaagctggtgctaatccatacacggtatctacagacaaaaatgaggcttacttccacgttagccccaatatgggtgtacgtacagaggatatctatatgccttctttcgattgcatcaaatctgaaaacatcctcaccaaagctggcgcaacgatttcggagaactctcctatccagccaactggctataaaatagaagacaatgtattgacagtacaattcaagaagactgttgccgaatccatcaatgaagcaggcggtcatgcaagtggaaaagaaactttctacatggcttctctaaaggctcctatcgctaaggaaaacttgactgctgatgaagctaaagcccttaaggaaaatggcactcaagtttatgtaaactctgaatatgttcgtctgcacgaaacaaaagtagctccttatatcgctaatgcacgtacgaagtacggcgaaactatgaccggcaaatttgctgacgaagttcagaccgatggcgaaggcagattctacgtacactaccacgactctatttgtgcatacgaatcacaagctaacaacatgattgacgtttatgcacagtatgacaaagtccttgacctgaagaaattggttgaggtttgtacaacggaaatcggtgcagaagaccataaacaacatgcagagttgaaggcatacaaagactacggtctgacattccgtttctacaaggctactgaagaatatatcactttaggtggtccggagaataacagcaacaagactgaccagcagaaatttgcagaaatcgattctcctatgaatggtcacatgacttcaaaagtctatagccttgacggtgtatctgccactgcagtaggccgcgaaccgttggtacgtgtagagttggtggatactgtaaacaatgctttggtagctatgcgctacatcaaggtgaaatgggtgaaagaagaaggtatgcgtgaaatcggtttcacatacgatgataccatattcaaatgtggcaatttcgcagatagaattggtactgtagccatgaacgaagttatctacaacggtgcaaaagaaggcggtatgaccaaacaggaattccacgccatttacactgacgagggtttcgacgcacaagatggagtagattatggtaaggttaaacttcttaagaatacagaagacggcgttgaatcttacaacattgagtggactttgactcatgctgacatcgtgaagaaatatccggtatggaaaaatcacgaagatatggtattcaccaagacattcttctggaaagatccgacaaaagcatatcctactttgaagattacattgacacgtactatctacaaacctacattcggtggatatggatatgacaatcgttattggaagaaaaacaccaacaacactgtattcaatgtgaacccggtagtttatggtgctgtggaatggaatcctgcatggaatgaaaccactggacacgtattgactggcgataagactaacaataatccgaccgtaaatatctacactgacttagtgaacggtttcttgaacaaagacggtgtaaaacctgctactggtgcatgggaatacctgtacttccaggataagaacgttgcgaatgtgaagaatccttattctcctacatttgaattggaaggtgtacgttttgaattcgatgctgaaaagttggctggtaaaacttataagtactttgatgttgccagcaagacattcaaggatggtgctgttacattgagtactgacaacacaaaattgtacattgcaggtgaattggctgcaacaattgacaattataaggacaacctctgtactgtcgtagataatcctctgaaaggtcacaagacttataacatcaaattgcaagaagctgatccggatgcagcatccaatttcggaaaagacaccaaaccgacagaagctgccaaagctttggtaggccagattgttcctgtcaaattggttgcagacctttgctatggtgatgcaactccgggacatccggctgcccatactgaagttatcaaggcttatgatgccaacatcattgaaccgatgactatcacagtgaataaggaagaaggagaagtaactgatgctgttgttaacggtagctctgtagatgtaacaggtgcttatacttacacttgctggaatgcagacgaaaacggtaatttctacactgcttctgaggctcccaatgcaacagctctgcaaaaagaactgttcaaattctacgaatgtactccgagcaactggatgactgatcaagttaagactaacctgaaactggtagacggcaatttgcagcctgtggctggttacaaggaaggtagccttcctgccaacacaactgtagtttacaacgtagatgcaacaactggtaaggaaacactgacttactacaaccacagtggtactcctgtaaactgggattatgaaatctatgttcctatcaagttcggttataagtggaagactttcactcaggaattcaaaatccacgtaaatgaaaatgccggtactcccgcaggaagataagagacaactctgaaaagagatgccaataaagtaaacagacaagagagagtgcttcatccgattgaagcactcttttttataatataacaactaaaaatatgaaacaaacagtcattataggaatattgttgggaatactgctactaaccggatgtgacaacaacgaaaaagaacatgattttgtcggtatattcactactgccaacggcataaagtttgagcttcgtccagattctacatcaatcataactttcaaagattctatgatttacgaaagttcttggaaaataagcaaagatcgtaacaatgaaacctatgccaacatagagtttgctggttatcagaattattattatttgaaaaatggtaagctttatcgcagtatacgcgaaatgaaccatgatgccttaggtgaagaggtgaagtatatagaatgatttccgcgcctctcatcactctctagatttttttctccccactttgcttccacacttccacccacctcctgcatccccctatccatcggcacttgaactgctgtggaagcaacaaaaaaaggtggaagcaaattttgcttccacctactcaaaacgctatagttttaccgtaaccaactcgtctctaccataataccccgtgcaaggtacataaatcggttggttcagttttcctgcattctcgagcttgccttcgctacgaagcaggcgaatatgaagctgcgcagtggaacgcatcatcccgcagagaacctgaaaactctcgcgcgtaaggaactgatgcgtagagaagtagcccgtcagtcgcctgtcaatctccttgtcactcagcttttgggaatgctcattcagccccagcggtttaactttgatggcacctatctcattcttcagcacctggtcggcacgaaacttgatgcccttcagcttaatcttggtggtttttcgtttggtcgcagcggtcaccggctccgtgctcgtcagtacgggatgaaaatagccgataccgtccagatgcacctgccgcccctcggcaaggtcttcccccatgacgtgcgacaaggcatccagtaccgccgagacatcagtctccgtcaacgagctgcgttcctgaattctgcgacgcagttcgtcggtagtggtagagccgttcaagcggatgcgtggatgaagtatcttttcttcccgctgtttgtcttttggttccggaagctcataccaatcaaataaaattgccatagttcaatgtcttttaagttgttatataataagtttgcgccctatgcggaataggtgcggggggcgtacttcatccgtaaaagctatggaaagagagacgcctaacggccatgaacaactctgcttacggtcgtcaagcgattgcttcatggccgtaagcagagttgttcatggtcgttaggcgtcatctattccctatacaaaagtagacaaacaaagggagaaaagcaaaggaatgcctatgttttaaaaaagaaatccaaaggtttccgacaccacgctgtatagtttgtggaagcaggcatttatttaataattattctgctgaatacttgttttccgcctcctgatgtcgtatctttacgagaattatatttacccaaacaagctgacaaacagaatgaaaattaccttgattagagcagaaaaagagagcggaaaggaagccctcagcaccctggaaacggatgcactgattaaaaaactaaaaaccgaaaccaaagccggacatgtatcgaccctccgggtcatccttcctcaactggagggcacttgcgcccaatacgaacatatagacaagctgccccgcatctatcccgccgtggaatatagccgtacacaagagggggaacgacggatgaagaactataacggactcgtacaactggaaataaaccgtctgtcgggcattgccgaagcggaatatgtaaagcaacaagctgccctgctgccacagacctttgccgctttctgcggttccagcggacggagtgccaagatatgggtattgtttgccctgcccgacggcacgacaccgaagctggagagcgatgccgccttgtttcatgcccacgcctaccgtatgacggtgaagtgctaccagcccttgctgccgtttgccattacattgaaagaaccttcccttacccagagttgccgcatgactctggatggatatccttactacaatcctgccgctgtgcctttctgcttggaacaacccctcggcatgcccgaggaagagaacttccggcaacgaaaactcgcagaaaagaacccgctgttgcggctgcatccggacagtaaagcctcggacacctttgccgtactcttcgagtcggcccttgaccgtgcattccgcggattgggcggctggaaacgggacggggatttacggatactgctggtgcctctggccgaacattgtttcaaggcaggcattcccgaagaggaagtagtccgccagacattgatgcactattaccgggaaacggatgaattcattgtccgtcaaacgattcataacctatatcaagagcttaaaggcttcgggaaaaagagcagtctgacgcaagagcaggagagcgttttccggctggaagagtttatgggccgccggtatgagtttcgctacaacaccgttctggatgatttggaataccgtcagcgcgactccgtccatttctatttcaagcctgctgaccagcgtgcccgcagtacggtctccatgaatgccctgaaggagggtatccgcgtatgggaccgcgatatcaaccgtttcctaacttcagactacgtaccactctataatcccgtcgaagaatacctttacgacaccggccgctgggacgggaaagaccgcatccgggcgttggccgacctcgttccgtgccacaatcctcattggcaggagctgttctaccgctggttcctgggcatggtggcacactggcgtggaatggaccggcaacacggaaacaatacttctcctctgcttgtcggttctcaagggttccggaaatccaccttttgccgcattttgctgccaccggagctgcgtttcggctatacggacagcatcgacttcaagagcaggcaggaagcggagcgcagcctgggacgctttctgctcgtcaacatcgacgagttcgaccaaatcagcatcaaccagcagggtttcttgaagcatctgctgcagaaaccggttgccaacctgcgcaaaccctacggcagcaccatccgtgagatgcggcggtatgcctccttcatcggtaccagcaatcagaaggacttgctgtccgatcccagtggcagccgccgtttcatctgcattgaggtcaccggtcccatcgatacgaatgtcaccatcaactaccgccagctctatgcgcaggctctgaatgccgtagccaaaggtgagcgttactggctggatgatgccgatgaagccatcttgaagcggacgaaccgggaatttgaacagctcaccccactggaacaactcttccacagccatttccgcgcggcagaagaggatgaagaggggcaatggatgatgcccatgcagattctttccgctttacagacaaagacgcgtgaccgtctggcaatcaacaaggttgccgtattcgggcggacgctcaagaagcttgaaataccgaacaagaagtcaaggcaggggacactgtatcatgtaatgccgctggattaaatgctctgcagtaaccccgcacaagcatcttccagaatgtccagcacatactcaaaaccttcggaaccgccgtagtaggggtccggtacatggtcggcatgggtaaactttgtacagtattccgtcatgcggtgtatcttgctccattcggcggttgaaggggcacgatctttcaggtcgtcgatgttgcggtcgtccataccgataatcaggtcgaagttgtaaaaatcctcggtacgtacgggtcgcgaaagatgcgtcagattgtatccacggcgggcagcatgggcacgcatccggctgtccggcagttcgccctggtgataggacagaatgcctgcagaatcgattaaaaactcatccgcacgtccggcttcttctatcagatgtttcatgactccctctgccgaggaggaacggcaaatgttgccgaggcaaacgaaaagtatcttcttcatatttctttagttacgagttatttacatcgggtctacatcataatacactatcaacgacttgaagcggtcttccgccaccatctccttttgcacctggacgagcagctcgcgggcacgtgccatcggggcattggtttctatcttcaagataatctttcggatgaacagggtctgtacgcgtgctacgggcggcttgtccggtcccagcacacggttgccaaagacggtgcggagcttggcggccatagtctgtgccatgaggtcgagcagggtctcgttccggttcttcaggtagacatacaccaggcggtagtagggcgggtagtggaacatctggcgttcggcaagctgcccgcctaccatggcttcgtagtcgttggcaatgacttgcgggatgatgggatggtcgatgcttttggtttgtagcaccaccctgccgcgcttgttcttccgtccggcgcgtccggcaacctgcgccatcagctggaaggcgcgctcgtaggcgcggaagtcgggatagttcagcatggtgtcggcattgagtatgcccacaatgctgacgtggtcgaagtccagacccttggacaccatttgcgtgcctatcaggatgtccgtcttgccttgctggaaatcggagatgatgcgctcgtaggcggtacgggtgcgggtggtgtccaagtccatacgggctacgcgggcgtcggggaagagggctttgatgtcatcttctattttttccgtgccgaagccgcggttgcgcaggtcagtgccctcgcaggcggggcagatgcggggcagttggtaggtgtagccacagtagtggcaggtcagttggttcagccccttatggtaggtgaggctgacgtcgcagttcttgcacttgggtacccagccgcaggtgttgcactctatcatgggggcgaagccgcggcggttctggaagaggatgacttgttctttttgttccagtgcctcgcggatatattgtaggagcagtggggagaacggaccgttcatcttcttcttgcggtgcagctccttgatgtctacggggataatctccggcagttgtatctctttatagcgttctttcagttccacaaggccatacttgccggatgtggcattgtgccaagtctctacagaaggggttgctgtacccaacagagttttggcgccgtacatggaggcgagtacaatggctgcattgcgggcatgatagcggggggcggggtcttgctgcttgtaagtgttttcgtgctcctcgtccacaatcacaagaccgaggttgcggaaaggaaggaaaacggaggagcggacgccgagaataatgtcatagtctgcttccgacagctgcttctgccagatttccacccgttcggcatcggggaacttggagtgatagatgcccagtcgggagccgaatacgcgttgcaggcgctctgtgatttgtgcagtgagggctatttcgggcaggagatagagcacttgctttccttgccggatggtttcctctatcaagtgaatgtagacttctgtcttgccgcttgccgtgatgccatgcagcaggcagacattcttgctttggaaattctctaagatggagtgataagcgcgttgctggtgctcgttcagcgggttgacggggatgacttctttgaggagtgctttgtctatgcgacctatttcctgctggtagacttcgaatacaccacggtccacaagaccgttgaatacggcaggggtggcataggtgcgttgcagcagttcggctttggagacttcttttatatctcgtccgctgaggtagccggagagttccagatatttcatcagcaggtccagttgcttgggggcacggcgctgcaactcgtcgaagaagatgtgcaggcggtgttcgttgcgggcggcggcggtgaggcgtacacgggtttcggtcttaggcttgtaggtgcggcgcaattcttcctttacgaagatggcctctttgtcgagcagtgacttgatgacagaaagtatgttcttgatgccggtctccttctccagtttcgtcacgcattgctccgggtcggcagagagcatatccagtatcttctgttccttctccggcaggcagacatcggattcgaaatcggggttgtactctacgattgtttcgctttccagcttcaagccagagggtaaggcagctttgtagacgtctccttgcgtgcagagatagtaatcggagagccattcccagaacttgaactgccgcggaagcagtatcgggcgggcatccagcaaagcggacacttcctttacttcgtattcggtgggggcacaatagtgcacgttgcgcacgatggctgtatagtatttcttccgtccgaatggtactaccacccggcaaccaatctgcacttcatccgcccactcgtcgggcagggaataggtgaagcagctgtgcaaaggcaaaggcaatatgacgtcggcaaactttttcatcgtggggacaaagatagtggaaagtggagggagaatgaaatgaacggggtcattttttatgatgagagggggaggagtctgttgtggatttgggatgaagataaggggggatatgggtattgcagattttatgggtaggatgggtgtagaggtatggggaaactggtgtaagcgttttataagctttgttcgatgtattaaaataagagtgagttagttatggtaaaactatggcattttgagtaggtggaagcagattttgcttccacctttttttgttgcttccacagcggggtaaatgccgatggacagggggatgcaggaggtgggcggaagtgtggaagcaaagtgaggagaaaaagtttctggagaaaaaaaggaggatgttcggtagtgtaaaataaactgtgtcacgcattatttatctctagaaaactcatcggtcggggaacggcccgcgccaaggggcgggaccacccgtcccgacgagcgtaaaattacaataatttaaaccggtttccaaactttatagccagttgttgcgagatggtagcccaattggccagtggcatggtccatttcttacgtatattgcggtatgcaagataaacaagtttctcaagggctgtatccgatgggaacacgcccttgttttttgttaccttgcggatctgacggtgatacccctcaacggtatttgtggtatagataagcttacggatgaccggagtatactggaagtattcggacagcttatcccagttgtcctgccaggatctgataacgacaggatactgttcaccccatttttcatccagcttgaggagctcattttctgcggattccttattgactgcctgatagacacatttcaaatcccttaagaactccttctgattcttggatcctacatacttgatggagttacgtatctgatgtactacacaaagctgtacggctgtattaggataaacgctttgaatggcttcaggaaaccccttcagaccgtctatacaggcaatgagaatatcctcaactccacggttctgaaggtctgtcaacacgctgagtcagaagtttgctccctcattccttgatatatacattccaagtaactccttgtgtccctccctgtcaatgctcagtacattatagattgcacgggttaccgcgcagccacgttcatccgttactttgtaatgaatggcatccatccagactataggataaacagaatcaagcatccgtgatttccatgcttttatctccggaagtacacggtctgtgatggaactgattgtgtcggccgaaacacgattcccaagattttcttccatccagtcactgatttcccttgtgctgtttcccattgcatacaagccaattatacggtcagcaacaccttctgccagaatagtctcacgcttcttgataaactggggatcaaaactcgaattacggtcacggggagtggaaacggttacttcgcccaagggagtctgaacctgcttttgcatctttccgttacgacggttacccatctggcgttcttcttctgtcaaatgtgcatccatctctccttccagggctgcattcaatatactttccaatagtggggcaaaggcgccgtccttacccaacaaaggcttgccggctttcagctgttcaatggccttgttcttgatactctcgaaatcaaattcttctttcataaaaaaaactgtgttagcaaagttaatactttattccttgctgacacagtttaatttacatcctcggatgttcccatagaacatcctccttttgattttataattgtctattcagacaattttctactactcagattatctagtagcttgtttacgtgtgatagttacgttgtatgcatactcactagtaccccagtcgtgaacgaactgcagaaccacatttactgtatgagtaaactcagtacctgtcgggagtgcgatacaagtcagcttaccagttgtaggttctaccttgaagtattcatctttgtctgttccgttggacataatgtagcggagaccggttgtaacagacttcttgtacaaagcagcacgagcagtgacttcttcagcattgaatgtagttccattgaatataacaactttctcacctgcatagtctttcaatacaagattcttccagaagtctttagccttagcttcagtaccagcggtattgacaagtaattgtttcaatgtgatttcagtattctcagccaagttcggatcgttgaatgctttcagtgcagcaccaccggtgaaatctgctatcggacgagctacagtccataattcttctgcatcaggtttacggttcttgtcagtagcatcgtaaccacttgcatcataaatatcaactttcagattgccaaccttcttgatatcaatcggagcagtgaatgctattctccattctccatttgcaccttcttcaactaccaatttgttctccttcatcaattcttgtacaaatgcattctgcttgtctttattcaattcgaatacagccttagcgtcagcaggagttacatcatacatatgagcgaagttttcagacttaatgccgaagttgccgctagcagcatcactccaatcaccaatgattgtacgtgccttgtatgcatccttgatagcaacagcaaagttacgagttacagcaaggtcattgatagtagtgatgaaatattgactatcatacttgttataagcagcatatggagtagaaatgccattataagaaacccaaccattcttagcaagtgcttcagaccagtaattagtggatttcaaatagagggtagtcttatcaatttctgtctgaggaccaataaacaagaacaatgagtctgttgcattaccttctgccttcttgtaccatacaaatgcctcatctctagctacaggaacatctacagaccatgtagcttgctgtggagcattagttaggtaatcgtatgcttcactatatccagtcaattccttctctgtattgtaatctgctttatacaaaggccaaacaatagaggtgcccttgtcggttaagatatcacgaccaccgatagcgtcttcaaatgcgcgtacatccagcttcacaatttgcttagctgtcttgtagctcaagttgaaggttgcatcacccagcggagacaatttgacagttgctacattttctgcagcggtaggacgtatagcttgtaccaaaacatagttataaacaaccaaatcatgtacaccttctacttgtgatttaactgtagtagtgaccttgattacagcatattcatcaatagcagatgcttgtttttcttccttaacagccaagatgccttctttagctactttatctgcatcaaagattcctttcttaatggttacaccccacaaatccttgtctgcattttcatcaatcaattcgaatttctgttcaaattgaatatcggcatcagccaacagtacgccgtcattcaaatccaaagcagcactgatagaatcgttcagattgaatgttcctttataatcaaattcgccaaccttataagaagctgcatcattctgagacatgaatttttcgggataccaactacttgcagtctgcatcttattagaatattggatttcctcctctgcatttacacgtacgttatgtacctttttagaagatacatacattgacttaacattaaaataatctgatgcagaaacatattgcttgtacatcttaacatccagagaggtagcatagctattgattgtctcaccaagatccacccatacggctccccagccagatatttctgtttgcgtagtcgggtcaatccatgtcatacttccccatccagaagtagatacagtcttagcatctttaaagtttaccggagtcatctttacccaaataacaccatcttgttctttatcgaagtcccaatccaagacattcaatttcggctgttctgcagctcttgtctgataagtatcagagaagaagagctcggcatcgctctttgagaattttgaaggatagactttgaaagaagcctttgcaggaactgcagcaaacaaagtatcaacgtcagtatcgttttgaggatagtacaactgataagctacagcatagtcatttgcgtcatcagcagcttgctttctatacacaatagtttgcagaccattgaaagcagagccttccatcaacaaagtatatgattggccgtcaatagtaacctgcatagttccatccttttcattgtagatcattgaaggaacgttagcattgtatttgaatgaagttctatattcgccaatgcagatataaccctcttcgtctaccttcacgtagtttccgatagcttcttcaacattagcttctgaacctgcagccttgattttctcacctgcgtcattcaatacatactcataggttgcaccttcatctacgctaatcatccagtagttctcggcatctaccttgaacttcggaacgattgtagccccggtttcacccttcgggccttgaataccctgaagtccttgctcacctttttcgccttgagcaccattcttgatagttaaagtttcgccaccggtaaaagtcagtaaataaccaccctcaacaggagcataactttcgatgaatttcttgccattgattgcagcaaggatgtcatcaatctgttttttgtttgcatcgatctgctcctgcaagccatcgatgtcatcatcatagtccttacaagaaacaaatgtacttgtggagccaaccattaaagctccaaacaagattgcacttagaaactttttgttcataattgaaaactttaaatttataaatttaaaaaaataaaaagtgaataatctctcattttgaatccctttcgcatacttcttttgttactaagtattccgttacttcgcaggtaatgaaatcctgttaatttcgttaataatcagggaataaggagaaaatagaccggttttgtttggaatagtaaaaatcagtccgttgggatattggaaagaggattggaagtccagaaagatgacagtgggaaagggatgaaatgaggcttttaaaggatgaaagtgtatattttcggttcaaaggcttgaatgacagtatattgatagcaccgattagagctccgtaaagacaacaccattccgttcttcaaaactcattttgaagattccggaaaatgtgcgacaaatctattctatcctatcaaaagaagtaacgtcttttatactgtacacgctccgcttcttacaaaagaaattaccctttgattggcctcgtcaatctttctgttgctaaaaggcttcagataggtttccgtcaccgtgatggaggagtgccccatggcttccgatatgattccggggtgtatctcgcaatggtaggccattgtggcccaggtgtgtctggctgcataggtactgagtgccgactgcattcccaggcactgcctgagtactgccagccgctggttgaatcccctgagtgccgactggtattcccggtatgcggcttccgtgccttcctcgctctgcaggatgggaaacagatagggggagtcggggttcctgttcgccaccatcctgaccatctgcatggcctcgggtgtgagtgacacggtcagcgcccgtcccgtcttccgtcttctgtaagacagtacattcccctgcaggtcccttttgtgcaggtacgccaggtctacgaaaggtatccccctgagcatgaacatgagtacgaagaaaatccttgttctctgctgggcgtttgggagcgcccctccttgcaggctcctttccgtctcccttaccaggctgctgatgtctgatgcctcgagcgccttcttcctgtccgcccgtgtgccggtatacacatgctcgaacagtctgggtacataccgtatgtactttctgtccaccgcccggttatacaccgagcgtaccgtcttgatgtaggtggatacggtgttccaactgcagttcctctgcctgaggaagttttcgaatctcttcagtacggtcgggctcaacttgcgcatgggcatcggctgccatttggtgaatgccgagaatgcattcaccgctgactggtagatgtgtgccgtcccccacctgccgccttcccggagttccttgatgactgaggagaacatctcttgtaaggtaatttcatttctattcatttccaatttatttataaaaggtttatcttacaagtatatacaattatagctgcaaatacaatgatttcatattcctcattttttgcaatatcaagtgattattgctgcaagagaaaaatgtttaagtcatgatagggattggatgaagaagggaataagtaagagaaaaacgctcaggtatgtatttcgcagtacttggtatggtacgaagatttaggagaagaatatgcgttggaagtaaaaaagaatataaattatagaaatagatggcatgtgataaacaagacttcattgtattagaattccagtttttctaatatcacaataaagaggattgtccatatcttctgtaagcaggactggctctataaggttacttatcttgcgtctaagtttccacaatagaggagtatctttaaaataatcgtcatccaggcgttctactatcacagcaatatctatatcgctgtctgctctataatttcctttactgtacgaaccataaagataaagggcctttaatggacttctccgctaccatttccttatagcgtttggcaaggtttatagcttgttctttatccataattgcaactctttagtttggctcaaaagttcagcacagtattctttggttaagctcttcattaatctttctttataagaggggtaacgggcttctatattaagaggttcaagtttgtctataaaggctaactgctcctccgacaattgcttgtccaatcccgttctctccgcaagtctggatagtgaatgtatctttagaggaacttccattaagcaattagtccaatatgctttgagaattttctctattgtttgatggcacatgaaccgacatagagataacggcctgtaagcagcattgcattcgctgtttccaaatcataatctgacatctcaatccaataaggttactttactatccatatttcgagtctttagaacaaagatagttattatccttcaaacaacaatgatttgctacaacattttatccgttggaaccatattgaaggtatttactttagtcttataattatattttgcaaagcctgctgcatctctactcatttctaaattgtttatagaatgaatataagattcaagaaagaaaccattaaagcttattcctttgcaaccaaagttggaagaactgatcatatacctggtaaatgcctttatcatacgtaataaagtctttttccagtagtccttttacagctgaagagacagaactggcagattgcaacttgtatttacgtacaaagtcaccgcttgagatagccttagcttttccctctgctgctattgccataaacacaatacgttgcttttcgggcatctgatataataaggcatcataggtatcggcagaaaaatccagaaggtcgttaatggcagtatctatcattgagggaatacatatttctccagttccggtcatggaaaataaaatgttcataaccttctgcatatacgaagttataccattgaagcgctcatatagctctgttaccactaatgtatctaagtgtttgcttgctcgctcaaagtgcctaaggcagaactccgcgtatttatcaacagaaatgggaggcaggtttatcagtgtaaccgattggtagaatggacgtgccggagaagtaaacattgcccccatcagatgcctatgggacccggagaagacaaagtgggcattggaacagcgttgtatatgtgtccgtagtgccgcttctatgttgggatcgtctgcatatttggttatttgctggaattcatcaatggcgattaggcaaggcttcccggcattattcagataggagaatatctcatccaatgttgcagagggattagttatagctcccagaccgattccccaggtaggctgtccattcatgtcgaatgttatttcggaacgaagggaggccagtacattcaagaaggtaccccatacggattttccttttggacgtagttcatccagtacagccttgccgaaaacattcacaaaatcgcgtacagagcttgtggcataaatatcgatgatgaaagtgtggtaatgctccttgatttccggctgtccaaaacaatgccgcagcaagtctgttttgcctaatctgcgtggggaaatcaatgcaatgttgttctcattcgtcaaaagtgagacaattttagccgtttctttctctctgtcacagaaatattccggtgatacatagccgttcgtaacaaatggatttttcatatgattattgagtttacacgcaaatataaggaaaatatcacgataatcataagatgataatcataaaacgattattattggaaatgtgtggttgactatcatatgaaatggctattcttttcctcatccaaagaatagaggaatagtaatagccattttctgttttaatcttgatattcaatttcttcaccaagagcttgacgtatcatattatgttcattgcgatagagtttaccattacgcagataataatagttaaagtaaccggcaaactcaatagtggcatactttagtgtatctccttgattatagactttccatgtaccctcgtacgaactggaatcatcatattgaatcagggtggtggagtcggctcgaaggtcgaattggataccggtttcagtaacgaatttgcctggaaaaggatgtgtagctgctgacttcttacatgaagaaaagcagatgagtgaaactgacacagtcaaaatgaatagtattttcttcatatctgatatttataaatgaaagattgaaaaaaaggacgccctgcaagaggacgtcccttttattaaattatatcaagaatctcttcttaattatttggcactcggtgtaccggcagccttcttaacgatgactttcaggttatccttgctcaataccccccacttgtagttgacatttactgtcaagaacatattgtagtcaacgttaaccggtgtaccatggttgttgaagtatgccaagtgagtcgggtcagcatcgacaggtttagctgttgacttgtctgtagactcatcccaattcatcatcttcaatgaagcattggtcggcaatttaccgtcagtagtaccctccttgtgctcataagtgctggttgcagcattccaagccaagctggtagtggtcttatcagtcaagaacttgacctcacgtacggcatagtagtcatacaaagcatgtgcataaacttcatcaccagtggccttgtcagctacagcagcagctaccggtttattattccagtcagtgaatgtgaagttcttggcaacgctcaagaagctaccgtcaatttcagcatcaacgaagttgtcgctgatagaaccgtcaatagtcaacgggttgatgaagtgtacctcaaattcttgaactggaataacattgaactcattgtatgcaacaactagctgtacaggaacttccttgccaatcaacttgagggcggcatcagtaccgttcaagtcatctttttcgtggagacggatgatactggagcattcatttacgctattacctaatgtttcatcataattccaaggcaagttctttttgttttctgtaacatcagcacccatcaggttattgatagtggcagccaaatcgttagattgtttataatcattaattcctgcatccgttctaccgatgttgctgttgtcacttacgacttcgtcttttgctgtacctttagtcttataccacaattgagttttgtcatcgcttgtgacaaagtctttcaaatgcggataagtagtcaggtctttcatgcgtgtttcgtcaaagataaacttaacctctgcacactcacgaatatactggatgaattgagccaagttggctggcttttctttggtcggttcgtatacaaagccattaaccaagtcagcttcgatgtggctatagtctttcagcgtacaaccgtcagtaatacccggatatacatgcgggtctttctgtgttccaccgtcatttgcagtagtgtaaacaatcggattcacattgaagacaccttcgcccttaccattcttccagaatgtaccttggtatgcaaacttctgtgcaggaacaacgattgtctgcttgaatgtctgcttgatatcaccattcaaaccagtttcgtcaatgtacttaacgtcgatttcgaatgtagaagcataagtcttggtagactcattgtaagccaatgtaccaacagtcttcgggttcatagcccaaactaagttgtaagacgtattgtcttcagcatcgtgcaataaagcaaatacaaggtctttattgttttcaatcgcttccttaccgtctttgccaactttgtcagaaccttctttccagtcagtagccaccttagaaacagctaatttagacaaatctaccttcttgccgtcttttctcagttcaaggatctccatatctgtatagatgctgtggaactgagtcttactcatactctgaccaccgtcaaacttaaccatatgatagatcttctcgttcatttccttagagaacaactgctggaacatatccttgcaagttacagtatcgttcgggaatgtaatagcagcaatcgtttgatccttttcaccggtccaacgaatcttgatgtaacgtacagcaatcatattgccattattcttgtcccacaattcagcacgaatgataggttcgcgaccgatggaagtcttggaatattctgtatctcccaactctacgtcgtaaacttcagacttcagcgtgtagccgtcagacaagatgcggccgaatgcctgttcgtcagtcttacggtcaccttgcagatacttagcttttgctaaagagaaacggaattccaggccatagtcggcgtagttcgtcaattccttgtgagaagcgtgttgtttgtcagtataagtatagcatacagtaaccaacgttctcaagtcaagtggactgtcatatgactgcttaacatcaaccaattgttcgttgcctgatttatacaagcagagagagtcatgataatgaacgtatttaccatcctgcatttcgtctgcaaaatcagtcgtgaagtccttcgtgaagtcaatcttcttgttagccaaataaggatatacagtagattcttcgatacggctgtattcggaatttacaaatacgtctttaccagcttctttctcagcatctgtcaggtttttgtcagcaataggagtcttcagagaagccatccagaacttttcaagtttaccttcaccgtgagcgctaccggttgtgccgatgctcttgcctacgtaatctgcattcttcttataaagaacagtcattacaccgtcttttacatcgtagtctacaacttcgagaggcttgttctgagaaagttcaggagcagcctttgttacgttctgagaggtaaagcattcaaacataggaagcttaacatcttctttcatcacaccgatgctcgggctaatcttgtagcttacctcattcttttcggtagaaatgctgagtgccttggcgccctttacagcagtgtggtccaaaaccgggcgatcagtgtgcttagacgggtctgcttcgtggtcagcatagttcttggcagcaaaaacctgcggtgtatacgtcagtgtcagcagttcaattgaaggaatgccgttgatgtgcgtagttggaatcagcgtaaggctggtcaatcggtgaccaatcaaagccataactttaacactcagagtttcgacatctgtagccaatttcttcaaatcagcttcagaaataaactcacttgccagactctccttcagttctttgatcttagtatcaacaacctctaaagatgccagcttttccatttctttttccaaagcatcttgtaatttctctaaatcagcttcagatactcctccttcgcttgaaccagccttatccagagcttcctgagctttggccttggcttcgtttgcggcagttttagcttcatctacagctgtctgcaaagtagcaacttttgcattcaggtcatcaagtgaagctttcttgtccagttgtccctgcaagtccttgatgtcgtcatcatagtccttacaagacgtgaacgttcctgcagtgcccaccattaaggcgctgaacaggatcacacttagaaactttttgttcataattgaaaactttaaatttataaatttaaaaaaataaaaagtgaataatctctcattttgaatccctttcgcatacttcttttgttactaagtattccgttacttcgcaggtaacgggaaccatcttgaatcaattatgtgaaaagaagtttaatatagttgtaatgcccctataattgtttataacattttaagcgatgaaagatgaaaagtggcttataggtagaattctgataatatgaccgagaggtaaagttacgataaaggaaaatcaaaatatttatagggaaagaaagacttaaagtgttattttgtagagttttggcttaaggggaagttgttgagaaatgagcgagaggactcttcccttcaagagatgcttcttgcgggaggaataaatatggacacatctaggccgctttatcaataaaaataaaaaaatctatgccgagattccattgctttttacaaaagaaattaccttctcatttgcttcatcaatcttcttgtcgttgaaaggtttgagataggtttcagtaacatttatcgatgaatgtcccatcgcttcggaaataatgccagggtgaatctcacaataatatgccattgtggcccacgtgtggcgtgccgcataactactgagtgccgactgcattcccaagcattgtctgagtactgccaaacgttggttgaatgccctgagtgccgactggtattcccggtatgccgcttctgtgccttcctcactttgtaatatggggaataaataaggagagtccttgtccttgtttgctatcattctcaccatttgcatagcctccggcgtcagtgagacggtcagtgcccgtcccgtcttcctgcgcctataggacaaggtatttccttgtaaatcccttttgtgcaaataggccaggtccacaaaaggaatccctcttagcataaacatcaatacaaagaaaatttttgttttctgtcgggtgttgggagaattaccggcctgcaggctcatctctgtctcccgtatcaagcagcctatgtcggaagcttcgagcgcctttttcctatccgcccgtgtgccggtatacacatgctcaaacagcctgggtacatatcgcaccagctttttgtccaccgcccggttgtaaaccgaacgtatcgctttgatataggtggataccgtattccaactacaattcctctgcctgaggaagttttcgaatctcttcagtacggtcgggctcagcttgcgcatgggcatcggttgccatttggtgaataccgagaatgcattcaccgctgactggtagatgtgtgccgttccccacctgccgccttcccggagttccccgatgattgaggagaacatctcttgtaaggtaatttcatttctgctcatttccaaattatttataaaaaggtttatcctgcaattataaataaattgagagcaagtgcaaaggcatcattctgaaatctgcgaaacgggaatgatgccgtatccgacagcttatttgttggctaacgtctgtttagtggctgatatacgtatcctggaagaaccgcttgttatcattcaggctgcaagtggcatccactccggcttgttgcaggcgttcggcaatctcattcagtttcttcctcgaaacccttccgatatagaacagacggtagcggtaatcgttgtccagcaattccatgacgtgcgtgaaattctgttcgcgggcaaagtcgaagtttacttttcttaggttctggtacggatagcggatagtcctgcctacgctgtgtatgatgaggccgttattgtccaacgtcaggtagcagaagcgggtcatcagcatgctgatgaaaaaaagacttaatgcaaacgaaatgatagccgggatgaagcccctgccactgatggaataatatcccaatataaggaatatcaggaataagacaaagaaccagaacatatagagtgacggacgctggtatgtttctgtgggaacctctgcgactgtccgttccctcggtgcgtagttgtcgaaggggatttcttgggagaccaggtagcggatgaccgaggaagggtgacggaaaggaggcagatagattactttttcttttccttcctttagatgtaaagtcagtatgcccggaccatatttgtctttcgcagccaagttgcttttgcggggaacctggtggtaacgcttcatgaaactgaaactcttgatttggtgcagtccgatgtgctggctttgcagcagttgttcggctcttttctgttctttactggtcacttccatagttcttattttttaagttcgggataactgatgcgggtatggtatatagtcttcagcttctccttgaatacgttcttcacggtggcaatatccttgaaggtgatggggcattccttgaaatagccttctgccacttgcgaatcgataatcttgtctaccaggttgctgatgctctcttccgtatattcgggcagactgcgtgaagcggcttccaccgaatcggccatcatcaggatagcctgctctttggtgaacgggttgggaccggggtaggtgaatgcctcctcgttagggtcttcaccggggtgctcgtttttccaggagatatagaaatacttcgttttcccacggccatggtgagtggtgatgaaatccttgattactttggggagattgttcttctcggccagcttcagcccgtccgtcacatggctgatgacgacttgggcactttgctcatagcccagattcttgtgcggattgactccacccgactggttctcggtgaagaacaccggattctccatcttgccgatgtcatgatacagcgctccggtacgtaccagctggcttttggctccgatacggttggccgcttccgccgcaaggttggcaacctgcatggaatgctggaaggtgccgggaactgtctcggacatgcggcgcagcaggctgttgttgatgttggacaattcgaccagggtgacattggaggtaaagccaaacgtcttttccaccaggaagagcaggggataggtgaacagcagcagcactccgttaatgacgaaataagtgtacatgcttccgttgatttttgtcaagtcgttttctgtaatcagctcgaaagcaaagtagacggcagcgtaggtcaatatgacgaggaaggctgtccggaacagttgcgaccgttgtgaaagttccctcagactgaagatggcaaccagccccgccgagagttgcagaagaatgaattcatgcggatagcgcaggcagatggagcatatcagtatggtggtgacttgtgcgatgaaggccgtgcgtgagtcgaggaacacccggatgatgaccggcagcatggcatacgggatgatatagacattgaatatgttgttggcaaccatgatggccgtcaccacgcaatagaacatgatgagggcgaagagcagggagaggctgcccttgcgcttgtagtaatctttacggaacaagtcgaggtagagcatgaaacacagcatgaagatactgacaaacaatacctgccccgccagcatcaaccgtttttgcccgatggactcactgcgtttgatggattctttccgtagactctcaaggatgttgtatgtctcctggctgacaatctcgccgcggtcgatgattttctgtccgctcagtacgatgccgttggcccatgaatagttgtcgagcatctccttcttagcggtttcggtccgctgctcgtcataggtcagattagggaacagatattcgttcagcgagcattgccgtagaatgtccgggcggtagtgggcggtatcggccgtgagtatatagttataggcatccttcaccgaatataccttgttgatgtcctgctggttggccagtttgtcgttaatgaccatgatggcggttgtgctgtccttatgcagttggttcagctcttcggtagaaacgatgccggcgcgatatacttcagagagtttcctttccagaaagcggacgtagtcggtggagggaagcaggccgcgcaggtgggtctgatagtctgccttcaacttggcgagcacacttttctcaatgcttttgtccagctggaaatacggctggaaggtggcgaggatactgtcttgctcgcgtttcaccacttcatcggccttatagatggggaagtcgaaggtggccatgagctgtccgtacttccagggcttgtcaatgtcgaactggtagttgaatttaccgtcacgtggcagaaaatagacaataatccccacagtgccgatgaatatcagtgctctgtatagcaaatctctgagcgagaactctttttttgtattgaaataactcatatcggctgaaatttttgcgaaaagtacaaaaaaaaacattagtgtggaaaaaaaggtttaattttgccgtctaaaatattcataagtaaggtagattatgacagaaagaaaggtcagagtccgttttgccccgagtcctacgggggcgttgcacatcggcggtgtgcgtacagctttatacaattatctctttgcgcgtcagcatggaggagatttgatatttcgtattgaagatactgattccaaccggtttgtaccgggtgcggaagaatatatcctggagtctttcaagtggttgggcatcccgtttgacgagggcgtgagtttcggtggagaccatggcccgtaccgtcagtcggaacgtcgggaaatatacaagaagtatgttcagattctgctggaggccggaaaagcctacatcgctttcgatactcctgaggagctggaagcaaagcgtgcggagattacgaatttccagtacgatgcttctacccgcatgcagatgcgtaattcactgacccttcctaaagaagaggtagacgcgctgattgctgccggtaagcagtacgtggtgcgtttcaagatagagccgaacgaagatgtgcatgtgaacgacctgattcgtggggaagtagtgataaactcttccattcttgatgacaaggttctttataaatcggcagatgaacttcctacttaccatctggccaatattgtggacgaccatttgatggaagtgtcccatgtgatacgcggtgaggaatggttgccttccgcaccgttgcatgtattgctctaccgtgcctttgggtgggaggataccatgcctgcctttgcgcatttgcccttgttgctgaagcccgagggtaacggcaaattgagtaagcgtgacggcgaccgtctgggcttcccggttttcccgttggagtggcatgaccccaagtcgggagatgtctcttcaggctaccgcgaatcaggctatctgcccgaagcggtcattaatttcctggctctgctgggctggaatccgggcaatgaccaggaactgatgtctatggatgaattggtgaaattgtttgatttgagccattgcagcaagtcgggtgccaaattcgactataagaaaggtatctggttcaaccatgagtacatcatgatgaaaccggatgcggagatagcttgtcttttcagaccggtgctggagtccaacggcatagacgcctccaactatagcgacgagttccttacgaaagtggtttcactggtgaagggacgcgtcaacttcgtaaaggaactgtgggaccagacccgttttttcttcgtagcccccacggaatatgcggcaaaggatgtgaagaaacgttggtcggaagatactccccgcatcatgaccgaattgatggatgtgctgcgcggtatcggggatttctcctccaagccttccgaagatattgtgattggttggattaccgagcgcggctatcacatgggaaatgtgatgaatgccttccgcttgtcagtggtgggcgagtgtaaaggcccgcacatgttcgacattaccgagctgattggcaaggaagagacgttggcccgcatacagcgtgctgttgatgctttaaagtgaataaatcttcttcatccttaatccatatagtatgctatatgacttggcaatagccatctacgatattctggtgcatctggctgctccatttagccgtaagccccgaaaaatgatgaagggacactgggtggtctatgaacttctccggcagcagttggagaaggacgtgcgctatatatggttccatgccgcttctttgggggagttcgagcagggacggccgttgattgagaaaattcgtgccaaatatccggattacggtattctgctgactttcttctcgccgtcgggctatgaggtccgcaagaattataggggggcagacgttgtctgttacttgcctttcgacaagtcccgcaatgtgaagaagttcctggatatcgtgaatccctgcatggcattcttcatcaagtacgagttctggaagaactatctggacgaactgcacaagcgccgtattccggtgtacagcatttcctccattttccgccgcggacaagtattcttcaagtggtatggcggtacgtacagacatgtgctgcgcgacttcgaccatttgtttgtgcagaatgaacgctccaaacgctatctggcgaagataggcatcagccgtgtcacggtggtgggggatacccgttttgaccgtgtgctgcagattcgtgaggaggccaaacatctgcctttggtggagcttttcaagaacaacacgatgactttcgtggcaggaagctcctggcagccggacgaggatttgtttattgaatacttcaaccggcatccggaggtgaagttgattatcgctccgcacgtcatcgacgagaaccatctggtagagattatccgtaaactgaaacgcccctacgtgcgctatacccgtgccgacgagaagaatgtccgtaaggccgactgcctgattatcgactgcttcgggttgctctcttccatctaccgctatggcgagattgcctatatcggaggtggtttcggggtgggaatccacaatacccttgaggctgcagtttatggcattccggtgattttcggaccgaagtatcagaaattccaggaggccatcctgttgctggaggcaaaaggcgctttctcggtgaaggattatgaggaactgaaaactttgctcgaccgtatgctgacagatgaagtctttttgcgcgaatcaggcatgaatgcaagcaattatgtgaccggcaacgccggtgcaacggataagataatgagtatgataaacttttagaaaagtaaagagtgataaaagcgatagggcggtaaaggtgatggaatggcatccctttatcgccctgcctttttgggggccttgtctccctttatttgtaccagtcggaatacatcagatagttgtgtgcaatcttctggttcagctccttggcctgctccggatctactttcttgatgaacttggcggggactcctccccagatgcttcccggctcgatgaccgtattgctcaataccagggaaccagcggcgacaatagccccttcgcccactactgcgtggtcaaggatggtggaacccatccctaccaaagcatagtccttgatagtggctccgtggatggtcacgttgtgccccacggatacgtggtctcctatctctatggtcgatttctcgtacaaggtgtggagcacgcttccatcctggatgtttactccgttccctatgcggattgagtttacgtcaccccgcagcacggtgctgaaccagatgctgcaatcccgtcccatcttgacgtcgccaatgacaaccgcattgtccgccaaaaaacaattctccccgatttcgggagtgaatcctcttactgattttattaatgccatttttttagtgattagtggttaggttactgcatgcttccttcagccattcccgttctccttcgttcaggcttggcgaaagtgtctcgtatacatgctggtgatagttgtccagccatgccgtttcctctgccgtcagcatctctttgatgatacctttcttgcagatggggcagagggtaatggtttcgaacttcaggtaatttccgaacatgccttcaccgtccttcacggtcagcaccaggttttccgtgcgtattccatggcttccggctttataaacgcccggttcgttggaagtgaccattcccggccgtagggttaccggattctcattcatgcggatactttgcggaccttcgtgcacattgaggaaatggcctacgccgtgcccggtaccatgcaggaagttcatgtggtgttgccatatcggcatgcgggccagtacatccagttgcgctcctcgcgtaccttccgggaagacagccatggcgaggtcgatatgtcctttcagtatcagggtgtagtccgtcttctcttcttcggtcagtttccccagtgcgatggtgcgggtgatgtcggtagtgccgtccaggtattgcgcacccgagtccagcagcaggaatccctcgggtttcagtggcacgtccgttgccggagtggcttcgtagtgtacgatggctccatgttccttgtacccggcaatggtgtcgaagctttctcccatgtagagtggctgtgcggcacggaattcgtgcagtttcttgtctacgctgatttctgtctcgttgcctgcggaaacggcctcctccagccatttcaggaacttcaccagtgccactccgtcgcgttgcatggctgcgtggatgccggctatttcccggtcattgcggaccgctttcagcaaggctatcggtgagcgctcgtcaagtacccggcaggaaggggggagggcggaataaacggcataattcgtctttcccatgtcgagcatgatgctgccgtccggtattcttgtcacaaaggattcggtgtccccataagcatggatggtgacgccggcttcttccagatgggctgaaagctcttccgttactttctcgggctggatgaaaaagtgtgtttcttgttcgttgattatcaggtagcttactactacggggttgcaatgcacatcgttgccgcgtatattgagtgtccatgctatctcgtccaatgccgacaccaataatacgtccgcttcactcttcttcatctcccggcggatagcagccagtttgtccggacagcttttcccggcgtatttcatctcgtggataaaggcgggtgcttcgggcatgggagggcggtctgtccatatctcattcatcgggtcggcaatgctctttacggtgatgccgttttttgccagatcctcttgcagggctatggcttgtgtggtggaaaatacctttccgtctatacctacaactgaattcgctgtaaggttctcccgcaggaaatcgaggatgctgggcgtttcgggcagcatttccttgtataagtcgatgccgctgccttccagctgctgctcggcttggagaaaatagcgagaatctgtccacagtcccgccttgtcggtggtaatcaccgccgtgcctgccgaaccggtgaagcctgatatccattctcttgatttccagtacggtgctacgtactcgcttaggtgcgggtcggtactggggataatgaaagcgtctatgccttctctttttaacaatgcccgtagagcatctatacgttgattgattgtctgagccatatttttataaatgtaattaagtaggcgtgtaaatgagtttataatctcttcattctctgctttcaaagttacacattctcttttaaaaatttgctatgcttcacggattttagcggattggctcaataaaaacatctttccctttgctcattcgtttgataattaggaatcatgggtaatttttttgcagaaagttttgtgaataaagaaagtatgtgtaattttgccgctcaatttaatcgtgagatttttaaaccattaacatttaattaaaagaaaatgattgtagtacctgtaaaagaaggcgaaaacattgaaaaagcgctgaagaaattcaaaagaaagtttgaaaaaactggcacagttaaggaattgagacgcagacaacagtttgataaaccgtctgtgactaaaagacttaagaaagaacgtgctgtttacgttcaacaacttcagcaagtagaagattaataattcgtaaattcctttgaattattgaattctttttcatacattcgttgcatgattttagatatgtagcgatatgttgttgacagattcttttcttgactatcttctgcacgagcggaactattccaaaggtacggttgagtactatcgggcagatattcttgaactgcagaggtttggagaagaaatgttgggagacttgactccatcggatgtagatgcggaacttgttcgtgaatggattgcttccttgatggacaaaggacttgcttctaatacgataaaccgaaagctgagttctatccggacatgctataaattccttttgaggagaggcgaggtcgcggtagatccgttgcggaaagtgacggggcccaagaagaaaaagccgcttccggtatttctgagagagggtgagatgaataggttactggatgatatggactttggtgaaggttttgaagggtgtcgcgaccatatgattattgaaatgttttatgctaccggcatgcgactttcagaattgatagggttggatgataaggatgtcgatttttcggcttctctcgttaaagtgacgggaaaacggaataaacaacgtcttatacctttcgatgaggagctgggacgctcgatgcgagaatatgtcaatgtgcggaatgaagctgtcccggttcgctcggatgctttttttgtccggaagaatggaaagaggctttaccgcagtatcgtagcatgccttgtgaaacgaaacctttcgaaggtagtgactgtaaaaaaaagaagtccccacgtgctgaggcacacctttgcaacggctatgctgaacaatggtgctgatttaggctcgataaaagaactcctcggacacgagagtctggcgacaacggaagtttatacgcatactacttttgaagagcttaaaaaagtgtataatcaggctcatccccgagcctaaagtaaaaaggaggtaagtatggaagtaagaattcaatcgattcactttgatgcgtcagagcaattgcagtctttcgttcaaaagaaagttgctaagttggagaaattttacgacgatataaagaaagtagaggtgtcattaaaggtagtaaaaccagaaacagccgaaaataaagaagccggagtgaaagtattggttcccaatggcgagttttatgcaaacaaggtttgtgatacgtttgaagaagcagtggatttatgcctggaagctttggaaaaacagctggttaagtacaaggaaaagcaacggagcaaataattttccgctaaaattttgcgggtaaaaaataaatgcctaaatttgcagccgtttcgctcacactatgaacgttacggttgcattttttagcttgcctctttagctcagttggccagagcacgtgatttgtaatctcggggtcgttggttcgaatccgacaagaggctcgctcaaggatgagtggaatgagtctttcttcacgaggtggagatgatatgagaacggaaatcgtccgggtaaagttcactctgcgatgatttagtaaggaaaagagttctttttgtaatgtaggggcaaataccagagtggccaaatggggcagactgtaaatctgctggcttacgccttcggtggttcgaatccatctttgcccacaactcttattctccttgctgttatagctcagcggtagagcacttccttggtaaggaagaggtcccgggttcaagtcccggtaacagctcacaaagatgtaaaagctgattattaatcaaataaataacaagtaaagctatggctaaagagaaattcgaacgtaccaaaccgcatgtaaacattggtacaattggtcacgttgaccacggtaaaaccacgttgacagctgctatcactacagtgttggcaaagaaaggtctttctgaattgcgttctttcgattctatcgataacgctcctgaagaaaaggaaagaggtatcactatcaacacttctcacgtagagtatgaaacagctaaccgtcactacgctcacgtagactgcccgggtcacgccgactacgtaaagaacatggtaactggtgctgctcagatggacggtgctatcatcgtagttgctgctactgatggtccgatgcctcagactcgtgagcatatcttgctggctcgtcaggtaaacgtaccgagactggttgtattcatgaacaagtgtgacatggtagacgacgctgaaatgttggaactcgttgaaatggaaatgcgtgaactgctttcagcctacgaattcgacggcgacaacactccgttcatccagggttctgctcttggtgcgttgaatggcgttgaaaagtgggaagagaaggttatggagctgatggatgcttgcgacacttggattcctctgcctccgcgtgatattgacaaaccgttcttgatgccggttgaagacgtattctcaatcactggtcgtggtactgtagctactggtcgtatcgaagctggtgttatccatgtaggtgacgaagttgaaatcctcggtttgggtgaagacaagaagtctgttgtaactggtgttgaaatgttccgcaagttgctggatcaaggtgaagctggtgacaacgtaggtctgttgctccgtggtatcgacaagaacgaaatcaaacgtggtatggttctttgtaagcccggtcagattaaacctcactctaagttcaaagcttctatctacgttttgaagaaagaagaaggtggtcgtcacactccgttccacaacaaataccgtcctcagttctatctgcgtactatggactgtacaggtgaaatcactcttccggaaggaactgaaatggtaatgcctggtgataacgtagaaatcactgtagaactgatctacccggtagcattgaacgtaggtttgcgtttcgctatccgtgaaggtggtcgtacagtaggttctggtcagattactgaaattcttgactaataaccaatataatcttaatcagttcccggtatacatcgggaactgattatgtacaaacgggagtagctcagttggtagagcaccggtctccaaaaccgggtgtcgggagttcgagcctctcctcccgtgctaatatttttgaaatgaagaagattgtagcttattttaaagaaacttacgacgaacttgttcataaagtgtcgtggcctacgtattctgaacttactaacagtgcagtagttgttttatatgcttccctactaattgcagtggtagtatttgcgatggacttctgtttccagcatctgatggaatttgtttatccacattaaaagtaaggagaaatgtctgagattgaaaagaaatggtacgttttgcgtgctattagcggaaaagaagctaaggtaaaggaataccttgaagctgatattaaaaacagcgaccttggtgattacgtatctcaggtattgattcctaccgaaaaggtatatcaggttcgcaatggtaagaaaattgtgaaagagagaagttatctccctggttacgttttggtggaggctgctctggtgggtgaggttgctcatcatctgagaaatactcctaatgtgatagggttcttgggtggttcggaaaaacccgtacctctgagacagtcggaagtgaatcgtatacttggtacggtcgacgaattgcaggaatcaggtgaagacttgagtatcccgtatgtagtcggcgagactgtaaaggtgaattacggtccgttcagtggattcagtggaatcattgaagaagtgaacaccgagaagaagaaactgaaggtcatggtcaagatattcggacggaagactccgctcgaattgggctttatgcaagttgaaaaagaatagtgcaggtgttacgctgtagtattcttcattaatgtttatatatataaatcaattagaaaatggctaaagaagttgctggactaatcaaattacagattaaaggaggcgcggcaaatccatcacccccagtaggacctgcattgggttccaagggtatcaatatcatggagttttgcaagcaattcaacgccagaacccaagacaaagcaggaaagattcttcctgtgattatcacttactacgcagacaagtctttcgattttgtaatcaagactcctcccgtggctatccagttgttggaagtgacgaagcaaaagagtggttctgctgagcctaaccgtaagaaagttgccgagattacttgggaacaggttcgtacgattgctcaggacaaaatggttgacttgaactgtttcactgtagaagctgccatgaaaatggttgccggtacggctagaagtatgggtatcgctgtaaaaggggagttcccggttaataattaataaacttcaattagaatgggtaaactgacaaaaaatcaaaagttggctgcagaaaaaattgaagcagggaaagcatactctctcaaggaagctgctcagttggtaaaggaaatcacttataccaagtttgacgcttctctggatatcgacgtacgtttgggcgttgacccgcgtaaggccaaccagatggtgagaggtgttgtatcacttcctcacggtactggtaaggttgtacgcgttttggtgctttgtacaccagatgctgaagctgctgcaaaagaagccggagctgactatgttggtcttgacgaatatattgaaaagatcaaaggtggatggactgatattgatgtgattatcactatgccgtccatcatgggtaagattggtgcactcggtcgtgtgctcggtcctcgtggattgatgcctaaccccaagagtggcactgtaactatggatgttgctaaagctgtaagagaagtaaaacaaggcaaaatcgactttaaggttgacaagagcggtattgttcatacttctatcggtaaagtttcatttagcgctgagcaaattcgcgacaatgcgaaagaattcatctctactttgaataaattgaaaccgactgcagccaagggtacatatattaagagtatttatctttctagcacgatgagtgcgggcatcaagattgacccgaaaacagtagaagaaatctaataaaacggagtaataatgagaaaggaagataaaagtacgattattgagcagattgctgctacagtgaaggaatacggtcacttctatttggtggataccactgccatgaatgctgctacaaccagcatgttgagaagagaatgtttcaaggctgacatcaaattgatggtagttaagaatacattgcttcacaaggcattggagagcctggaagaagacttttctccgctttatggttctctgaaaggtacaactgccgtaatgttcagcaacgttgctaacgctccggccaagttgattaaagataaggctaagaacggtattcccggactgaaggctgcatatgcagaagaaagcttctatgttggtgctgaccagttggatgctctcgtaagtatcaagagtaagaatgaagttattgccgatatcgttgcattgctgcagtcaccggccaagaatgttatttctgctctgcaatcaggtggtaacaccctccacggagttctcaagactcttggtgaacgtcccgaagcgtaaatttcggaaaaagaattatatcaatttatttagtatttaaacaattaaaaatcatacaaaaatggcagatttgaaagcttttgcagaacaattagttaacttgacagtaaaagaagttaatgaacttgcaacaatcctgaaagaagaatatggtattgaacctgctgctgcagctgtagctgttgctgctggtcctgcagccggtggtgctgctgccgcagaagaaaagacttctttcgacgtagtattgaagagcgctggctcagctaaacttcaggtagttaaagccgttaaggaagcttgcggtcttggcttgaaggaagctaaggacatggtagacggtgctcctagcgtagtaaaagaaggtttggctaaggacgaagcagaatcattgaagaaaacattggaagaagctggagctgaagttgaacttaaataacattagcctgtaaatcaggtaattcggttaggaacccttcgtgaaaagggttcttaacctttttgtgtatatatttaaaattaagttctacaaatccattaacagatgtcttcaaatactgtaaatcaaagagttaattttgcttcgactaagaatccgcttgaatatccggattttctggaagtacaattgaagtcattcaaagactttctacaactggacaccccacccgagaaacgtaagaacgagggactgtataaagtatttgctgaaaacttccccattgccgatacaagaaataattttgttcttgagtttttggactactatattgatccgccgcgctataccattgatgaatgtatagagcgagggcttacatatagcgtgcctttgaaggcaaaattgaaattatattgtaccgaccccgaccacgaagattttgacacggtcattcaggacgtgttcctcggtcctattccttacatgacggataaggcaacattcgtcatcaacggtgcggaacgtgtggttgtatcccagcttcaccgttcaccgggcgtattcttcggacagagcgtacatgccaacggtaccaagttgtactcagcccgtatcatcccgttcaagggttcgtggattgagtttgccaccgacatcaacaacgtcatgtatgcgtacattgaccgtaagaagaaattgccggttaccactttgctgagagccatcggatttgagaatgacaaggacattctcgagatttttaatttggcggaagacgtgaaggtgaacaagacgaacctcaagaagatggtgggacgtaagttggccgcacgtgtgttgaaaacatggattgaggattttgtagacgaagataccggtgaagttgtttccatcgagcgtaacgaagtcgttattgaccgtgaaactgtaatcgagccggaacatgttgacattatattagagtcgggcgttcagaatatcctcgtacacaaggaagaaccgaaccagtctgactattctatcatatataatactctgcagaaggatccgagtaactcggaaaaagaagctgtactctacatctaccgccagttgcgtaatgcagaccctgccgatgatgccagtgcacgcgaggttatcaataacctgttcttctcagagaagagatatgacctgggtgatgtaggccgttatcgtattaacagaaagttgaacttgacgaccgatatggacgtgcgtgtccttaccaaggaagatattatcgaaattatcaaatatctcatcgagttgattaactcgaaagcggatgtggacgatatcgaccacttgagcaaccgtcgtgtgcgtacagtgggcgaacagttgtccaatcagtttgccatcggtctggcacgtatgtcgcgtactatccgcgagcgtatgaacgtccgtgacaatgaagtctttactccgattgacctgattaacgccaagacaatctcttccgttatcaattcattctttggaacgaatgctttgtcacagttcatggaccagaccaacccactggccgagattactcacaagcgtcgtatgtctgccctgggccccggcggtctgtcacgcgagcgtgcaggcttcgaggttcgtgacgtacactatactcactacggacgtctttgtcctatcgagactcctgaaggtccgaacatcggtttgatttcttcactctgtgtgttcgcgaaaatcaacgagcttggcttcattgaaactccgtaccgcaaggtggcagagggtaaggttgatctttctgacgaaggtttggtttacctcaccgcagaagaagaggaagccaagattattgctcagggtaatgctcctttgaacgatgacggtacttttgtacgtgataaagtaaaatcccgtcaggatgccgactatccggtggttcctccttccgaggtggaattgatggacgtatctccccagcagattgcttctattgcggcttctttgattccgttcttggagcatgatgacgccaaccgtgcattgatgggatcaaacatgatgcgccaggctgttcctttattgaagagcgaagctccgattgtaggtaccggtatcgaacgccagctggcacgcgattctcgtacgcagattactgccgagggtgacggtgtggttgaattcgtggatgcaacgactatccgtattctgtacgaccgtacggaggaggaagagttcgtaagcttcgagcctgcattgaaagaatataatatcccgaagtggcgccgtaccaaccagaatatgacgattgacctccgtccgatttgcgagaagggtcagcgcgtgactgcaggtcaaatcctgacggaaggttattcaaccgaagacggagaacttgcactgggtaagaacctgctggttgcttacatgccgtggaagggctataactatgaggatgctatcgtactgaatgaacgtgtggttcgtgaggaccttttgacctctgtacacgtagaagaatattctttggaagttcgcgaaacgaagcgtggtatggaagagttgacctctgacattcctaacgtaagtgaggaagcgactaaagaccttgacgaaaacggtattgttcgtgtgggtgcccgcatcgaaccgggtgatatccttatcggtaagattactccgaagggtgaatcggatccttctccggaagagaaactgctccgtgccatcttcggtgacaaggccggtgatgtgaaggatgcttctttgaaagcctctccttctttgaagggtgttgttatcggtaagcgtctgttctcccgtgttgtcaagacccgcagctccaagctggccgacaaggctctgttaccgaagattgacgatgagttcgacgctaagattggtgacctcaagaaagtgttgataaacaagctgttgaagcttacagaaaattatacatcggaaggtgtgaaggattacatgggtgccgacattatttccaaaggcgccagattctctgcttccgacttcagcgatttggacttcaccgctgttcagttgagcaactggacgaaggatgaacataccaacggactgattcgtgcattggtgatgaacttcatcaagaagtacaaggaactcgatgccgagctgaaacgcaagaagttcgccatcactatcggtgacgagttgcccgcaggtatcattcagatggccaaggtatacattgccaagaaacgtaagattggtgtcggtgacaagatggccggtcgtcacggtaacaagggtattgtttcccgtgtggtacgccaggaagacatgccgttccttgctgacggtactccggtagacatcgtgctgaatccgttgggtgtgccttcacgtatgaacatcggtcagatattcgaggccgttctcgggcgtgccggaaaaaacctgggcgtgaagtttgccactcctatctttgacggtgcatctttggacgatttgaacgaatggaccgataaggccggcttgcctcgctacggcaagacaacgctgtatgatggtggtaccggtgaagcattcgagcagcaggctacggtaggtgtgacttacatgctgaagctcggtcacatggttgaagacaagatgcacgcacgttccatcggtccgtactcactcattacgcaacagccgttgggtggtaaggcacagttcggtggtcagcgttttggagaaatggaagtttgggcactcgaagcgttcggtgccgcacacattctgcaggaaatcctgactatcaagtctgatgacgttgtaggacgttccaaggcttatgaagcaatcgtgaagggtgaaccgatgcctgctccgggtatccccgagtcactgaacgtattgctgcacgagttgagaggtttgggcttgagcatcaacttagaataatggataattgataattgagagtggataatgcaagttaccattctcaattatcggttttcagtttttcaatttcaattttccattgtcaattatcaattaaataaatttatggcttttagaaaagataacaagataaagagtaatttctcgaaaatctctatcggtttggcttctcctgaggaaatccttgagaattcgagtggtgaagttttaaagcctgaaaccatcaactatcgtacgtataagcccgaacgcgacggattgttctgcgagcgcatctttgggcctatcaaggattacgagtgccattgcggtaagtacaagcgtatccgttacaaaggcatcgtctgcgaccgttgtggtgtggaagtgactgaaaagaaagtgcgccgtgagcgtatgggacacatccagctcgttgtgcccgtggctcacatctggtacttccgttcacttcccaacaaaatcggttacttgttgggcttgcccaccaagaagctggatgccattatctattacgagcgttatgttgtcattcagccgggtgtactgtccgatgaagtggcacagtatgacttgcttgaagaaggagaatacctggacttgctggaaaagttgccgaaagacaaccagttcctcgaagattcagatcccaataagttcattgccaagatgggcgcggaagctatctacgatttgctgtcacgcctcgaccttgactctttgtcttacgaactgcgtaaccgtgccggaagcgatgcttcacagcaacgcaagaccgaagctctgaaacgtcttcaggtagttgagtcgttccgtgcatcacgcggacgcaacaagcccgagtggatgattgtacgcattgtaccggttattccacccgaacttcgtccgttggtcccattggatggcggccgtttcgcaacttctgacttgaatgacctttaccgtcgtgtcatcatccgtaacaaccgtctgaagagattgattgaaatcaaagctcctgaagtgattttgcgtaatgaaaaacgtatgttgcaggaagctgtcgactctctgtttgataactcccgtaaatcgagtgcagtgaagaccgacgctaaccgtccgttgaagtcactttccgacagtttgaagggtaagcaaggacgtttccgtcagaacttgttgggtaagcgtgtcgactattccgcacgttctgtaatcgttgtaggtccggagctgaagatgggcgaatgcggtatccctaaactgatggcagccgagctttacaagccgttcatcattcgtaagctcattgagcgtggtatcgtgaagacggtaaagagcgccaagaagattgtagaccgcaaggaacccgttatctgggacattttggaacacgtgatgaaggggcatccggtgctgttgaaccgtgccccgacacttcaccgtctgggtatccaggcattccagcctaaaatgattgaaggtaaggcaatccagctgcacccgttggcatgtacggcgttcaatgccgacttcgacggtgaccagatggccgtgcacttgccgttgagcaacgaagcgattctggaagcacagatgctaatgctccagtcacacaatatattgaaccctgccaacggtgctcctatcactgtgcctgctcaggatatggtacttggtctgtactatattacgaagctgcgcaagggtgccaagggtgaaggcctgacattctacggtcctgaggaagcgctgattgcctacaatgaaggtaagtgcgacatccatgctccggtaagcgtaatagtgaaagacgttgacgagaatggtaacattgtggacaagatgatgcacgatacctccgtgggccgtgtcattgtcaacgaaattgttccggcagaagcaggatatatcaatacgattatctccaagaagtcactccgagacatcatcagtcacgtaatcaaggtgtgtggtgttgccaaggcagccgacttcctcgacggaatcaagaacctcggttattacatggccttcaagggtggtttgtcgttcaacttgggcgatatcattatcccggaagagaaggaagcattagtacagaaaggttatgatgaagtagagcaggtaatcaataactataacatgggtttcatcacgaacaacgagcgttacaaccaggtaatcgatatctggacgcacgtgaactctgagttgtccaacatcctgatgaaaaccatttcaagcgacgaccagggtttcaactctgtatacatgatgctggattccggtgcccgtggttctaaggaacagattcgtcagctctccggtatgcgtggtttgatggcgaagccccagaaagcaggtgccgaaggcggtcagattatcgaaaacccgattctttctaactttaaggaaggtctgtccgtgttggagtactttatctctacccacggtgcccgtaagggtcttgccgataccgctttgaagacggccgatgccggatacctgacccgtcgtctggttgacgtatcgcatgatgtgattattaatgaagaagactgcggcacgctccgcggattggtttgtacggcactgaagaacaatgatgaaaccattgccactctgtatgaacgtatcctgggtcgtgtatccgtacatgatattgttcatcctacaactggcgaactgattgtggccggcggtgaggaaattaccgaggacattgcacaacgcattgaagactctccaatcgagagcgttgaaatccgttctgtattgacctgcgaatccaagaaaggtgtttgtgccaagtgttacggacgtaacctggcttccagccgtatggttcagaagggcgaggcagtcggcgtaatcgctgcacagtctatcggtgagccgggtacacagttgacactgcgtacattccatgccggtggtacggcagccaatattgctgccaacgcaagcatcgtggccaagaatcctgcccgtctggaattcgaagaactccgtacggtagacgttatcgacgaagcaggcgaaccggcaaaggtagtggtaggccgtttggccgaagtgcgttttgtggatgtcaacacgggtattgtgctttccactcataatgtaccctacggttctacgctctatgcagccgatggtgaaatggtagagaaaggcaagatgattgcccgttgggacccgttcaacgcggttatcattaccgaagctaccggtaagattgaatttgaaggcgttattgaaaacgtgacttataaggtagagtctgatgaatctaccggtttgcgcgaaatcatcatcattgagtctaaggataagacgaaggtgcctaccgcacacatcatgacagaagacggcgaactgatccgtacatacaacttgccagtaggtggccacgtagtggttgaagacggtcagaaggtaaaggccggtgaagttatcgtgaagattccgcgtgccgtaggtaaagcgggtgatatcacgggtggtcttccccgtgtcactgagttgttcgaggcacgtaacccgtctaatcccgctgtggtttcagaaatcgacggtgaggttaccatgggtaaggtgaaacgcggtaatcgcgaaatcatcgttacttccaagaccggtgaagtgaagaagtacctcgtaccgttgtccaagcagattctggttcaggagaacgactatgtacgcgccggtactccgttgtctgacggtgctatcacacctgcggacatcctggctatcaaaggtcctacggccgtgcaggaatatattgtgaacgaggttcaggacgtttaccgtctgcagggtgtgaagattaatgataagcactttgaaatcatcgttcgtcagatgatgcgcaaggtggaaatcgacgagccaggtgatacccgcttcctggaacagcaagttgttgacaagatggaattcatggaagagaacgaccgtatctggggaaagaaggtggtagtggatgctggagattcccagagtctgcaggctggccagattgtgacggctcgcaagctgcgtgacgagaactccatgttgaaacgccgcgacttgaaacccgtggaagtgcgcgacgctgtacctgcgacttctactcagattcttcaaggtatcacccgtgctgcattgcagacttcaagcttcatgtcggctgcttccttccaggaaacgacgaaggtactgaacgaggctgccatcaacggaaaggtggaccgtctggaaggtatgaaggagaacgtaatttgcggtcacctgattcctgccggtaccggacaacgcgagttcgagaagattatcgttggctccaaagaagagtacgaccgtatgcttgccaacaagaagacggtacttgattatgctgtagacgagaaagtagagggatagccttacaacgtcaatataattctattaaatagagagggaatatcctataagaaggagtattccctctctgttttgtctttgcctcttccttctgtactgcaatgcttctgtatgtttgttacagtgctactgcaaaacggttgcagtggcttgctcctttttcagaacggattattatgtgtctttttgaacttaaatgtatatcatccgaaaaaaaagagtacttttggtctatcttttaagaacattttaaaaacaattgtgcaacatggaaaatcaagaaaacaacaacggtcaactccagatagaattgaaggaagaagtggcgcaaggtacatatgccaatttggctattataactcattccagttcggaatttattctcgactttatccgcgtgatgcctggaatgccaaaggctggcgtgcaatcgcgcatagttttggcacccgaacatgccaagcgtttgctgcgtgcactcgaagagaatattgggaaatatgaacgcgctttcggactgattcgcatgccggacgaacaaacatttccgcctcttcccaacatcaagggtgaagcgtaaaatcaaaaaaaaacttgtagtgcattgattattcaaaacttattagtatctttgcagcccaaaagtgtatagttttgaattaatataaacaataatatataactaaaaacaattaaaatgcctacaattcagcaattagtaagaaaaggacgcgaagtgctggtggagaaatcaaagtctccagccttggactcttgtcctcaaagacgtggcgtttgcgtgagagtgtatacaaccactccgaagaagccgaattcagctatgcgtaaagtagctcgtgtacgtttgaccaatggtaaagaggtgaactcttatattccgggagaaggtcacaacttgcaggaacactctatcgtgttggtacgtggtggtcgtgtaaaagaccttccgggtgtgcgttatcacatcgtacgtggtactttggatactgcaggtgttgcaggtcgtacacaaagacgttccaaatacggcgcaaaacgtccgaaaccgggtcaagcagctcctgctaagaagaaataatctggtggcctgattcccaaaataggaaaatttaaagtaataacttacgttttagtttgttggaaatgctaaaggttgagtaaattctccggagggagagttgaagaagacagaagtaaacaaccaagaacgaaaaacattattctttcagacaaatgagaaaagcaaaaccaaaaaaacgcgttatccttccggatcccgtgttcaatgatgtaaaagtttccaagttcgtgaatcacttgatgtacgatggaaagaagaatacttcttatgaaatcttctatgctgcgttggaaacagtgaagaacaaaatgcagaacgaagagaaatccgctcttgaaatttggaaaaaagctctggataatgtgactcctcaggtggaagttaaatctcgccgtgtgggtggtgctactttccaagtccctacagaaatccgtgctgaccgtaaagagtcaatttcaatgaagaacttgattatctttgcacgtaagcgtggcggtaaatcaatggctgataagttggctgctgaaatcatggatgctttcaatgaacagggcggcgcttacaaacgtaaagaagatatgcacagaatggcagaagctaaccgtgcgtttgctcatttcagattctaatactataagagactaaccaattagaagattaaaaaacttaaagtaagggaattagaaaatggcaaagcatgatttacatttgacacgtaatatcggtatcatggcccacatcgatgccggaaagacaacgacctctgaacgtattttgttttacacgggtttgacccataaaatcggtgaggtacacgatggtgccgctacaatggactggatggagcaagagcaggagcgtggtatcactatcacttctgccgctaccaccactcgttggaaatatgccggtaatacttataaaatcaatttgattgatactccgggacacgtggactttactgctgaggtagaacgctctttacgtgtgttggacggtgctgtcgctgcttattgtgcagttggtggcgttgaaccgcaatctgaaacagtttggcgtcaagcagacaagtacaatgtgccacgtatcggttatgttaataaaatggaccgttccggtgcagacttcttcgaagtagttcgccaaatgaaggacgttttgggtgctaatccatgtcctatcgttatccctattggcgctgaagaaactttcaaggggttggttgaccttattaaaatgaaagctatctattggcatgatgagacaatgggggctgactatacggtggaggaaattcctgccaatttagtagacgaagccaatgaatggagagataagatgctcgaaaaagtagctgagtttgacgatgccttgatggagaaatatttcgatgatccttctactattacagaagaagaggttttgagagctcttcgtaacgcaacagtacagatggctgttgttccgatgctgtgtggatcttcattcaagaacaaaggtgtacagactttgcttgactatgtttgtgcattcttgccttctccgttggatactccgaatatcataggaactaatcctgatactggtttggaggaagatcgtaagccggatgatgatgaaaaaacatctgctttggcatttaagattgctactgacccgtatgtcggtcgtctgactttcttccgtgtttattcaggaaaaattgaagcgggttcttatatttataattcccgttcaaggaagaaggagcgtgtatcccgtctgttccagatgcactcaaacaagcagaatccggtagaagttatcggtgctggtgatattggtgctggcgtaggtttcaaggatatacatactggtgatacattgtgtgacgaaactgcaccgattgtattggagtctatggacttcccggaaccggtaattggtatcgcagttgagcctaagactcagaaggatatggataaactgtcaaatggcttggctaagctggctgaagaagatccgacgtttacagttaagactgacgaacagactggtcagacagttatctctggtatgggtgagcttcacttggatattatcatcgaccgtctgaaacgtgagttcaaggttgaatgtaaccaaggtaagcctcaagttaactataaggaagctatcactaagacagtcaacttgcgtgaagtttacaagaagcagtccggtggtcgtggtaagttcgctgatattatcgtgaacatcggcccggttgatgaagacttcaaggaaggcggattgcaattcgtcgacgaagtgaagggtggtaacattcctaaggaatttatcccgtctgtacagaagggcttcactactgccatgaagaatggtgtgttggcaggttatccgttggattcactgaaagtaaccttgattgacggttctttccacccggttgactctgaccagttgtctttcgaaatctgtgctatccaggcatataagaatgcttgtgctaaggcaggcccggtattgatggagcctatcatgaagctggaagttgttactccggaagagaacatgggtgacgttatcggtgacttgaacaagcgtcgtggccaggtggaaggtatggaatccagccgttccggtgcacgtatcgtgaaggcaatggttccgctggcagaaatgttcggttacgtaacagcattgcgtaccatcacttctggtcgtgcaacctcttcaatggtatactctcaccacgcccaggtttccaactctattgccaaggcagtattggaggaagtaaaaggtcgtgctgacttaatctaaaaaaacttgaagtcccgtaggctagcgaatgactcttagcctgcggaacttcatcttatataactatttaataattaaagacagtaatgagtcaaaaaattagaatcaaactgaaatcttacgaccacaacttggttgacaagtcagctgagaagattgtaagaacggtgaagacaacgggcgccatcgttagcggtccgattcctcttcctacgcacaagcgtatctttaccgtgaaccgttcgactttcgttaacaagaagtcgcgtgaacaattcgaactctcttcttacaagagactgattgacatctatagctcaacagctaagacagtagatgctctgatgaagttggagttgccgagtggtgtggaagtagaaatcaaagtgtaagtattaaaaattaagtgaaatgccaggattattaggaaaaaaaatcggaatgacatccgttttcagtgccgagggtaagaatgtaccatgcactgttatcgaagcaggtccttgtgttgttactcaagtgaaaactgtagaaaaggacggttatgaagctgttcagctgggcttccaggacaagaaggagaagcacactacaaagcctttgatgggccactttaagaaagctggagtaactcccaagaaacacttggctgagttcaaagaatttgaaacagagttgaatctgggtgacactgttaccgtagaactgttcaatgacgcaacttttgttgacgttgtaggtacttctaagggtaaaggtttccagggtgtagtaaaacgccatggttttggtggtgtaggccagactactcacggtcagcacaaccgcgctcgtaagccgggttctatcggtgcttgttcttaccctgcaaaagtattcaaaggaatgcgcatgggcggacagcttggtggcgacagagtaactgttcaaaacctgcaggtattaaaggtaatcgcggagcacaatcttcttttgattaagggatctgttcctggttgcaaaggttcaatcgtaataattgagaaataatggaagttaacgtatataacattaaaggtgaagacactgggagaaagattacgttaaacgagtctatcttcggaattgagcccaacgaccacgctatctacttggatgttaaacagtttatggctaaccagcgtcagggtacacacaagtcaaaggaaagaagcgaaatcagtggttctactcgtaaaatcggtcgccagaaaggtggtggtggtgcacgtcgtggtgacatgaactcaccggtacttgttggtggtggacgcgtattcggtccgaaaccgagagattactacttcaaattaaacaaaaaagtaaaggctctggctcgtaagtcagctttgtcatacaaggctcagaacaacgctgttgtagtagtagaagacttctcttttgaagctccgaagactaaagattttgttgcaatgacaaaaaatcttaaagtttctgacaaaaagctgcttgtgattttaccagaagcaaataaaaacgtatatttgtcggctcgtaatgtgaagggtgctaatgtgcagactatctcagggttaaatacttacagagtattggacgctggggtcgttgtgtttgctgaaagtgcactttctgctatcgacaatatcttaatgtaaaaaggaggcttaaataatgggaattattattaaaccgttagtgacagagaagatgactgcaattactgataagacgaataatcgtttcggctttatcgtgcgtcctgaagctaataaactggaaattaagaaggaagttgaagccctttacaacgttacagtagttgatgtgaatacaatgaagtatgctggcaaaaacaagagccgctatactcgtgccggtatcatcaacggacgtacgaatgcgttcaagaaggctatcgttacgttgaaagaaggagatactattgatttttatagcaatatttaataaaaatggcagtacgtaaatttaagcccacaacaccggggcaaagacataaaattattggtacttacgaagagattactgcacgggtaccagaaaagtctcttgtatttggtaagaaatcttcaggtggtcgtaacaacgaaggtaagatgactatgcgctacatcggtggcggtagtaagaagattattcgtatcgtagatttcaagagaaataaagacggtgtgcctgcagtggttaaaacaattgaatacgatccgaatcgttcggctcgtatcgctttgttgttttatgcagatggagaaaaaagatatattattgctcccaatggattgcaagttggtacgactttgatgtcaggtgagactgccgctccggaaatcggaaacgcacttccgcttcagaatattccggtcggtactgtaattcacaacatcgaattacgtccgggacaaggcgctgccttggttcgctcggctggtaacttcgctcagttgacttctagagaaggtaagtactgcgttatcaagttgccttcaggtgaggttcgtcagatcctcagtacttgtaaggctactattggtagtgtaggtaactcagatcatggattggaaagttcaggtaaagctggacgttctcgttggttaggacgtcgtccgcgtaaccgtggtgttgttatgaacccggttgatcacccgatgggtggtggtgaaggacgtgcttcaggaggacacccgagatctcgtaagggattgtacgctaagggtcttaagacaagagctccgaagaaacaatcgtctaagtatattattgagagaagaaagaagtaatctgattaattgagtaaattatgagtcgttcattaaaaaaaggtccgtatattaacgttaagcttgagaagaaagtgcttgccatgaatgaatcgggcaagaaagtggtagttaagacctgggccagagcttcaatgatttcgcctgatttcgtaggccatactgttgcagttcacaacggaaataaatttattcctgtttatgttaccgaaaatatggtaggacacaagttgggcgaatttgctccaactcgtactttcagaggacacgctggtaacaagaaaaaataaaacaggatttatctgaaataataaagtaataatataatgggagcaagaaaaaaaatatcggctgaaaaaagaaaagaagcccttaagaccatgtattttgcgaaattgcaaaatgttcctacttccccccgtaaaatgcgtctcgtggctgacatgattcgcgggatggaggtgaacagagcactcggcgttttgaagttctcttcaaaagaggctgccgcaagagtggaaaagttgctgcgctctgcaattgctaactgggagcagaaaaacgaacgtaaagctgaaagtggcgagctgttcgtaaccaagatttttgttgatggtggtgctacactcaaaagaatgagaccggctccgcagggtagaggttacagaattcgtaaacgttcaaaccacgtaacgttgttcgttggttctaaaagtaataacgaagatcaaaattaaggtaaatgggacaaaaagttaatccaataagcaaccgtttaggaattatcagaggatgggattccaattggtatggtggaaagaattacggcgattctctgctggaagatagcaagattcgtaaatatttgaacgctcgtctggcaaaggctagtgtgtcaagaattgtaattgaacgtacactgaaactcgtgactattaccgtttgtactgcacgtccgggtatcattatcggcaaaggtggccaagaagttgacaagttgaaagaggagttgaagaaggttactgataaggatattcagattaatatcttcgaagttaagagaccagagttggatgctgttatcgtggctaacaacattgcccgtcaggttgaaggcaaaatagcctaccgtcgtgccatcaagatggctattgccaatacaatgcgtatgggtgcggaaggtatcaagattcagatttcaggacgtttgaatggtgcagaaatggcccgttctgaaatgtataaggaaggaagaactccgttgcacactttcagagcagatatcgactattgtcatgcagaagcattgactaaggttggtcttctcggcattaaagtttggatttgtagaggtgaagtttatggtaagaaggagttggctccgaactttacgcaaagcaaggaaagtggtcgtggaagcaatagcggaaacaatggcggaaagaacttcaaaagaaagaaaaataatcgctaacgaatttgatttttaggaattatgttacaaccgaaaaaaacaaaattcagaagacaacaaaaaggccgtcaaaagggtaatgcccaaagaggaaaccagttggctttcggatcttttggtattaaggccttggaaacgaaatggattacaggccgtcagattgaagctgcgcgtattgcagtgacaagatatatgcaacgtcaaggacagatttggattcgtattttccccgacaaacctatcaccagaaagcctgctgatgtgcgtatgggtaagggtaagggtgcgccggaaggattcgtagcgcctgttacaccgggtagaattattatcgaagccgaaggagtatcttatgaaatcgctaaagaagctttgcgcttggctgcacagaagcttcctatcacaactaagtttgtggttagacgtgattatgatattcaaaatcaaaatgcgtaagaagtatgaaaacagcagaaattaaagagatgcctaccagtgacttggtagaaagagttgaagcagaagtagctaattacaaccaagtgattttaaatcattctatttctcctttggataatcctgctcagatcaaacaattacgcaggactattgcgcgtatgaagactgaattacgccaaagagaacttaacaataaatgatgagcttgatggaagcaagaaatttaagaaaagaaagaactggggttgtgctgagcaacaagatggataagaccattacagtagcagctaagtttaaggagaaacaccccatatatggtaagttcgttagcaagacgaagaagtaccatgctcatgatgaaaagaatgagtgcaatatcggcgatactgtacacatcatggaaactcgtcctttgagcaagactaagagatggagattggtagaaataattgaaagagctaagtaattatgatacaagtagaatccagacttacagtatgtgataatagtggggcaaaagaggctctctgtatccgcgttttgggtggtacaggtcgtcgctatgcttcagtaggggacgtgattgtcgtttctgttaagagcgttatcccttcaagtgatattaaaaaaggtgcagtgtctaaagctttgatcgtacgtactaagaaagaaatccgtcgtgctgatggctcttacatacgttttgatgataatgcttgcgtgttgttgaacaatgcaggtgaaattagaggtagtcgtattttcggtccggtagctcgtgaacttcgtgctactaacatgaaagttgtgtcactcgctcctgaagtactttaatattgtaaaagatttgagtaatgagtaaattacatattaaaaaaggcgatacagtttatgtaaactccggtgaagacaagggtaagactggtcgtgtattgaaggttcttgttgataaaaaccgcgcaatcgttgaaggtatcaacatggtgtctaagagcacaaaaccgaatgctaagaacccgcaaggtggtattgtgaagcaagaagcttctatccacttgtcaaacttgaaccccgttgatccaaagactggcaaagcaacgcgtgttggtagaaaagtaagtgctgaaggcactttagtgcgttattctaaaaaatcaggagaggagattaagtaatgagtaatactgctagccttaagaaagaatatgcagagcgtattgcgcctgcattgaaatcacagttccagtattcttcttctatgcagatacccgtacttaagaagattgttatcaatcagggtctgggtatggctgttgccgacaagaagattattgaagtggcaattaatgaaatgactactatcactggccagaaagccgtggcaaccatttctcgtaaggatattgcaaactttaagttgcgtaagaaaatgccgattggcgttatggtaactctgcgtcgtgagagaatgtacgaattccttgaaaagttggttcgtgtagctctgcctcgtatccgcgacttcaagggtattgaaagtaagttcgatggtaagggtaactatacccttggtattcaggaacaaatcattttccctgaaattaatatcgatagtattactagaattctcggaatgaatattacctttgtaacctctgcgcaaacagatgaagaagggtatgccttgttgaaagaattcggtttaccgtttaaaaacgctaaaaaagattgataatatggcaaaggaatcaatgaaagcacgcgaagtaaagcgtgctaaattagtagccagatatgccgagaaaagagctgcgttgaagcaaatcgttagaaccggtgatcctgctgaagcttttgaagctgcacagaaattgcaggatttgcctaaaaattctaacccgattcgcatgcacaaccgttgcaagctgacaggtcgtcccaaaggatatatccgtcagtttggcatctccagaatccagttccgtgagatggcttctaacggtcttattcccggtgtaaagaaagcaagctggtaattattgtttttaaatattgtcagggtaggcctgattaatttaatttattttttatatgactgatccaatagcagattatttgacgaggttgcggaacgctattcaagcgaagcacagagttgtggaagttccggcttctaatttgaaaaaagaaatcactaagattctttttgaaaagggctacattcttaattataagtttgtagaagatggtcctcaaggtacaatcaaagttgccttgaagtatgatccggtaaacaaggttaacgcaatcaagaagctggagagaatctcttctccgggtttgcgtcaatataccggttataaagacatgccgcgtgttattaatggtttgggtattgctataatatctacttccaagggtgtaatgaccaacaaagaagccgctgaactgaagattggtggtgaagttttgtgttatgtatattaataggaggaattagcaatgtcaagaataggaaaattacccattagtattcccgctggagtaacagttactctgaaagatgacgtggttaccgttaagggacccaaaggcgaaatgagccaatatgtaaatcctgctatcaatgttaccatcgaagacggtcatgttgttttggctgagaatgaaaatgcaatgctggataaccccaagcaaaagcatgcattccatggattataccgttcattggtgcacaacatggttgttggtgtatcagaaggatataagaaagaattggaacttgtcggtgtaggttaccgtgcctctaaccagggaaatatcattgaactggctttaggttatactcacagtatctttatacagttgcctcctgaagttaaagttgagactaagtctgaaagaaacaagaatcctttgattatattggaatcttgcgacaagcagttacttggtcaagtttgctctaaaatacgttctttccgtaagcctgaaccgtataagggtaagggtattaagtttgttggcgaagaaattcgtagaaagtctggtaaatcagctggtgctaaataatcatttaaattgatattattatgacaacaaaaatagaaagacgaattaagatcaaatatagagtacgcaacaaaatttcaggtactactgaatgcccgcgtatgagtgtatttagaagtaacaagcaaatctatgttcagattatcgatgacttgtccggtaagacattggctgccgcttcttcgttgggtatgactgaaaaaatgccaaagaaggaacaagctgctaaagtaggtgaactgattgcgaaaaaagctcaggaagcaggtattactactgttgttttcgaccgtaatggttacttgtatcatgggagagtaaaagaggtggctgatgctgcccgtaacggtggacttaaattttaatcattatggcaggacttaataatagagttaagattacaaacgatatagagctgaaagacagattggttgctattaatcgtgtaaccaaagtaaccaaaggtggtagaacttttagtttctctgctattgtggtagtaggaaacgaagaaggcatcatcggttggggccttggtaaagctggtgaagtaaccgctgctattgccaaaggtgttgaatctgcaaagaaaaacctgacaagagtgcctgtactgaaaggtacagttcctcacgaacagtctgcaaagttcggtggcgctgaagtatttattaaaccggcttctcacggtaccggtgttgttgctggcggtgcaatgcgtgccgtattggaaagtgttggtgtaacagacgttttggctaagtcaaaaggttcttccaacccgcacaacttggtaaaggctactatcttggcattgagtgaaatgcgcgatgctcgtatggttgcccagaacagaggagttagtatggaaaaagtatttagaggataaggaggaagaatatgtcgactataaagattaaacaagttaaaagtagaattggtgctcctgctgatcagaagagaactctcgatgcactgggacttcataagttgaatcgtgtggttgaacacgaatgcactccttcaattcttggaatggtggataaggttaaacacttggttaccattgttaagtaattatttgttgaatataaaacgaattacaatatgaacttaagtaatttaaaacctgcagagggatctactaaaacaagaaagagaattggacgtggtccgggttctggcttgggaggtacttctactagaggtcataaaggagctaaatcaagatctggatactctaagaaaatcggttttgaaggtggtcagatgcctcttcaacgtcgtgtacctaagtttggctttaaaaatatcaatcgtgtagagtataaggctatcaacttggatacaattcagaaattggctgaagcaaagaacttgcagactgtaggtatcagtgacttcattgctgctggtttcatttctgcaagccagttggtaaaagtattaggtaacggaactttgactgctaagttggatgtacaagcacatgcattttctaagactgctgttgctgccatcgaagctgctggtggacaagtagtaaaactctaattcaatgagaaaagctattgaaacattaaagaatatatggaaaattgaggatctgagacaacggatcctcattaccatattgtttgtggcaatctaccgttttggttcgtatgtcgttttgccgggtatcaatccgtcaatgctgacacaattgcatcaacagacaagcgaaggtcttttagccttgttaaatatgttttccggaggagcattttccaatgcctctatttttgcattgggtatcatgccgtacatctctgcctccattgtgattcagttgctgggtattgcggttccgtatttccagaaattgcagcgcgaaggtgagagtggtagaagaaaaatgaatcaatatactcgttatctgacgattcttattcttttggttcaggctccttcttatttgctcaatcttaagatgcaggctggtccttctttaaatgcttcattagattggactctgtttatgtttacttctaccattattttagcggctggaagtatgtttattttgtggcttggtgagagaattacggataagggtatcggtaatggtatttcgctgattatcatgattggtatcatcgcccgtctgccacagtccttattccaggaattgatttcccgtatgacggacaagactggtggtctggtaatgttcttgattgagcttgttgttctgctggttgttattgcattcgctattcttttggtgcagggaactagaaagattcctgtacaatatgcgaagaagatcgtgggtaacaagcaatatggcggtgctagacagtatattcctttgaaggtgaatgctgctaacgtgatgcctatcatttttgctcaggctatcatgtttattcctatcactcttgttgggttctcaaatgtaaatgatgcaagtggtttcgtacgtgcattgactgatcatacaagcttttggtataatttgatttttgcagtgttgattatattgtttacgtatttctatactgcaattactattaacccgactcagatggctgaagatatgaagagaaacaatggttttattccgggtatcaagccaggaaagcaaactgctgagtatattgacgtgattatgtcgcgtattactttgcctggttctttcttcttggccttggttgccattatgcctgcgtttgccggtatattcggtgtgaaagctgagtttgctcaattctttggcggtacatctttgttaatccttgtgggtgtggtgcttgatactctccagcaggtagaaagtcatttgttgatgagacactatgacggtttgctgaaatccggacgtattaaaggccgcagtggtaatgtggctgcatattaatcttttttgaagaatgatatttcttaaaacagaagatgaaatagagctgctccgcaagagtaatttgcttgttggaaagacgttggctgagatagctaaggttataaagcccggagtgacaacaaaagagctggatagggtggcggaagagttcatcaaagacaatggtgctgttccaacctttaaaggttttcctaatcaatatggcgatccgtttccagcttctatttgcacatctgtaaatgaccaggtggtacatggtattccgggagatgatgtggtactgaaagatggtgatatcgtgtctgttgattgtggtacttacatgaatggcttttgtggcgactcagcctatacgttttgtgtaggtgaagttgacgaagaagtccgcaaattactgaaggttactaaagaagcattgtacatagggatacagaatgccgttcacggcaggcggttgggtgatatcggttatgcgatacagcagcactgcgaatctaattcttatggtgtggtgcgtgagtttgtgggtcacggaataggcaaggaaatgcatgaagatcctcaggttcccaattacggaaagcgtggttatgggacaatgctgaagaaaggcttgtgcattgccattgaaccgatgataactttaggtaaccgacaaatactcatggagcgtgatggctggacggtgaggacaaaagaccgcaagtgtgcagctcattttgaacatacgatagcagtcggcactggtgaagctgatatattgtcatcattcgagttcattgaagaagtattaggagataaagcaatttaagaaattaatatggcaaagcaatctgcaatagaacaagatggagttatagttgaagcattgtctaatgcaatgtttcgtgttgaattagaaaacggacatgagattactgcacatatttccggtaagatgcggatgcattacatcaaaatcctgccaggggataaagtaagagtcgaaatgtctccttacgatttatcgaaaggaagaattgtatttagatataaataaaattaagatatgaaagtaagagcatccttaaagaaacgtacgccagagtgtaagatcgttagacgtaatggccgtttgtatgttattaacaagaaaaatcctaagtataaacaacgtcaaggataatattattatttttgcaaaaaaaataatttagtatatggctataagaatagttggtgtcgatttgcctcaaaacaagagaggtgaagttgcgttgacctatgtatatggtataggtcgtagtagttcagcaaaaattttggataaagcaggtgttgacagagacctgaaagtaaaagactggacggatgatcaggctgccaagattcgtgagatcattggtgcagagtataaggttgaaggtgatcttcgttctgaagttcaattgaacattaagcgtttaatggatatcggttgctatcgtggtgttcgtcatcgtattggtcttccagtaagaggtcagagcacaaagaacaatgcccgtactcgtaagggtagaaagaaaaccgttgctaataagaaaaaagctactaaataataattgttgatatggcaaaaaaaacagttgcagcaaaaaagagaaatgtgaaggttgatgctaatggacagttgcatgttcattcatcttttaacaacattattgtttctctggcaaacagcgaaggtcagatcatttcttggtcttctgccggaaagatgggttttagaggttcaaagaagaacactccctacgcagcacagatggctgctcaagattgtgctaagatagcatacgatcttggcttgagaaaggtaaaagcatatgtgaagggcccgggtaacggacgtgagtctgctattagaactatccacggtgcaggtatcgaggttactgaaatcattgacgtaactccgcttccgcacaacggttgtcgtcctccgaaaagacgtagagtttaaaatttacctttaatagaagtgagacttgattttgttattggattgtaaactttctctctgcaatcgcggctgcaacaaacccaagttcatgaataaacaattaaatatttaaaagaaatggctagatatactggaccaaaatcaagaatagcccgtaaattcggtgaaggtatctttggagcagataaagtattgtcaaagaagaactatcctcccggacagcacggtaattccagaaagagaaagacttctgaatacggtgttcaacttcgtgagaaacagaaagccaaatatacttatggcgttttggaaaaacaattccgcaacttgtttgagaaggctgagactgctaaaggtattactggtgaaatccttctccaattgttggaaggtcgccttgacaatatcgtattccgtttgggtattgctcctactcgcgcagctgctcgtcagttggtgagccacaagcacattactgtagacggtgaggttgtgaatattccttcttatgcagtgaaaccgggtcaggtgatcggtgttcgtgaaagatccaaatcattggaagttatcgctaattcactggctggctttaaccatagcaaatatccttggttggaatgggatgataactctaaggtaggcaaattgctgcatgtacctgaaagagcagacattcctgaaaacattaaagagcatttgatcgtagaattgtattctaaataataattaatttcatggcgatattagcatttcaaaaacctgataaagtattaatgttggaagcggactctagattcggaaaattcgaatttcgtccgttggagcccggtttcggtattaccgtgggtaatgcactgcgccgcatcctgctttcttcattggaaggttttgctatcactactatcaagatagacggtgttgagcatgaattttccagtgttccgggggcaaaagaggatgttactaacattatcttgaatctgaaacaagtgagattcaagcaagtagttgaagaattcgagagtgagaaagtaagtattacagtcgagaattcaagtgaatttaaagcaggtgacataggtaagtatttgactggatttgaagtgttaaatcctgaattagttatttgtcatttagattcaaagtcgactatgcagatagatattacgatcaacaaaggtcgtggttatgttcctgctgacgaaaaccgcgaatattgcaccgatgtgaacgtaattcctatcgattctatttatactccgatacgtaatgtgaagtatcaggtagagaacttccgtgtagagcagaagaccgactacgagaaactggtacttgagattactaccgacggttccattcatccgaaagaagccctgaaagaagctgcaaagattctgatttatcacttcatgcttttctctgacgagaagatcacgctggaaacaaatgatgttgacggcaatgaagagtttgatgaagaagtattgcacatgcgtcagttgctgaagaccaagctcgttgatatggatctctctgtacgtgccctcaactgtctgaaggctgcagatgtagagactcttggtgacttggtacaattcaacaagacggatttgctgaaattcagaaacttcggaaagaaatcgcttaccgagcttgatgatttgctggaaagtctgaatctgtcgtttggaactgatatttctaaatataaattagataaagaataaaaaatgagacataataagaaattcaaccatttgggtcgtactgcctctcatagaaacgctatgttggctaatatggcgtgttctttgattaagcacaaaagaatcactacgaccgttgcaaaggctaaagctttgaagaagtttgttgagcctttgattacaaaggctaaagacgatacgactaattcccgtcgtgttgtatttagcaatttgcaagacaagtatgctgtaactgaattgtttaaagaaatctctgtgaagattgctgatcgtccgggtggttacactcgtattatcaagactggtaaccgtttgggtgacaacgctgaaatgtgcttcattgaactcgttgactacaacgaaaacatggctaaggaaaaggttgccaagaaggctactcgtacccgccgttcaaagaaagctgctgctactgaagctactcctgctgcagaaactgctgcaccagttgcagaagctcctgctgctgaggaagctaaagctgaataattcaactattctttttatatatagaagccgttccaatttgtttggagcggctttttatttcctataaatcatccaagaaacattaaaagatgtgtgcattaaacaaattcctgaaagaaactgttatatttgcacatagatatggctaaattcttaagattcataggattcatggtgcttgcattggctttatggcagactgtaagcgatacatttgccaataaagcggcgagtggtgggaatgttgtgagtgagaatactattgccgtacatgagcagactgatgcctatattgcgatgcctcaattgccttatctgccggatgcagagctggcgggcatgggtggacaattacattcgctgacgtactcccgtatacagcgtatttctaccacggaatatatattttctttaaaggactggattgacaaactggcccagcgagcggctgttttgtctctgcatcgtgagaaactctatgatgccactgcctattatcgttgccagccggtgtgcgaatattacattttcacactaaggcgtattctcatttagtgttttattgaattttcctttttcccttgtgtatggtcagactatgtgtttttgcagggaaatactgtattttctatttctaataaattcattaaaacatattataattatggcaactcaaactattgacgcaactctttttgcgtcttcacatcccgatattgtaaagcgtaccagtgtttcaggacttatcttttcagtagctatgctgctggtcggtgtttttatttttgcatccatttttgagatgagtgataaatcttccactctcagcatggctttgatggtgctgggtacggcattcgtcttgcttggcgtgttccgtctgttttggaaatcgaaggaagtggtctatttgccgacgggcagtgtgaccaaggaacgcagtgttttcttcgatttgaaatatttgggcaaacttacagatatgattgagaatgaacagctgaatggcgagactgaaataaaaagtagcggcagtggaaatgtgcgcatggatgtcatgatttcgcaggacaataaatttgcggctgtacagttgtatcagtttgtgccttacacgtatactccggtaacttccgtacgctattatacgggtagcgatgcggttgcagtatctactttcctggagaaatgtaaaacagcataatcagtcaaagagttagacttgactttaactgtggtggggattagtcggcaacggcaatccccatttttttcatcaggaagcaggcgttcatattctgggcgatgcctgggcgcaagcggtaggagaaggtcagttcattgtctgtaatgtctgcttcgaagcgatagttgcggatgtcatcggggaagaggtcgatgagtgttcccagcagcaggtcgtgggtggcaatgatgccattggcctgcaaagtcatgaattgcttgataagggcaaaggagcctttctgcttgtccatggagttggtacctttcagaatttcgtcgaggatgatgaaaagctcctcaccagcctgcagcttgtctatgatgagtttcagacgtttgagttcggcaaagaagtaggactcgttgtcgttcagtgaatccgaggtacgcaggctagtgatgagccgggccgggcatatttccatttggcgggcacagacgggggcgccgatgcaggcaaggaggtaattgatgcccaccgtacgcagataggtgcttttccctgccatgttggcgccggtgacgatgatgaaaaacggtcgtttcaccatgtcgatgtcattgcggacacagcggtcacggttcatcagcggatggcccagggcttcggcacggagacggaaggaggaaggggcattgatgggtgcttccgtttcagaattgctttcttcttctttatttaggtttccttttccctttctttccgcttgaactatctttgggtaaatatagtccggatgattataggcaaatgttgccagtgagttgagcgcatccatttgtccgatggcatcgagccacccgggcagttcagcggcatattgctctttccaggcttcaatgcgcatgatttgacgcagttcccagaagaagaggccgttcagaatgacgtacataaagacattgttgcgttggtcgagttcatccatgagcttgttcagcctgctgatggagtgggaggcttttcgtttttctccgtcaatctgttgtcttatctctttgagcagggtggcttgtgcaggctgcttttccatgaggtggagcagggcggcgtaggtggagagaatttgcagttttttgccatagatggcctgcatcttggtgactttgccagtgaagccgaagccggcgatgacgaagcaggtccagatgatgccgtagatacttgcggacagaattcctgccatgacgagtgcgaggcagatgaggttggctcccgtcaccagtaccggcaggaggcgcagtaatttccggctccggaagatgctcggactttccgcccattggcacagttctgtttcatcggcggcttttcctttgtacagcaggccgaggatacggaagcgctgacggaatttcagttccggagccagttcactgacggcttcttgtcggcggatgatttcttcctttctctcgagatgcttccccagccagtgggcgaggcggtgtttcccgggctgtgtgcaggtacggttgatgtactggaaaagggaatgcggaccgaaaacatccaaatcataggtgtagagatgggtggggtcgatgtatgcttcgccgtcatcgaaagaagacgtatcgtaatccagagcggcgagttcctgctcgttgatttccatcttcttttccagatagtccttgcgatggaacagccggttgtggtatttcattaaaaataggaacggcagtagggtgatgagggcaatgcaggccagtataccccagctctcgctccagaaatagataattcctactactcctgccacaaacagcagcaggcgcaggctgccgatgcggtaaatcttctgttgtactttattcagttcttgtcttgcctcttctgccgtgttgcggtagacggcgctgattttatctatcgtatttatttgctccatacatgttaagtttaaggcaaagatatacatttccaattgttttttccgcgattttttgtctacttccgataaaaaatgtacctttcgctcactaaaacaaagtttcagaaaagaggaggttgggatatgaagaagagttggttgttaggcgttctgatgttgctggcggttttgccggtggcggcgcaacaggtgatgtattccaatctgaaagagttggtggagaaccgtggcgatacggttaccacactgaagattgagaagcgtacaaagaaccagatttacctcatgggcggtgccgattatcgtattacggtagacgacaatcccggtctttgccgttatttgaagtcccgttgttatgctgtacgggtagatacctcgctttatgtcaattgccgtaagatgcgctataagcgttatcgcttcgggcagtggtatgcacctgccatgtggctcggtggaaaggtttacttctgtgcacagcctgtgggacaagcagccaccagtaccatgactcccgatgatgccacacgattgggcggtgaagtgggagacgccatcaatgcttcgggactggtgcatgcccgcgtctattacgaactgaatcccgaaaccggaaagtccgagttcgtgggacgtgagcgaatgatgcaattgcttgccggatacccgacactgcacgccgaattcgagaaagaaacaagcgagtcggcagaggtcatcggcaagtatctgcgtgcactccgtccattaatcactaatcattaatcattaataagatgatattattgcaagacgtgcccgatgggtacgaatactgctttgcgggtaacggaaagtgccccaaagcctcttcctgcctgcgggcgatagcggcacaactgttgtccgagagtgaagccccccaaccacagtccgttcgtgcggtgaatcctttttatgtcagcagcttgtccgggtcctccacttgtgcccgttaccgctccagcgagcagctgcattatgcccgcggtatgacacgccttttcgacgaagtacccaccaagctgcttttcaccgtgcgccatcgcgtgatgggatgcttctcttgcgaacgctattactatcattgccgcaagggcgagcgccctatctctcccgaagaacagcagcggatagcccgggtattcaatgcggtaggcataggcaccaagcctaagttcgaccactacgagtatgcggtagcttggtgaccggctgcaaagtcactgcacaccttttgcagcgtcactgcaaacccgttgcagtcgcgctgcaaagcagttgcagtatcactgcaaataggtatgcagtgatgctgcaaacggtatgcagtggcactgcaaaatgcatgcactcactttgcagtgagaagtcgctgttgttcacgttgttacagtatgaatacaatgaggccttatctccctcttttcggcctgctgtttacagattgcagaagaaggatacgaataccggtacactcatatcaattaatattccgtggaatatagcgataggaatcacgtcctttccggaatattgggtgatggagggtagaagtacatccatcgaattgacccctgccgccgatataggtgccagtttgccgaaatatttccggatgagcggtgcacccagcaaagccatcatttcacggaagatattggcaagcagggcgatggtgcccagctccgtggcgagttgcaggcctatggaaggttccttgaattgcgtaatcagaatggaggaaagcgaataataagcaaatccgctacccaccgccatgcagtcgaacacactccattggctcaacagcagactggcgaaggcggagaacaacagcgttcccacaatggtggccatcggcaccaaaagcattttgggccgcaggctcttgaccagctccttcagtttcttgttgctcccgatgccgatgcccacctggaacatcaatgcatagagcacatacatggataagtcgtgcaggtcgaactgaaaatcattggctactcccatcaggcagccggcacagaaaaatgcaacaaccgtcaaacttcccttcatctcttctctcctttcttgaaaaataggtgaaacaccatcagtgaggccagcatgctgcccgtaatgctcagtgaggccagtacggcggcctgccacccgaatcttcccaggttgtcaacaatcagacggttggaaccgatggatacaccgagtacaaagagtagcagtaagatggtgagcgaggcgcttttctccactttttgcaacatttgtacgttacgcatcaggtatccgataccgattcctataaacatgatggatataattgtaaacataagttttcttcttttttgggtgaatacataggttagtccggtttcttcgaacggaaactccatacgcggcatttccccttccttttctcggtaagggaagtgcaaaatagtaagatgtaaattgcagggtagttaaatgaatccgctgaaccaatgtacgtgcactatgaaatggccgcataaggtcttgttgccccatgtagcattgcgcgtattgtatgttgtagttaagtactggttcatatcgtttttgaatttcggtgcaaaggtaatgctagtttgaataatttccaaataaatattcataaattgttttgcgaaaaaaagactcttcagtgcgtggccccccccgtaaaaacattatttttgcaagagaatagaggaaatacaagagctcctttgtttagaaatatagttttaaaaagagaagagatatgaaaagattgagagatttaactgctgttcttggcatggttgctttaactgcttgcaacaacgcctccattgaaggctcctgggtggagccggttccgggaatgcccggcatgcagcaaggtttcgttcttgatggggacggaagcgcttcttccattaacatggccaccttgaaatatgaggcatggaaaaaagtaggaaaccggttgttgctttcaggtaccagcatcggcaatcaccagaatatttctttcacggatacgctgacaatagaaaaactgacgcaggacagcttgattatcaaaagaggagagttgctcttgaaatatgccaggaacaatgaagttctgaatcaaaaaacaatacctgctgcggtgcttacccctgccaagaaacttctgtcggtaagaggcgagctggtcgtcggccatgaggtgcgttccttcaaagccgaaggagattctgccgattattggattgtggatgagaccggagaactcatgcaaaaatatgatgatatgacgaaaggagttaaaaacggaaaaccggtatacgtagagttggaagtaatcgatatgggcaaagccgatgacggatttgccgccgattatgaaggtgtctatcagataatgaaaatcaataaaatggctttaaagtaaaattcttctttgttggtttctgactaaaagataaataatcccggcgttccattgcgaatgtcgggatttatttctatattgcggcaaatataacctttgtgggctgacactttgtaaatccttaatctttataggacatggagataaccttaagtaaaacattgccttcctatccttcctttgtcgagggtatccggcgggcacccgaccgtggctacacccttacccctgcgcagacggctacggcattgaagaacgctttgcgctacatccccaaagagctgcacgaaaccctcgctccggagttcatggaagaactgcgtacacgtggacgtatctatggctaccgctaccgcccgcagggcgacctcaaagcgaaacccatcgacgagtacaaagggaactgtattgaaggcaaggccttccaggtgatgattgacaataatctttgtttcgacatcgccctttatccgtatgaattagttacctatggtgagacgggacaggtctgtcagaactggatgcaataccggctcatcaagcagtacctcgaagtgttgacgcgcgagcagacactggttatcgaaagcgggcatccgttgggactgttcaaatccaagcccgaggcgccccgtgtcatcattaccaatgcgctgatggtggggctctatgataatcagaaggactggcacaccgctatgcagatgggtgttgccaactacggccagatgactgccggcggctggatgtacatcggtccgcagggcatcgtgcacggcacgttcaacacgttgctgaatgcaggccgtctgaaactgggcattccgcaggacggcgatttgcgcggacgcttgtttgtttcttccggtctgggaggcatgagcggtgcgcagcccaaagctgccgagatggcaggggcggcggcaatcatagccgaggtggatgcttcccgcatcgaaacccgccatacccagggctgggtgggacacgttacagattctctggaagaagccttctcgctggctcgacaagctatggacgagtgtcgcccggtttctgtggcctatcacggcaatgtcgtcgatttgctggaatatgcggtgcagaagcagttgcacatagatttactttccgaccagacttcctgccatgccacctatgagggcggttactgtcctgccggactgacgtttgagcagcgtacccatatgctgcacgagaatccgtcgaaattccggtgtctggtggatgcttccttggagcgtcatttcaaggctataaaaaggctggtggaacacggcacgtacttcttcgattatgggaactccttcatgaaagccgtctacgatgccggcgtgagcgaaattgctcgtgacggagatgataagaacggcttcatctttcccagctatgtggaagacataatgggaccggaactgtttgattatggttatggtccgttccgctgggtgtgcctcagtggaagacatgaagacttggtgaagaccgaccgtgcggcgatggaatgtatcgaccctacacgtcgcgggcaagatttggataactataattggattcgtgatgcggagaaaaacaacttggtggtaggcacgcaggctcgtattctttatcaggatgccgtgggacgtatgaatatagctttgcgcttcaatgaaatggtgcgtaagggagaggtcggccccattatgttgggacgcgaccatcacgatgtcagcggtacagactctccattccgtgaaacatccaatatcaaggacggcagtaatgtcatggcagatatggcggtgcagtgttttgccggaaactgtgcgcgtggcatgagcttggtggccttgcacaatggaggtggcgtaggtatcggaaaagccatcaacggcggtttcggcatggtgtgcgacggcagtgagcgggtagacgaaatcctgcgttccgctatgttgtgggatgtgatgggtggtgtggcccgccgttcgtgggcacgcaatccgcatgccatggagacgagcgaggagtttaaccgtacgcatgcagacggctatcatatcacgatgccgtatgtggctgatgagaagttggtgcagaaagtggtgaaggagtaagtaaagtgatgatttcattttttagacgcggataacgcggattttttctttcaaaagaatcccgacgtctctgtattccgataaaaagaattcgcgtcatctgcgtctgaaaaatcagagtatatatatttttttttaaagagcattatgaataagattatggaatgcgtccccaatttcagcgaagggcgcgatttgcagaagatagataagatagtagctccttttcggggcaaacaaggtgtgaaactgttggattacagtaacgatgaagaccacaaccgccttgtggtgaccgtagtgggcgagccggaaccgcttcgtgatgctgtgctcgaagctatcggcgtggcggtagagctgatagacctcaatcaccatcagggacagcatcctcgtatgggtgctgtagatgtagtaccttttatccccatccggaatgtgacgatggaagaagccgttgccctctcgaaagaagtgggcaaggaggttgcaaaacgttacaatcttcccgtcttcttatatgaaaagtctgcttctgcccctcatcgggagaatttggctgctgtccgtaaaggggagttcgaaggtatggccgagaagataaagcaaccggaatggcatcccgacttcggactggccgaacgtcatcccaccgcaggcacagtggctatcggtgcccgcatgcctttggtggcctataacatcaacctcaatacccccagtctggagatagcccatgacatcgctaagaaaatccgtttcatcggcggaggactgcgttattgcaaggcaatgggagtggagttgaaggaccgcggcatcacgcaggtatccatcaacatgacggactatacccgcaccgccctctaccgtgctttcgaactggtgcgtgtggaagcccgccgctacggcgtcagtattgtgggcagtgagattatcggtctggtgccgatggaggccttgatagatacagcgtcctactatctgggattggagaacttctccatggagcaagtcttagaagcacgaatgtaaccgaattaaatagtactaacttaattcccctccctacgggggaggggttaggagagaggctttatgacagaaaaccttattatattcaatacccgtgtagtgacccccctcggcttttctgcccgttgcggcaaggagatggagcaactgagcatcatcgacaatgctacggtggaagtgaccgatggcatcatcacctacgtcggacctaaccgtggagaggagcgtgacggctattatcagcactactggcattacaatgcccgcggcaagtgtctgctacccggctttgtggactcacacacacattttgtgtttggtggcgagcgtgccgaggagttctcctggcgtttgaagggagagagttacatgtccatcatggaacgtggaggaggcatcgtgagtacggtgaaagctacccgtgcatgcaatttcatccagctgcgcagcaaggcggagggctttctgaagcagatgagtgctatgggagtgactaccgtagagggaaagagcggctacggtctggacaaggaaaccgagctcctgcagcttcgggtgatgcgtagccttaataatgacgagcacaagcgtgtagacgttgtctccacttttctcggtgcacatgctgtgcctgcagaatacaacggacagacggacgagtacgtggactacattatccgcgaagtgatgcccgtagtggttcataataatttggcagagttctgcgatgtcttctgtgagcagggcgttttctccatcgagcagtcccgtcgccttttgctggcagccaaggaaatgggacttgccttgaaactccatgccgacgagattgtaccattagggggtgccggactggctgctgaactttctgccgtctctgccgaccatctgctgcatgcttcggatgcggacatccacgccatggccgacaagggagttgtggcgacccttcttccgctgacagcctttactttgaaagaaccctatgctcgtggacgcgaaatgattgatgccggttgtgccgtggcccttgccaccgacctcaatccgggcagttgtttctccggctccatccccctgacatttgccttggcgtgcatttatatgaaaatgagtattgaagaggccatcactgccctgaccttgaacggtgccgccgccttgaaccgcgcggatagcatcggcagcatcgaggtgggcaagaaaggagacttcgtagtgctcaatacggataattatcactttctaccttattatgtaggtatgaattgtgtcaataccaccataaaggggggagtgctttatcctgtactttaagaagtgctgatatcccctcttaatccttaatctttaatatttaatatcatgttagttgatttgacagtaaaggaatttttgaataaagtggcgggtagcgatcccgtccccggtggcggtagtattgccgctttgaacggtgctattgcttctgctcttgccgctatggttgctaacctcaccatcggtaagaaaggttatgaacttcacgaagagctgatgcgccatatctccggagttgccttgcagcaaaaggaggcttttgtagcagatatagaccgcgactctgaagcctacgacaaggtgtttgcctgcttcaagatgccgaaagctacggatgaggaaaaggcggcgcgcagcgctgccatccaggaggctaccaagtttgccgcccttgttcccatgcaggtggcacgcaatgcgtatgagctgatgacggtcatcatggatgtagcccgcctgggcaaccgcaatgccgttacggatgcttgtgtggccatgatgtctgcccgttcggctgtgctgggcgcactgatgaatgtacgcatcaacctgggttcgctgaaggacaaggagtttgtgtccaagctccaaagtgaagccgacgaattggaacgcctggcttgtgcgaaagaaaaggaattgttggacgaaatcaatcaagagctgaaagtatgaacaatgtctattatgtaggttccggtgagttgaccttcgacctcatcgaacgtatcatcaatgaaaacctgaaactggagctggctccggaagccaagctgcggatacagaagtgccgcgattatctggacaagaagattgcggagtcggaagaacccttgtatggcattactaccggtttcggttcgttgtgcagtaagagcatttcgtcggacgagctgggcaccttgcaggaaaatctcatcaagagccatgcttgcagtgtgggcgaggagatacgcccggtcatcatcaaactgatgatgttgctcaaggcgcatgccctctctttggggcatagcggtgtgcaggtcatcaccgtgcagcgcatcctagatttcttcaataacgacgtgatgcctatcgtttatgaccgtggctcactgggcgcctccggcgacctggctcctctggccaacctcttcttgccgcttatcggtgtgggcgatgtctattataaaggaaagaagcgcgaggctatcagtgtgctcgatgagttcggttgggaaccggtgaagctgatgagtaaagagggattggcattactcaacggtacccagtttatgagtgccaacggtgtctttgcccttctcaaagccttccgtctctccaagaaagccgacttgattgccgccctttctctggaagctttcgacgggcgtatagacccgtttatgaactgtatccagcagatccgtccacacaagggccagatagaaacgggtgccaacttccgcaaactattggaaggcagcgaactgatagcccgtcccaagcagcatgtacaagacccttattcgttccgttgcatccctcaggtgcatggggccacgaaagacgccatccgttacgtggcttccgtcctgctgacggaaatcaattctgtgacggacaatcccaccatcttccccgatgaggaccgtatcatctcgggcggtaacttccacggccagccgcttgccatttcctacgactttctcggcattgccctggcagagttgggcaatatatccgagcggcgcatcgcccagcttatcatggggctgcgtggacttccggaattccttgtggccaatcccggtctgaactccggtttcatgattccgcaatatgctgccgcgtctatggtaagccagaataagatgtactgctatgccgccagcagcgactccatcgtttcctccaacgggcaggaagaccatgtcagcatgggtgccaatgcagctactaagctttatcgcattatggacaatctggagcatatccttgccatcgaactgatgaatgccgctcaaggcatcgacttccgccgtccggcaaagacttctcccgttctggagcgtttcctgcatgaatatcgcaaggaagtcccttttgtgaaggaagacatcgtgatgtataaggaaatccataagacagtcgctttcctcaaccggacaaagtttgattattaggaacttcccaataaatctgccagaaacataataattattaatctgttaacaataagaaaggaaacttaattggcgaattgagttttctttctatatttgtcccgttttattccgataatgaataaaaatagttttagtttagaaagggaagaaaaatgggcgaacacacgaagcattcaacatcacgggtggaactgagggaacgtatcattctggccgccgtagaattatttacaacaaatggaataaaaagtatcacgatggatgagattgccgcatctttgggtatctctaagcgcactctctacgaagtttttccggacaaggaaaccttgttggaagaatgtatcctgaagtcccagaaggatggtgatatttttgtgaaaggagtaatagagacttccagtaacgtattggaagttttgttgagatgttatcagtggagcatagagcgttttcatgccacgaacaagaagttttttgaggatatcaagaaatatcccaaggcttatcagttgatgaagaacaatcggaaccggagctcggaagatacagtgaacttcttcaaagagggcgtgaagcaaggcatttttcgtgatgatgtgaatttcgccattatcaatctgctcgtgcgcgaccagctcgatttgctgatgaattcggacatctgcaatgagtattctttccttgaagtgtacgaatctatcatgttcactttcttgcgcggtatctctacggagaagggtgcccgtgtcctggaggactttatctgcgaatatcgcaagaatcaggtaaagccggatgaaacgaaggagtagttttaataaataatctatttttgatttatgaagatgcagagattttgggtaggaagagcactactgttggcagctgctgtgctgtatgccggcggctatgtgcgcgcacaagaggcaaaggataccctgaccctgacccttgaccgtgccttggagattgctttaagcgacaatcctaccataaaggtggcggaggaagaaattgctttgaagaaagtgactcacaaggagacctggcagaacttgcttccgcaggcaagcattgacggtacgtggaatcataccatcagtgcggcacagatgaatcttggcggacagtcgttcaagatgggtatggacaattcgaatacggtaagcggggtgctgaatatcagtttgcctatattcgcccctagcgtatataaggccatgtcgatgacgaagacagacattgaactggctgtggaaaagtcacgggcttctaagctggacttggtgaaccaggtaactaagggttactatcagctgatgctgacgcaagactcctacgatgtgttgcagaagagctataagctggcggaagacaactacaacattgtcaatgccaagtatcagcagggtgccgtcagtgagttcgataaaatcagtgccgaggtgcagatgcgcagcattaagccgaatgtgatttcggcgggtaatgccgtgacgttgtccaagttgcagttgaaggtactgatgggggtaacggccgatgtggatatagagattgccgacaatctcggcaactatgagacggagctgtttgccaatgaactgaatcagcccgctgccaatctgaacaataatacgacgatgaagcagttggacttgaaccggaagatgctcaatcagaacatcaagtcactccgtgccaacttcatgcctactttgggtatgaactattcttaccagtaccagtcactctacaacgaggattggaacatcctcgattataattggagcggaagttccgcactgatgtttacgctgagtattcctttgtataaggcaagcaatttcaccaagctcaagtccaaccgtattcagatacgtcagttggagcagaaccgtctggacacagagcgaaagctgaacatgcagattaccagctaccagaacaacatggctgccagttccgagcaggttgtcagcaaccgcgagaatgtgatgcaggcacagaaagctgtgcagattgccggtaaacgctatgaggtaggtaaaggtacggtgttggagctgaacacttcgcaagtgcagcttacggaggccgaactgacttataatcagtccatctatgattatctggttgcgaaggctgaccttgaccaagtgctgggaaaggattatattgcagagaactaagaatgaagaactaagaatgaagaatagaaataagaacaacgatatgaaaaaaggttttcaatggatggccctgctggttgttgccatgctgggggcatgtagcggaggtagtgataaagctgctgctgagaaggtggacgaaaagccgagggtgaaactggccgaggtgtcgttccgtcccgtggaacagattcaggaatacaccgctacggtggaagccgaagtaaaaaacaatattgctccctcttctccggtgcgtatagaccgcatttttgtggaggtgggcgaccgcgtgtcgaaaggccagaagctggtcagcatggatgctgccaatctgaagcagataaaatatcagttggacaaccagcagatagagttcaagcgtattgacgagttgtataaggtaggcggtgcctccaagtcggagtgggataccgccaagatgaatctcgacatccgtgagacttcctataagaatctcttggagaacacctcgttgctcagtcccattaacggggtggtgacggcacgcaattacgataacggagatatgtatagcggtggagaaccggtactggtagtggagcaaatcactccggtaaaactatacatcaacgtatccgaaggctactttaccaaagtgaagaagggcgctcccgtatccgtgaaagtagatgtttatggtgacgaggagttcgaaggcaaaatcagccttgtttatcctaccatcgacccggctacccgtactttcccggtagagatacagcttgtcaaccgtgatcagcgcgtacgtccgggaatgtttgcccgcgccacgctgaacttcggaacacaggaccacgtggttgttcccgacctggccattgtgaagcgtgccggttcaggcgaccgctatgtctatgtctacaaggacggcaaggtgtcttataataaggtagagcttggccgtcgtatggatacggagtatgagttgatttccggtgtagataacaactctcaagtcgtcatagccggacaatccaagcttgccgacggtgtagaagtagagatacaatgattaatgtttaataatcccccacattaatcattaaccattaatcattatacattattatcatgagtttatacgaaggagcggttaagaaaccgattatgacctcgctctgcttcctggcagtggctatatttggtctgttctctctgtcgaaattgccggtagacctttatccggacatcgagaccaacaccattatggtgatgacgacctatcagggtgccagtgcctcggacatcgagaataacgtgacccgtccattggaaaatgtgctgaattcggtcagcaacttgaagcatatcacttcccgttcgtcggagaatatttccgtgattacgctggagtttgagtatgggtatgacatagacgtgctgacgaacgacgtgcgtgataaactggacatggtgagctccatgctgcccgatgaggttgaaactcccatcatcttcaagttcagtacggacatgattcctatcctgctgctctccgtgcaggcggaggagagccagccggctctttacaaaatattggatgacaacgtggcgaatcccttggcgcgtgtgcccggtgtgggtacggtgtccatttcgggtgcccccaagcgtgaggtcaatgtatattgcgaccccaataaactggatgcctacaacctttctgtagaaactatcagctctattatcagtgccgaaaaccggaatacgccgggcggtacgtttgatgtgggtagcaatacctattcgctgcgtgtggaaggtgagttcaaggatcccaaagagatggagaacatcgtggtaggtacgcacaacggtgcttccgtctatctgcgcgatgtggcaaaagttgtggactctgtggaggaacgtgcacagaagacgtatagtaacggtgtgcagggcgccatgattgtggtgcagaaacaatcgggtgccaattctgtagctatttcgcagaaggtaattgatatgttgccacagttgcaaaagtcactgccgagcgatgtgaagctggggatcattgtcaatacttccgataacatcttgaatacgatagacagcttggaggaaaccattatgtacgctatgctgttcgttatcttggtggtgttcgtttttttggggcgttggcgtgccacggtcatcatctgtatcaccataccgatgtcactggttgcctcgttcatctatctgggtatcatcgacggcggttcactgaatatcatctcgctctcttgtctctctattgctattggtaacgtggtggacgacgccattgtggtactcgagaatgtaacgacccatattgaacggggttccgaaccgaagcaggcagcgatacatgccacgaacgaggtggccatctccgtaattgcatctacgctgactatgattgcggtattcttcccattgacgatggtaagtggtatgtccggtgtgttattccgtcagttgggatggatgatgtgtgtgattatgacggtttccacagtttcagccttgtcattcaccccgatgatgtgtgcgcagcttctgcgtttgcagaaaaagcagagtaagatgttccttacgctctatacgccgattcagcgtgcgctggacggtcttgacgtgtggtatcagaaccggttgaactgggctgtgcgccatcgtctgacggttatggcaggctgtgccgcattctttgtggcaagtctgttctgtgccaagtacatcggtaccgagttcttcccggcagcagacaatagccgcatcggtatcaaccttcagttgcccatcggggcccgtgtggagcgtgcggaagcattggcttcggaactgacaaacaagtggatgacgcgctacggagatatgatgaaagtttgcaactacactgtggggcaggcggactctgacaatacgtttgcttccatgcaggacaacggtagtcatatcattagtttcaatatcagtctggtgagtccgggagaccgtgacgtgacactggaaaccgtttgcgacgaaatgcgtgaggacttgaaggggtatcccgaattggacaaggcgcaggttattctgggcggtagcacaggcggcatgagcgcccaggcaagtgccgactttgaggtttatggttacgacttcaccgctacggacaaagtgtcagccgaactgaaagagaaattgttgcaggtgaaaggtgtgagtgaagtgaacatcagccgtcaggattatcagcccgaatatcaggtggactttgaccgtgagaagctggcattgcatggcttgaatctttctactgcctccaactatctgcgtaatcgtgtaaatggtgctttggcatcttattatcgcgaagatggtgacgagtacgacatccgtgtgcgttacgctcccgaattccgtacaaagattgaagatttggagaacatccttatttatacgccttccggtgagggtattcgcgtgaaagacctcggcaaagtagtcgagcgttctgctcctcctaccatcgaacgtaaagaccgtgagcgtattgttactgtatctgcggttatttcgggagcacctttgggcgatgtggtggccgatggtaatgctataattgataagatggacttaccaagtggtgcttctatccagatttcgggttcgtatgaggaccaacaggattcattctccgacttgggaacgctggctgtattgattgttattctcgtattcattgtgatggcagctcagtttgagtctttgagctatccgttcatcatcatgttttccattccatttgcattcagcggtgtgttgatggcattattctttacgggaaccaatttgaatgtgatgtcgcttttgggtggaatcatgttgattggtattgtggtgaagaacggtatcgtactcatcgactacatcacgctttgccgcgaacgtggtcaagcggtgcttcactctgtagtcacggcaggccgcagccgtttgcgtccggtattgatgactacgctgaccactatcctcggtatggtgccgatggctgtagggcagggtgaaggtgccgagatgtggcgtccgttgggtgttgccgtaattggcggtctgacggtatctaccattctgacattgattcttgtccccgtactctattgctcgtttgcaggtgttggtatccgccgcacgcgtaagaagattaagaaagaccgtgagctgaatgattattaccagttgcataaggagaagatgacgaaaccacgtaaacaatgattaatcattatccgttaatcattaaacattaatcactaaacattatatagcgtgaaatcagtatttataacattcgaccaagcgttctttgaacgtatcatggcattgcttgaccgccacaactgccgcggcttcagctattggcagcaagtacaggggcgtggcagtaagacgggggaaccgcactatggcagccatgcctggcccagtatgtgttccgccatcatcactatcatagatgaggctaaggtggctccgttgctcgaagcgctccaccggatggacaaggagaccgagcaactcggactccgtgcttttgtttggaatatcgaacagaccatttaatcgggtctgctctgtctataaccgttatccccggagaaaaaatcttgtttctttggggataattcttttttgtccggagagattttttcaacctatatctatatctttgcggccacattaggtatggaaaagaattcattgaaatatacgggtctgttggcgtttatcgtatggggtgcattgttgctgatgcatctgttgccaagtattacgatgggtggccgtgtgctgaggcgtgtggatatcttgggggacgtgcgtcgtccttccaagccggtgagtgagccggacagcctgctgcctccgcccccgaaggtgaagcccgcctttgtggacacctgccgtgcgggcatgacgtgcattgaagattacagcgattctaccatgcgtggcatgacgcggttctatcaggcgctcgacgagcttgccaaagcaccccgtccggttcgtatcgcctacttcggcgactcctttatcgaagcggatattctgacggctgatttacgcgagatgcttcagcagaaatatggcggttgcggagtaggttttgtcaccattacgtccatgaccagtggcttccgtcctacagtgcgtcattccttcagcggatggcagagtcattctgtcatggactccgtgttctttgaccgtagcaagctgggagtctccggacattactttattccgaataccggtgcttatgtggaactgcgggggcagaagaactatgcctcccgtctggatacttgccagcgtgccagtatttttttctataaccgtggcacaaccaccctttctgtccgcgtcaatcgtggcgaagcaactaccgagacttttgagccgattgatgatttgcaggagatgacggtagagggaaatatcggttctgtccgttggacggtggaaagtgcggactccaccttgttttatggccttgccatggacggtacttccggcattgtgctggataacttctcactgcgtggcagctccggcctctccctccgttctgttcccgtgtggatgatgcgcgagttcaacgagcagcgaccctacgacctgataatcctgcaatacggcttgaatgtggccaccgagcgcggacgcaattacgataggtacattgcaggtatgcagacaacggtggaacatctcaaggaagcctttccgcaagctgccatccttgtggtcagcgtgggcgaccgtgactataagaacgaagaaggggagctgcgtaccatgcccggtatcaagaatctggttcgttatcaacagaatttggcggcggatgaggctgtcgctttctggaacatgttcgaggctatgggtggggaaggcagtatggcagagatggtgcatgccaagccgtcactggccaattatgattatacgcacatcaacttccgtggtggaaagtatcttgcgggattgctttatgagtctttgatttatggtaaggaacagtatgacagaaggagggcctactatgaagaggagccataaggaggattcacgattgtacgatttacgatgtacgatttgctgcgcggtgctggtgctgattgcggcgatagggccgctccatgcacaagatgtattgccgggcagcctttcgtgtcatgtcggcggaacggattgtgatactctctgcctctattcccaacgtacggatacggtgtctgtccctttgataacttttcccgccacattccggcaaatgaaggagaatgtacttaccgacagtctgggtattcttaatcctttctgggagaagctacgtctgtcccggctgggcgcttccgctgatacgcttcgcatcgtacatgtgggcgacagccatatacgcggccatatcttcccccgtaccactggtgcgttgatgcaggacactttcggagcagtctcttataccgatgtaggtatcaacggtgcattttgcattactttcacccgtccggaccgtattgctgatattgcggctctgcatcccgacctgcttattctttccttcgggacgaacgaaagccataaccgccgttacaatacaatgctgcactatcgccagatggacgaccttgtacgcatgcttcgcgagaaactgccgaatgtaccgatgttgatgacgacccctccgggctcttacgagagtttccggcagcgtcgccgtcgtcgaacctataagattaatccgcgtactgccgttgccgtgcagactatccgccgctatgccgatgaaaacggattggcggtatgggacatgtacgaaatacttggcggtacccaccgtgcctgcctcaactggcaggaagccggattgatgcgtccggaccatgtacactatttgccggacggttaccgcctgcaaggcgagctgttctaccaggccttgttaaaagcttataacgattatgtggaatattgacgaatttttatccggattgaatatagacttggaccgtttgcgcgatgtcttcacttatgacccacaagccccgatgatattcagcagtggtattttcctctggctgtttgtcgcttttatattggtttatctgttgttgcaacgccggacgacggcgcgtttgctgtttgtcaccttgttttcctattacttctattataaaagtagtggcacttatttcttcctgcttggactggtgacggtctgtgactttttcattgcacgcttgatggcacgcgaggctattccctggctacgtaaggcatgggttgtgttgagtctgttcatcaatttgggattgttgtgttacttcaagtacaccaattttctgggcgaaacttttgcctcgctgatgggaggcacgttcacgacaatggatattttccttccggtgggcatctcttttttcacttttcagtcgttgagctatacgatagatgtgtaccgtcgccagataacgcctctgaccagtttgttggattatgctttttatgtttctttctttccccagttggtggcgggtcctattgtacgtgcccgtgatttcattccgcaaatccgccgcccgctgtttgtctccaatgagatgttcggacgtggaatcttcctcatcgtgagtgggctcttcaagaaagcggttatatcggactatatcagcgttaactttgtagagcgtatttttgataatcctactctttattcgggggtggagaatctgatgggtgtttatggctatgccttgcagatttattgcgacttctccggttacagtgatatggctatcggcattgccttgttgctgggcttccatttcaatatcaatttcgattccccttataagtccgcttccattacggaattttggaggcggtggcatatttcgctttccagctggttgcgcgattacctttatatttctttgggaggcaaccggaaggggaaaattcgccaatatgccaatctcatcattaccatgtttctgggcggcttgtggcatggcgcttcgtggaattttgtactttggggaatgatgcatggcgttgcgcttgcagcccataagttctggatgacgcttaccgggcgtaagaaggggacggagagccatggcatccaccgcttcttcggagtgcttgtcactttccattttgtttgtttctgctggatattcttccgtaatgcggagttctccacatcaatggatatgctgaagcagatattcactactttccgtccgcaactcttcccgcagctggtagagggttattgggaagtgtttgcactgatggcattgggctatctgctgcattttgtgcccgacagttgggaacgtgcttgcacaaaaacagtaatccgcctccccttgttgggaaaggcggtactgatgcttgctgtaatctatctggtcattcagatgaaaagttcggagatacagccgtttatctatttccagttctgattacttcttctcggtcgctgtggagtctgcctgctgtcggaagggttcccggtagttgagcccgtctctccggtagaggccgatgagtccggccagtcgggtagtgaagtttgtataatctttcttttccagttgtgtccattgtacttcggcaagggcggccatacgggggagaaccatatactctacctgttcgctggtcgggatgtattctgtccaaaggttggcttgtgtgccgagtatgtgcttggcttgttcttcggtcagtgaggcggtaggattcagactgtatactttctccaatgggacaaagcctccgatggcaaatggttcgtgccgggtatcctcactttggtaataatcaaagtagcaatagtcattgggtgtcattatcacgtcgtgtcccagttgggccgccttgattcctcctgccgagccacgccatgacataacagttgcgttgggggcgacgtcgccttccagaatctcatcccagccgataatctggcgtcctttactattgaggagcttttcgatacgtgtcatacaatagctctgcagacggtcttcggcagtatggttcttgtcggctttcaatttttcggttctgatacgtgcctggcatttgggacacttttcccaacgggtgcggggagcttcgtcaccgccgatgtggatgtatttggaagggaatatgtcaatgatttcggccatgacatcttcgaggaactgcatggacttttcgttgccgatgcacagcacatcttcgaatacgccccaacgtgggcacacttcatacggtccaccggtacatcccatttcgggataggcggccagtgcggcaagcatgtgtccgggcaggtctacttcggggatgaccgtgatatagcgctccccggcatattttacgatttctttggcttgctcctgcgtatagaaaccgccataccgggtgttgtcatactcttcggtgttccggccgataacggtacggtcgcgccaggcgccgatttccgtcagcttgggatacttctttatttctattctccagccttggtcttcggtgaggtgccagtggaaggtattcatattgtgaagtgccagcaagtctatgtatttctttacgaactcaatgggaaagaagtggcggcccacatcgaggtgcatgcctcggtagctgaagcggggctcatcctggatgctgccggcaggcaataggatagaggtggctttggtttcggcagggattgatttacgcagggtttgtataccgtagaacactccgttctcggtctgtccgtttagggtcacccggtcggctttgacggtcagcacatagccttcctggttgccgatagccggatccagtcccaatgtgatggcgcctttgggcgcttcgcttcccggggcaagggcttctgtctggagggtgcggccggtggactggctgatgtattcggccagaaactcggcattgcgtttcaaaagttcattgttttcggggtaggcgatgatggtaccgtcattcaagttgaagggggattcctgactcaaggcaacctcctggggcaagggaatgacttgatagttggctgttgtttctactccgcatgaagagcaggccaggatgagagtgcctgcaaggagcatgtgtgtaagttttctcatggtattgaactgattaaattagtgtctgacaaatatactaaaaaaatactaaagaggcagaggagaaggggataaatgcatgctcatacctcagttcttctttgctctgtactccttgggtgacattcccgtgtgtttcttgaaatatcgtccgaagaaagactggtcgggaaaacgatatttgtcggcaatctctttcagtgacatgccggtggattgcagtgccattttcagttccaatatcaggttttcgtcaatgatttctttggcagaattttccgccacttgtttggtgatggcagataggtagcgggtcgaaatgcagagttggtcagcataaaaagcgacatcccgctgggtagtacagtacgtatgtaccagatttatgaactttttgaacaattcttctttccggttactgccattgatttgctcttccgtaaagtaacgttgaaccttgtcgtaggtgtcgagaaagaaaatttgcagcaggttttgtgcaatggcttcgcgatacagattttcagaatcgcggtagatggcattgcttgccgtgatgagtcctgtgatagcacgaaccggttcgtcttcggtatgcgtatagcatgcattctcctttataaaatgtatgaagggcggctctaaacggaagcatgccgtcttgaacattgtctcggaataggcaaagaagtccaccaggaaatctttactcgcacttgtcagtgaaataatggaacttggaagcagcgtaatgtgcgtattgggtacaatatgatattttcttaaatctattgtgatatttgcttctccacgggtgcagaacatcagtgctccattgttcattttcagaagacgttcccggaagaattccagcttgtctgttccggctctgaacgtttcttgtttggtagtcagtaatgggttcatatgttagattgcttatgatttgcggttacaaaggtacgagttctttttggattgttaaatggccctcaaatccgcaactacgcgcctaatatgatacagaagcgaaaagaatctgcatcgttagtaaaaagggggcacagtgcatcgaatgtcaccataaagacatataaatgccccttaccccaccatgcgacttgaggcaatacgcaaaatcacgactataagttgtcggtgttatccaaagtcattctggaacacattggcataagcattgttgcatgaatagatattcagcacatacttccttgatgtcctgacccatttggctggcacagagatgaacttaaagacaaacgtcttgatgcggcttgttgctttgagtccgaacctcttcacgtcaagcctcgccatgatgaatttatagaagttgcgtatgagtgccataagcagaagaaacaccgtgttttctcccataaaggattttggaagcctgttccagccgaatccgttattcatatcatcgaagatgcgttccttccctccacggaggttatagaattcgacaatctctttctcggaagactcgtagtcatttgtaaggatgcagcggtaggtgtattctccttcccacaggtcgagttcgccgtctatccgcttctgtctttgaatcacaagacggtatgccttccctttccatttctcgatgagaatggaggccagctcaaactcaatgccgcccaattccactttcttccaacctctgagggcaaagatgtcattgtagagcgaactgcatcggttagcacggatatagaaggtcttgcagtgtttagcaatctcttccactatctcttcagaacacgagccgcaatcagctctgaaacggttgataataagcttgttttgttcaaacctttcaaagaacctcttcagcgtgtccttctggtggaaacggacatttgtgttgccgtcgctgttctcaatgccgacaatcaagttgccaataaccgccacgccagggcgataaccaaggaacttcttgtatgtaggcttcgcatcaaacttctcagcctctatgaactggtggtcgaagtcaacgtcatacccctcgccctctttcagctgccctgtggacaataggcaattgaggagcagtgtattcagcttgtctgccgtgttgaagtcgtaggtcttgccagtgtcggatgtgtaggaaatgttatcctgggtcagttcctttatggctctaagaatcgtgtcggcactgcatgtgcgaagtgtcggatgaagcgaaaggtggtacatcagatgagtggtgacatcctcgatgcatgagccgccacaaaaataaacgctcataagcgaacggatgatttcgctgtattgataaccatacagcctgcatctcataccgagggttgagtcgattacagatgagagtctggagtcaaattgctccattattgaaaatattcctccaaaaggagtgagtttctcggatttaattgctacctttgccatgtctgtcgggtttgatacatattttgatttgcaacactaagataggtgaaaaatctgacatggcaaattcctgagcaactttttgttgctcaggtacttaaaaagttatatttgtaatagtgttgcggaattaaggatggcatgttccgaaaatgaacagtcgtgtaccttcaatgaaacaaatggttgttcaaaaacggcatacctttgctgccggcttaaaaaatgaaagagaaagccgacgtattatttttttaagataaaaagtatgataacaaaaaagagtatgatgaaacagatgatgaccgtcatctgtagtgcaacactggcagcctgcggcagcgcgcctgtcgtgcaaccccagtcggaatatcaggtgatgactatttcgactaccgacaaagaactgcagacaatttattccgcagccatccgcggacggcaggacattgacatctatccgcaggtgtccggtacactcaccaaactttgtgtggaggaaggacagaccgtgcgtcgggggcaagtcttgtttattatcgaccaggtgccctatctggcagccttgcgcacagcagaagccaatgtggaagctgcccgtgccggcgtggccacttcgcaactgacatatgacagcaagaaggagctttatgcccagaaggtgatttccgagtttgacttaaagacttcctacaacagcctgctgacagcgaaagcccagttggcccaagccgaggcgcagcaggtgaatgccgccaataacctctcttatacagaagtgaagagtccggcagatggaatggtaggtacgctcccttatagggtggggacgttggtcagcgccagtttgcccaaaccactgacgaccgtatccgataattctaatatgtatgtctatttctccatgacagagaatcagttgcttgacctcacccgccgctacggctccaaggataaggcgctggcagagatggactctatcgaattacagctcaatgaccgttctgtctatccgcaagaaggtaagatagaaactatcagtggtgtaattgatacctctacgggtacagtcagtctgcgtgccgtgttccccaacaaagaggggttgctgaccagtggcggttcgggaaacgtcatcatcccggtacggaaagagaactgcatcgttgttccccagagtgccacttacgaagtgcaggacaaggtctatgtatataaggtagttgacggcaaggcgcaatcagttcccgtgcaagtgacccgtgtgaatggaggtcaggaatatatcgtagagagtggcttgaaagtgggggacacaattgtggccgaaggcgtgggtttgctgcgtgaaggtacctccgtccaacccaaaacgaatgaatgataatttttaaccgatagaatatgaacctcagaacttttatagaacgccccgttttttcggcagtcatctccattacgattgtcattctgggcatcatcggattgttcaccttgcccgttgagcaatatcccgacattgcgccgcccaccatcatggtgagcaccacttactatggagccagtgcggaaacccttcagaaaagtgttatcgctccgttggaagaggccatcaacggtgtggaggacatgacttacatgacttctaccgccagcaatgcagggtcggtttccattactgtttacttcaagcagggtacagacccggacatggcggcggtcaatgtgcagaaccgtgtgtccaaagctacggggcagcttcctgccgaagtaacccaggtgggtgtcaccaccagcaagcggcagaccagtatcttacaaatgttctctttatatagccctgatgacagctatgacgagaactttcttgccaactatatcagtatcaacctgaagccgcagattctccgtatctccggtgtgggcgatatgatgattatgggtggtgactacagcatgcgtatctggatgaaaccggatgtcatggcgcagtacaagctgataccttcggatgtgacggctgtgctggcagagcagaatatcgaatcggccaccgggtcgtttggtgagaactcggatgagacgtatcaatataccatgaaatatacgggacgcctcattactcctgaggagttcggcgacatcgtcatccgttctaccgaagacggcgaggtgctgaaactgaaggacatcgccgatatagagctgggtaaggacagttatgcctacaaaggtaccatggatggacatcccggtatctcctgcatggtgttccagaccgcgggctccaatgccacggaagtgaaccggcagattgaccggctccttgaagaagcacgcaaggacttgccgaaaggcgtggagcttacccagatgatgtccagcaacgatttcctcttcgcctctatccacgaagtggtgaaaacgctgattgaggctattatcctggttatcctggtggtttatgtctttttgcaagacatccgctctacgctgattccgctggtaggtatcgttgtttcactgattggtacgtttgctttcatgtccgttgccggattcagtatcaacctgattacgctgtttgcgctggtattggtgattggtacggtggtggatgacgccattgtcgtggtggaggcggtgcaggcacggtttgatgtgggctataagtcctcctatatggcaagtatcgatgcgatgaagggcatcagcaacgcggttatcacttcttcactggtgtttatggcggtgtttattccggtatcgttcatgggagggacttccggtacgttctatacccagtttgggttgacgatggcggtggccgttggcatttcggcgattaatgcgttgacactcagtcccgcactttgtgccttgctgctgaagccttatatcaatgaggacggaacggagaagaataattttgcttcgcgcttccgcaaggcattcaacacggctttcgaggcggtggtcgagaagtataagaagatagtgttgctgttcatcaagcgccgctggctgggatggtcgttgctggcactttcggtggtgctgctggtattcctgatgaataccaccaagaccggactggtgcccgacgaggaccaaggaacgttgtttgtcaacgttagcaccgctccgggtagctcgctcaagacgacaaatgacattatagaccgcgtggagaagcgtctggaagaccttcctcagaaattgcacttgcagaaagttgccggttatggtctgctgtccgggcagggaaattctttcggtatgattatcgtgaagctgaaaccttgggacgagcgtacggcaaaggaagaccaggtgcaggcagtcgtcaaccagatatacgctcgcacggcggatattaaggatgctacagtctttgccattgctccgggtatgattccgggctatggtatgggtaatgcactggacttgaatgtgcaggacaagcagggaggggatatgaacaccttcttccagaccacccagcagtatctggcggcactgaaccggcgtccggaaatttcgatggcatactccacgttcgatgtacgctatccgcagtggaccgtcgaggtggatgcttccaagtgcaaacgtgccgggattgctcccgaccaggtgttgtccacactgtcgggctattatggcgggcaatatgtctccaacttcaaccgtttctccaaagtttacaaggtaatgattcaggccgacccgaagttccgtttggatgaggcttcactgaacaatgcctttgtgcgcatgtccaacggtgagatggctccgttgagccagttcgttacgctgacccgttcctacggtgccgagtccttgagccgcttcaacatgttcaactccattgccgtgaatgccatgcctgctgagggatacagtaccggtgacgccatccgtgccgtacaagaaacggcggagatagccttgccgaagggatatggctatgactttggtggcatcacccgcgaggaaagccagcagagtggtactacagtcatcatcttcggtatctgtatcttgatgatttacttgattctgagtgcgctttacgagagctttctgattccgtttgccgttatcctggccgttcctgcgggcctaatggggtcgttcctttttgccaggatagccggattggagaataatatctatttacagacgggacttatcatgctgataggtctgttggcaaagaccgctattctgttgacggagtatgccgccgagcgccgtaaagcgggaatggggctgattgcttctgccgtcagtgcggcaaaggcgcgtttccgtcccatcctgatgacggtactgacgatgattttcggccttttccccttggtggttgccacgggtgtcggagccaatggtaaccgttcattgggtacgggtgttgtcggtggtatgttcatcggcacattggcgctgctgttcattgttcctgtcttgttcatcagtttccagtggttgcaggagcggcttcgtcctgcccaatcccttccgacgagcgactggcagattgaggaagagatgaaagtaagccggaaggagatagaagaatcacattagtacattatcgcgtaactaacataaaaaaataatgaagaaacaattcatattattagctgtcgccggcttggtactgaccagttgcggcatctataccaaataccagcgcccggaggacatcacgaccgatggactttatggacacgatttggatgggcaaagtctggatagcctgagtctgtttgcggcatcggacactgcctccatcgcttccctttcctggcgcgagctttttacggacccgcaattacagtcgcttatcgagcaagccttgcaaggcaacaccgacctgctttccgcccggcaacgtatcaaggaggcggaagccacgctgatgtcggccaaactttcgtacctgccttcgtttatgctcactccgcagggtggcgtcagcagtttcgacaattccaaaggctcgtggacctattccggcattgcctcggcaagttgggaagtcgatatttttggtaagttgaccaatgccaaacgccgttccaaagcgctctaccttcaaagcttggagtacgaacaagccgtcaacacttcgctgatagctaatgtggccaatttgtactacaccttgctgatactcgacgagcaataccgcatttccgaagaaacagccgccagttggcgcgaaagtgtacgcaccatgcgagccatgatggctgcaggtatgacgaacgaggcgagtgtctcgcaatccgaagccaactgtcgtcaggtagaagcttcgctgctcgacctccggcagcaggtaaaggaagtggagaacagtctctccattctgttgggcgatgttccgggcaccattgagcgtggccggttggcggggcaggagttcccgcaggaacttgcggtgggcgtacctctgcaactgctttcccgccgtcccgatgtgaaaagtgccgaactctcgctggcatccgctttctacagcaccaatgccgcccgttctgctttctacccctccatcaccctgagcggtacagctggctggaccaactcggcaggaagcatgattgtcaatccaggaaaactactcttctctgccatcggctcgctgacacaacccttgttcaacaaagggctgaacgtggcacagctcaagatagccaaagcacagcaggaagaagccaggatcgcttttcagcaagctttgctcaatgccggtagcgaagtgaacaatgctctgacccaagtgcaggtagcccgtggaaagacggagctccgcgcaaggcagataacttcactggaaactaccgtccgcagcacccggttactgatgcaacacggcacctccacctatttggaagtgctcactgcccagcaggggctactctctgcccaactgacacaggtagccgaccgctttgatgaaatacaaggtatcatcaacctctatcaagccctcggtggagggcgggagtaaaatatactctttctcatcttcattctctcgcccctctatcaatccggcatttcctttttttgtgggaatccgatggtagaggggctttcatataagcgggctatggcaaaaaaactacggtttcttgccgtcaaaccgggacaaactttataactttgcggtatacgacataaaaatctatctattatgaactgcaaatccttgttttttctggttgttttttccctgacccttatatcaggggtgtttgctcaaaagaaagtttctattcttggcgattcctattccactttttacggtcatgtctctcctgccgccaatctctgctggtatggagttcccggcgaaaagaaagagaatgatgtgacaaaggtggaggaaacctggtggtaccgtttcatccatgagcacggctttcagttggaacgcaacaattcctattccggctccaccgtctgtcataccggttacgagaaagccgattactccgaccgttcttttatcacccgtattcacaacctcggcacccccgacataatccttgtttttggcggtaccaatgacagttgggcaggtgctcccattggcgtataccaatatgatggctggacgaaagccgatttgtatagcttccgtcctgccttttgctatctgcttgcatctctcaagcagctctatcctgcggccaggatttataatattaccaattcagaactatccgaagaggtaactgattccatggatgaaatttgccggcactatggcatcgagaatattcgtttgcacgacattgataaacaatgggggcatccttctgtgcaaggaatgcagagtatcgatgctcaggtttgggagtctgtctccccgatattggaggcttctgtttctttgcctgccaagaactaaggacagactcattgggagttatccttttctatcctaaatgctaatctttccactgccgtattcttttctttccacagctgtggaaagaaaagaatacggcagtggaaagaaagtaaaatccttgtggcaagaaaaataattagtacctttactgccagcttctgccgatttcgagaacatttcttccccaagtttgctgcaagtttccctcaattctctataaaccattaatttaaattattttatgagtgcttattatgacctttatgaaacgcccgtccccgaaggcgaggaaccgaagtcgctgcatgcccgtgtctgttccaagggaaccatttctggtaaagagttcatggaacgggtttttcgtgaagaacatatgccccacgccatggttgtgggtattgtgcaagccatcaccactacgcttggagactggctggcaaagggctatacggtggagatagagggacttggcttcttcagcaccacgctgaagtgtacccatccggtgatgaataagaaagaagtacgtgcggagtcggtcaagatgtccacggtgaaattccgtcccggcatcgaattcaaacgttatgtggcaggtaagatggagttggaacgtgcggataaacgctttttcccggataaaccgaaagcaatgggcgacatggttgcccgtgaaaaaagcatgatggactttctggaggctaatgtctgtattactcgtgcagaatattcccgccttgtccatgtcaccgcccgccgggcttcgagggatttgcagacatttatcgattccggcgtgattcgcaagcgtggtgccggccgttcagtggtctatgtcaaggggtgaacttattatattccgatgcgcgcgcgtatatatataatgtgtccccttccttccttcctttctttccctttaaaaaacatgctttaaaacatatctatcaatcagctagttatgaaaaagttcacgtaaaccctcaaaaaaagcttgtatatattttgcagatgtccgtaaaagcgctacttttgcatccgctttcgggaacgaaggcggcgatgttttgacattctgacagtaaaacggagcggtaagcttccatttttctcttctttgccataggtttctttcggaacttcggtcttggaaaagaaaaatgaaaaaaaacttccgaaacatttggaagttatgctttaaagttcttacctttgcacccgcttttgaaaacgaaagcagcgcgagttgacattcttctttcaagaaacggtgaccgggttttttttcttcctttttctttttgcctccctttcgacaagagagacgacgaggaaagagaaaaaagaaaaaataaaaaaaaacttccgaaaatatttggaagatatgctttaaagttcttacctttgcatccgctttctgaaaagaacagcaatcgtgaaacgagcgatctttgaacagatttacataaacaatacaagtagtacaagagcaggtgcttcgcaaattaataaatggaaactaatgattaaggcgcgtcgtacctgggtaaaacaaaagaaccgtcaatatctgttttatataaataggtaaagataaactttttgaattcgagcgtcctggacagataattaagctgccgcattttaatttttaatttgcgcagtcaagatacttttacaatgaagagtttgatcctggctcaggatgaacgctagctacaggcttaacacatgcaagtcgaggggcagcatgaacttagcttgctaagtttgatggcgaccggcgcacgggtgagtaacacgtatccaacctgccgatgactcggggatagcctttcgaaagaaagattaatacccgatggcatagttcttccgcatggtggaactattaaagaatttcggtcatcgatggggatgcgttccattaggttgttggcggggtaacggcccaccaagccttcgatggataggggttctgagaggaaggtcccccacattggaactgagacacggtccaaactcctacgggaggcagcagtgaggaatattggtcaatggacgagagtctgaaccagccaagtagcgtgaaggatgactgccctatgggttgtaaacttcttttatacgggaataaagtgaggcacgtgtgcctttttgtatgtaccgtatgaataaggatcggctaactccgtgccagcagccgcggtaatacggaggatccgagcgttatccggatttattgggtttaaagggagcgtaggcggacgcttaagtcagttgtgaaagtttgcggctcaaccgtaaaattgcagttgatactgggtgtcttgagtacagtagaggcaggcggaattcgtggtgtagcggtgaaatgcttagatatcacgaagaactccgattgcgaaggcagcctgctggactgtaactgacgctgatgctcgaaagtgtgggtatcaaacaggattagataccctggtagtccacacagtaaacgatgaatactcgctgtttgcgatatacagtaagcggccaagcgaaagcgttaagtattccacctggggagtacgccggcaacggtgaaactcaaaggaattgacgggggcccgcacaagcggaggaacatgtggtttaattcgatgatacgcgaggaaccttacccgggcttgaattgcaactgaatgatgtggagacatgtcagccgcaaggcagttgtgaaggtgctgcatggttgtcgtcagctcgtgccgtgaggtgtcggcttaagtgccataacgagcgcaacccttatcgatagttaccatcaggttatgctggggactctgtcgagactgccgtcgtaagatgtgaggaaggtggggatgacgtcaaatcagcacggcccttacgtccggggctacacacgtgttacaatggggggtacagaaggcagctacacggcgacgtgatgctaatccctaaagcctctctcagttcggattggagtctgcaacccgactccatgaagctggattcgctagtaatcgcgcatcagccacggcgcggtgaatacgttcccgggccttgtacacaccgcccgtcaagccatgaaagccgggggtacctgaagtgcgtaaccgcaaggagcgccctagggtaaaactggtgattggggctaagtcgtaacaaggtagccgtaccggaaggtgcggctggaacacctcctttctggagtgacgtctcgactcgatcgttggttcttgaagttatgcttccataagaacctcttgtactgcgcgtacttgtttattaaaatatacgagaaaagtagaagccgagccgtaaggcgagggtttgactgacagtcctatagctcagttggttagagcgctacactgataatgtagaggtcggcagttcaactctgcctgggactacttcaaagttgaaaactgaaaattgacaactgaaaatcgggaactctccggattttccactttccactttccgttttccacttataagaagggggattagctcagctggctagagcacctgctttgcacgcagggggtcaacggttcgaatccgttattctccactccgttttgattattgttttataattgaaacaccgttctttgacatgatgtgaccaaaaaaaagtaaagttaaaagctgaaagtatatatcgaccatacgtgatcggtaagacaaaaagtaagtaagggcacatggcggatgccttggctctcggaggcgatgaaggacgtgataagctgcgataagctgcgggtaggtgcaaatgacctttgatccgcggatttccgaatgggacaacccgatactttgaagaagtatcatcctgcattgcaggaggctaacgcagggaactgaaacatcttagtacctgcaggaaaagaaaataaacaatgattcccccagtagtggcgagcgaacggggaatagcccaaaccatccatgttacggcatgggtggggttgtaggaccacgccgtggcaagaaagttggtgagcagaatgttctggaaagtacagccatagagcatgacagctgcgtatgcgaagccaagcgaagcctagtggtatcctgagtagcgcggagcacgaggaattctgcgtgaatctgccgggaccatccggtaaggctaaatactcccgagagaccgatagtgaaccagtactgtgaaggaaaggtgaaaagcacttcgaacagaagagtgaaatagttcctgaaaccatgtgcctacaagcggtcggagcaccttctggtgtgacggcgtgccttttgcataatgaacctacgagttactttttccggcgaggttaaggatttcagatctgcagccgaagcgaaagcgagtctgaacagggcgtatagtcggaaggagtagacgcgaaaccaagtgatctacccttgggcaggttgaaggatgggtaacaccatctggaggaccgaaccaataagcgttgaaaagcttctggatgacctgagggtgggggtgaaaggctaatcaaacttggagatagctcgtactccccgaaatgcatttaggtgcagccttgacttatactggcatgaggtagagcgactgataagatgcgagggcttcaccgcctatcaagtcttgacaaactccgaatgcgtgtcagttctatgtcaggagtgagggcatgggtgctaaggtccatgtcctaaaggagaacaatccggaccaacagctaaggtcccgaaatgaatactaagttgaactaacgaagtcagattgctaagacagctaggatgttggcttggaagcagccattcatttaaagagtgcgtaacagctcactagtcgaggagtttggcgtggataataatcgggcataagtattctaccgaagctttgggatgagaaatcatcggtaggggagcattccactcggcgtcgaaggtgaggcgcgagccttgctggagcgtgtggaaaagcaaatgtaggtataagtaacgataaggcaggcgagaaacctgcccgccgaaagactaaggtttcctgatcaacgctaatcggatcagggtaagtcgggtcctaaggctcagccgaacggcgaggccgatggcagaaccggttaatattccggtactacctgtgggagtgacgtggagacggagtcgtgacagcgccgcggactgacggaatagtccgttgaagggtgtagatgctgattgttccaggcaaatccggagcaagagtcgaacctgatagtatggagcgttcttagaacaatccaatagtgcgtgtaatcatacttccaagaaaatccgctaaacttaatcctgcaggtacccgtaccgcaaacggacacacgtagtcgggttgaatatactaaggcgcttgagtgattcacggttaaggaactaggcaaactgaccctgtaacttcgggataaagggtcctcgcttaacggcgaggcgcagagaataggtccaggcaactgtttaacaaaaacacagggctgtgcaaaattgaaagatgaagtatacagcctgacacctgcccggtgctggaaggttaagaggagatgtcatcgcaagagaagcattgaattgaagccccagtaaacggcggccgtaactataacggtcctaaggtagcgaaattccttgtcgggtaagttccgacctgcacgaatggtgtaatgatctggacgctgtctcaaccgtgagctcagtgaaattgtagtatcggtgaagatgccgattacccgcgatgggacgaaaagaccccgtgaacctttactatagcttaacattgaatttgggtaattgatgtgtaggataggccggaggctttgaagcgggcacgccagtgtccgtggagccgctgttgaaatacggccctttgattatttgagttctaacccgttgttgcggggacactgtttggtgggtagtttgactggggtggtcgcctccaaaagtgtaacggaggcttctaaaggtgccctcacgacgattggtaaccgtcggcagagtgtaatggcataagggcgcttgactgggagacttacaagtcgatcaggtaggaaactagagcatagtgatccggtgtttctgtatggaaaggacatcgctcaaaggataaaaggtactccggggataacaggctgatccctcccaagagctcatatcgacggaggggtttggcacctcgatgtcggctcgtcacatcctggggctggagaaggtcccaagggttgggctgttcgcccattaaagtggcacgcgagctgggttcagaacgtcgtgagacagttcggtctctatctatcgtgggcgcatgaaatttgcgtggctctgacactagtacgagaggaccgtgttggactgacctctggtttaccggttgtgccgccaggtgcattgccgggtatctaagtcgggattggataagtgctgaaagcatctaagtacgaagccagccacaagattagatttctcagggtcgttgtagactacaacgttgataggatgcaggtgtacaggcagcgatgtcatagccgagcattactaattgcccgtccactttttgccttccgtgtatggaggtatatacgttcagcaatatatggacactttacttttttctcatcatgtctgccttattcaggtgactacagcaccggggttccacctcttcccattccgaacagagaagttaagcccggtcacgccgatggtactgcgtaacagtgggagagtaggtagtcgccgttttcagaagaagcctccgtgtctgataaggatacggaggctttgttcgttttatatacctctcctctaacattccgtttctaccgctaatcactataccttattatatataattattcatcgtatattcatcagattaattcccgaattaaggtgctaaatgaatgattaaaaacgtttaaagtcagtattttatattctatttccactttcgtatttcatatattcttcgtacctttacagtgtattaaaaggtatagtaaatcctttaatcagtgaacaatttaatctttttacaaaagaaagtaacatagctgtaaaacaaataagagagacatctgttatttattgtagaatcattagacgacatgaaaacaactgtaaagacattctggatatgcatgctactgatgttgacttgcagcattagcggtaaagccattgacctggtgcaggtggatgacagaatggccggaactgctgaagtttccgcttctttatcttcatgttcttctacttccgacaatagtattgacaagaagaattcattgttcacgaataccaagttcgcatggactacggatgtcgaactgggaaacaaaccggtttccgaaacttactcttctcatcaacagcgtttgcgcagggtgattgaagacaatcttttcctcagaaacattcttttgatgttatccaaccacgagaatctactcgtgcaaggccgctctaaattatactactcagataaagacccgtactatgcattgacgggcagtgattactatatttatacgcttcggcggattttgatttagccaacttttcttcttattgatttccccctttttctccttattgtcttgaagagactgaaggcaggtgacctttagtgtacatatatgttagttaaggttgcaaggatgattacgccctatcggttcgtaagcgggaagtcgtatccctatgctttattttcaaaactctatttaaataccaacaattaaacttttcatcatggaaactactcaaaaaaaagcagcctcttttaaaggcatcagatccgccggttgggtaatcgtaatctgttttatcatcgccgtgcttatttttcactttgtgttgggaaatccctccaactttatgaacaacgacccgaacaaccatccgttgccgggtaacttcctcggtaccatctataaaggtggattcattgttcctgtaattcaaacgcttttgctgactgtcatcgcactgagtattgaacgttatattgccattggcgctgcctttggtaaggggtcattggtgaaattcgtagctaacatcaaagcagccttggctgaaggtgatatgaagaaggcacaacaaatctgcgattcacaacgtggttctgtagccaatgtggtaaatgccactttgaagaagtatgccgagatggagaatgacacagagctgtccaaagaccagaaactgcttgccatccagaaggaattggaagaagccactgcgctggaactgccgatgatggagcagaatcttcctattattggtaccatcacgactttaggtacattgatgggattgctcggtacagttatcggtatgatccgttcatttgccgcccttgcagccggaggttcagccgactccatggctctgtcgcaaggtatttctgaggctttgattaatactgccttcggtatcttgaccggtgcattggccgttatctcctacaactattatacaaacaagattgacaagttgacttacagcctcgatgaggttggtttctccatcgtgcagacttttgcagctacccataaatagttgactgctgatagttggagctgcgctgtgacgtaggcttctattatctattcaacgaatgaattctcaattttaattttcaatgaaacgattatgggcagagcgaaaataaaaaagaaaagtacgttcatcgatatgacggcgatgagtgacgtaactgtactgctgctgaccttcttcatgctgacttctacgttcgtgaagaaagagccggtacaagtaacgactcccgcctctgtatccgagattaagattccggagacaaatgtactccagatattggtcgatccgagcggaaaagtatttatgagtctggacaagcagtccgacttgcgcgaagtgctggaagctatggggcaggagtatggagtgactttcactccggaggaaactaaaaaattcatgctggcgtctacctttggtgtgccgatgaagagtatgaagaaatacctcgacttgccgcaagaccagcaagatgctgtattgaagaatgaggggataccgacagacagtattgacaatcagttcaaggcctgggtacgcaacgcccgtgcagtgaacagtgatttgcgcattgccatcaaggcagatgccaatactccttattccgtaataaaaaatgtgatgaactcacttcaggacctcagagagaaccggtacaacctgattacttctctgaagaccacaagtgaggagtgacaagctacgagttacaagtagaacaagaaaggaaacattatggctgaaatacaagaaagcggcaacaagaaaggtggaaaaagcaagcagaagaaaatgactgtcagggtggactttacacctatggtggacatgaacatgttgctgattaccttctttatgctttgtacctcactgagcaaacctcaaaccatggagataagcatgccgagcaatgacaagaccatcaccgaggagcagcagaccaaagtcaaggcttcccaagccatcacgctgttgctgggggatgacaacaagttgtattattacgaaggggaacctaactacaaggactatacttcactgaaggaaactacctatcaggcggatggtctgcgggcaatgcttctgcaacgtaatagagttgctgtgaacgaagtgaacagactgaagcagcagaaactggatcttaagatatcagaggatgactaccggaaacagctttccgaaataaaaagtggaaaggatacgccgacagtcatcatcaaggctaccgacaagtcttcgtacaagaatctgattgatgctctcgatgaaatgcagatatgtaatataggtaagtatgtgataacggatattgccgaagccgacgagtttttgatgaagaactacgaaagcaagggcgaattgtcccagaacattgctgaatgatgtgtaacacccaaagaaaggaaagaatatggctaaagtagatttaagctcccaagcatggtgtgacctcgtgttcagtggtaagaacaaagcatatggagcctataagatgcgtgagacctctcccagacggcacaacattgccgtgatactggtaattgtaattgcattgataggtttcagtatccctacgctgataaagatggctacccccaaacagaaagaggtgatgaccgaagtgactaccctttcgcagctggaagaaccggaagtgaagcaggaagagatgaagcggatagagcccgtggccccaccgccgcctgcattgaaaagctccattaagtttaccgctcccgtcatcaaaaaggatgaggaagtgagggacgaggatgaaataaaaagccagacagaactgacggaaacgaaagttgccatctccattgccgacgtgaaaggtaatgacgaggaacacggcaaggacatcgccgacttgaaacaagtggtgacgcaggccgaaccggaacctgaaaaggttttcgatatggtagagcagatgccccagttccccggtggtcaggccgagatgatgcagttcatcagcaagaatatgaagtatccgaccattgcccaggaaaacggtacgcaagggcgtgtaacctgccagtttgtggtaggtgccgacggcaaggtgcgtgatgtgaaagtgctgagaggtgtagacccctatctggataaggaagctgtccgtgtgattatgtccatgcccaaatggattcccggcaagcagaatggtaaggccgtatcggtgaaatatacgataccggtgatgtttagattacaataagtgtgtgtgttatgaaaacggtgaaacaacttcagctttcaggcttactggtgctgctgactctgctgtcggcctgccaaagcaagcccaaggacggacaaacggatacgtatacctccggtgtgattgcaattgctgcggacgaaagtttccagcctattgtgcaggaagaaattgacgtgttcgaaggactgttccccttggcaggaattgtgccccgttatgtgacggaagtcgatgccgtcaacctcttgctcaaggacagtctgcggttggcaataaccagtcgcagactgactcccgaagagatgaattccttcaatagccggaagttttttccgcaggagataaagattgctacggacgggctggcattgataacccatcttggcaatccagattcattgattagtgtgaaggacatctgccgcatcctgacgggtgatgcgaagcagtggaaagatatctatccggcttcccgtctgggggatatcagtcttgtgtttgacaacaagaactccagtaccgtacgttttgctgtcgattccatctgtaagggtgtaccgctttccagtcagttgaaagcgttgaaaaccaatagggaggtgattgactacgtggcccgcacgcctgatgccatcggtattatcggcgtgaactggctgagcgaccggaatgacagtacggggctctctttcagtaaagaggtgcggctgatgtccgtcagtgctgctgacaaggccatgccggacaacagttacaaaccctatcaggcgtatttgtattacggtgattatccgttggcacgcagcatctatgccttgttgaatgatccgcggagcgcacttccgtggggatttgcctctttcctcgcttccgaccggggacagcggattatattgaagtcgggattggtccccgccacccaaccggtgcgcgtggtgaacgtcaaggatgaataactaaaatgaatgctaacatgaaacgtagatttgtattttgtttgggagcgatgctgtttgcaggtacgctcgccgcacaaacgccggtgcccgaatggcaggcgggggtggataaagtaaaaagtctgataaagacgaatccggagcaggcttccgacgcagccggagaactgctgaagggcaagaacaagaaaaatgtggagcttgtgacttccgtggcccgtgcctatctggatgtaggacagctgaaagaggcggaaacctatctggagatggcaagaaaggccgacaacaaggctccggcagtttctgtactcgagggtgacatcgcttttgcccggaaagatatcggaaaggcatgccagctttatgagcaagccatctattttgattcgaattataaggatgcgtatctgaaatatgcgcaggcatacaagtctgccagtccttcgcaggccatagagaagctgaaccagctgaaggccatagctccggattgcctggaagcagacaaggagctggcggaagtgtattacgccaccaaccgttttggcaaggctgccgacacctatgccaagttcatcgatactcccgtggctacggaagatgacatcctgaaatatgcttttgcactattcctgaaccacgacttcgagaaatccttggcggtggcgcagaaaggtttgcagaagaatgcccgccatgccgcattcaaccggcttgtgatgtacaacaatgtcgacctcaagcgttatgacgaggcagagaaggctgccgatgctttcttcaatgcttcggataatgccgattattcatgcttggattaccgctatcacggtgctctgttgagtgctctgaagaaatatgaccaggccattgaggaatatggtagggcattggagaaggatgagagtcaggtggatttgtggcgtgagattgccgatgcttatgaattgaaaaacgactatacccaagccattgctgcttataaaaagtactatgactcgctggcacaagataaaaagacgtccgaaaacttattccagttagggcgtctgtactacggagagggtacgtcctcggacactctctccgttcagtctgccgaccgcatggcggcattgcaggctgccgactctgtgttcgcacttgttgccgaacaagcttccgacagttatttgggagatatgtggcgcgcccgcacacactctgccatggaccccgaaactacagagggattggcgaaaccttattacgagaaggtggtggacgtactgcttgccaaaaacgaaccgaggtacaactctgcattgatagagtgttacagttatctgggctactactatctgttgaagagtgactatgctacttcgaaagagtactggaataaaattctggctatcgaccccaccaatgccacagcaaacaaggcattggacggcatcaaatagcaataattttagttgtttgtcgtgtcgggaggagtggagagtgattcttagctcctccttttttgttgcagggtcccccttggaggcagtgattgcttgcggtagtccgtgggtgaagtgcctaagtgtgtcttcacatacttcccgaaaaaggagatgttggggaaatcctgatgctcggaaatctccttgatagacttattggaatacttcagaaaatatttgatgtcttcgaccacataatcgtttatccactcgaaggctgtctttccgctgacctttttgcagacggtggaaagatatttgggagtaacacacagcttacccgcataataggaaatagaacgttttttcacctcggtgcaggccagcaggtcgaggaatctcttgaatagaatgttgctccgcttcaccatttggctttcgggaggggtgctcaactggtttaaatctgccagcagctcatacagcatggtgcgtatcagcgacctgatgacttctttgtagtagggctgctccgcttgtttcattcgggcacgtatcaccttatagtataaatcgaacagttgcactctgtccttgtcaatgcgtactaccggattctggctgatatagaaagccttgttccatatgtcactacttttatgaaggtacttctgtgtaatctgggtcgacagacagaacatggcgcccttgaagtcggaactggttgtgcaattgctcagaatcatattgggcatacaaatcagcatctcaccggggtagatagcatatttttgggtattgatgtttatctgcagtcttccttttacacagaccacatagatgtttgcattcaacttgaaatacttgttgaaaagcaagttcttgaaatctccaagtatagcaatatcgttgtcggtatagtccgtacttgtatattctgctatattgtatgtgttaagttggtaaatcttttcttcgtttttcatattcatgtctttagctcctttgcaaatgtaaagcaagtggcaggaaatatagagtcctaaatggatacagaagtgtcctaatcttcttgcgtgtgaggctaatttcgaaccaaagaatagaattgttcctttttctgagcattttttttcttgaaacgcttgtcgtattgaaaagaatgtctacttttgcggtgtactattatactaatacacataaacaataagatatttaattcatccaagcgtatgttacaagtagaaaacatttcatttagttatcgcaaggggcggaaagaagtcctgagcgatttttcactttcgctggaagccggccgggtttacggtctgttgggtaagaacggagccggcaagtctacgttgctctatctgatgagcggtttgttggctcccaaacgtgggagagtgatgtatcatgataccgacatgcgccgccggttgcccgtcacgttgcaggacatgtttctggtacccgaggagttcgagctgcctcctatttccttggtcagctatattgaactgaacagtaagttctatccccgtttcagcaaggaagacatggtgaagtacctgcatttcttcgagatggatatggatgctgatttgggagccttgtccatggggcagaaaaagaaaatcttcatgagttttgcgctggccaccaatacttccctgctgctgatggatgagcctaccaatggactggatattccgggaaagagccagttccgcaaatttctggcttcgggtatgtcggacgacaagacgattgtcatttccacccatcaggtgcgtgacattgacaaagtgctggaccatgtgctgattatggacaacagccgcgtattgctggacgaatccactgccagcatttgcagtaagctgttcttcttggagagtgacgaccgggagttggctgcgactgccttgtacacgcttccctccgtacaaggcaatttcttgatgctgcccaatacggaaggtgaggaatcggagattaatcttgaactgctgtttggcgccgtgcttgcagagcctgggaagatagcggaaatgtttcacactaaaacaaatgaataatgatacgcgataccttttttagtttgcatcgctttatgaacgtatgccgcaaagagatggtggagaattggaagacctatatactccgctcggtgatggtctacggaatgttggccatagtctttgtctggaatggatactatcagtatcacaatctggaagcgggagctgtgggcatggaccctatctgggagtttgagtccagattctttctttggggacttgtcatttggggatgcattagcgcctcgtttgccatggaaaggatgaaaagcaagacgagtcgtaccgttgtgctcatgacacctgccaccatgttcgagaaattctttgcccgctggctggtggctacctgcggctttatcttggtctttctgatagctttcaagctggcggacttgacaagagtcgtcttctatcttctggcctacccggagctgcatgtcgttcactcctttccgttgtgggaattctgctgtaacacgaaccgtttctatgagacgataggaagcggaccggctgtggtgggtatattcctgagctgctactttttcctacagtctttcttcctgctgggcagtacggtctggcccaaaaatgcacttatcaagacttttgcggccggtgtctgcatcttcgtttcatatatcctgatagctgtattgtgtctgaaggccattctgcctaataacttcttcatgactgagccctatattgacagggaggcatcgggcggctggctgatttttataacttcgtttttcgcccttttcaactgggtgcttgcctatttccgtttcaaggagtccgaaatcattaatcgctggtaactatgaactttaaggaaagcaaggccatctacctgcaaatagcagaccgcatttgcgacgaggtacttctcgggcaatatcaggaggaagaacgtattccttcggtacgggaatatgcggctgtggtagaggtcaacgccaatacggtgatgcgttcgtacgactacttgcagacgcaaggagtgatttacaacaagcggggtatcggctattttgtgtcggtaggtgcacgtaagctgattctttcgttgaggaaagagtattttctgaaggaggaagtggattatttcttcaagcagattttcacgctgggcatctctgccgaggagttgtccgggatgtatcaggagtttatcaagaaacaaaaataaaagaagacagttatgaaacgaacgacttatataatgataggaatgctggttaccggtgtggcaatggtatgcggactcatgttctatgtggtggaccgcaatgtcactcagaaagataattttatggaaatcggcggagaacggaaaacggtgcagctgccctcgtgcagggtgttgaagctgacacagcctccggtggtgtggaaacagaaaaaagaaggtattgtggaggcggagcgtatattctcgttcggggaagtgccgttggaggtgactgccgactctttgcagcagggcagtttctcctatgcaggggatatggaggcttttatgtcgatgacttccgttggcgataccctgctcgtcacctttgactttccggaggataagctggaacagcatcttcagaatgacatttggataagggttcgttcagaagggatggaattgcggttgcctgcggaggtacaagcggttgtggtagatgtggaggatatggaaaccaatttctacggactccgttgcgatacgctctctttccgcacgcgataccttgcccggctggaagattgccatgtcactgcgcttgcggcgcaggcgcagagcttgcatctcaacagcggcacagtgcgcaacctttatctgaatctggacgagatagccgactgggatgtcaataccggttccttccatatcgatacggagcatctgtccggcagtcgctatcatcgttgtcttttgcagaagaatgaatgccgccgggtgttctggacaccgttaaaggatgatgcctctttgagtgtggagttaaaacaagcagttaaaatagaagtaggtgagtagccataatacgaaatgacttatctttgcacatgaatcaaaaagtgtagagtatatggccttgcaattggcattcgtattggtagctatcattataggcgcccgcttgggcggcattggactaggtgtaatgggagggataggtctggcaattctgacgtttggtttcggattgcagcctacatcacctcccattgacgttatgttgatgatagccgccgtaatttctgccgcatcctgcatgcaggcggctggcggactggattatatggtaaagctggcagaacggttgttgcggaagaatccttcgcaggtcaccatcttgagccctattgtgacctatttgtttacttttgttgccggtacgggacatgtggcatattcggtgcttcccgtgattgccgaggttgccacggagaccaagattcgtcccgagaggccactgggcattgcggtgattgcttcgcagcaggctattacggcaagtcccatttcggctgccaccgtcgcactgcttgggttgctggcgggatttgatgtcaccttgtttgatattctgaaaataacgattcctgctaccattatcggggtacttgtgggcgccttgttctccatgaaggtgggcaaggagctggcagacgacccggagtacagaaagaggttgaccgaaggctatcttgatgtcaagaaggtggagataaaggatatacacaataaacggcatgccgtcttgtccgtgcttatctttatccttgccactgcttttattgtgttctttggttcgttcgacagtttgcgtcctgccttcgtgatagacggcgagacggtgagactcggcatgtccgccattatcgaaatcgtgatgctctctgccgccgccctcatcttgctgctgactcgcaccgacggcatgaaggcaacgcaaggctccgtcttcccggcaggcatgcaggcggtgattgccatattcggcattgcctggatgggagatacttttcttcagggaaacatgcttcagttgacccagtccatcgagggagtggtgaggcaaatgccgtggctgttcgggatagccttgtttgccatgtcgattctgctttatagccaggccgccactgtgcgcgcactgatgcctttgggcatcgctttgagcatttcgcctatgatactggttgctctgttcccggccgtaaacggttacttctttattcccaactatcccaccgtagtagcagccattaatttcgaccgtaccggaactacccgtatcggcaagtatgtgctgaaccactcgttcatgcttcccggacttgtttcgactggcgttgccatcgggctgggattgcttttcatcaggatattctaagggaaaccgctgctttcaatccgttgtatatagggctttgtttacttgtgtataggggagtgttcccttttactcattgccttatcagcgcctaatggtcgtgcggcgatctgctgacggctgttaagcgggttgttgatggccgttaggcgattgcatcatggccgttgcatactgttgattccttatgtccgacgtaataaataccttcattctctgaataaagcacagaggaaaacagtattgaagtcttggctttgtgtggctgtacgcatttgttctgattgcatttgaagggggaggagatggaattaataccgtgtttgcaggatattgatttcgtgcaggtacgatataaataagatgtgatacaagaaattaataacttgtgttacttcatgttagcttcttgtgtgtcagtatttctgtttgtgaaacggtgtggaagcaaattttgcttccacacttttgagttgcttccaccgcatctgtaatgccgatgaataaagggatgtggagaggaggtggaagtgtggaagcaatttgcacaaacattatttgcgcaaacatttttttgggtcaatgtaaaaacctgaggagtaaatttataaattattatctttgtctccaaattcatagcttatggagttaaacggttatcgccttcttcttcctgaaggcactttagagtactttgctcttgttgatgtgaaggaaagcgtaaatgaagttgtgatctaccttgaggaaaaaaatatcgttcctgagaagtatgcagatcaggatactgagagtaaaggcttttatgatcctgttattgttcaggattttcctcttcgtggcaagaaggtcttccttaatattcgtcgtcgtcgctggatcttaaagaagcataatgagtatatctctcgtaactggcgtatggtggctgaaggtactcgtatgacgcaagattttgcgtcttttttaaaagaactatattgatagctatccgatcagttgtaagctcttaggtgttttatatggagttgacggagatttattggagcgtcaataccgtaaccatctaagtggttatctccattgggaccaacttgttcatgcagaggattggctactattcgaaaagaatatcggtgcttatatctgtattgatgaggtagccctctcgcgtggagaactctatactgtactgatcaataaagaagctcacggtggtaaaggtagtatgattgctatcattaaaggtacggacgttcatacggtcacttctgtcctgcttaagctatcccgtctccgccgttaccaagtgcgcgagattactttggatatggctcctaacatggagcagattgcccgcatctgctttcctgcggccaaacgtgttaccgatcgctttcacgtacagaagttagcttatgaagcggtgcaggagatgcgtgtaaaagctcgctgggaggctttggatgaagagtccactcagattgcttatgcaaaggcctgtggaaagatgtatcatgcacctgttttcgctaatggagatacaagaaagcagttgttagcgagaagcatttatctgctttacaagaaggaatccttatggactcagtctcaaagaatacgagctgaaattcttttcaaggaatatcccgatataaagaaaggatattatctgtctatgcggttaggcttaatctatcatcagtgtaagtttaaggatattgctttgacaaggctggcaaggtggtatgatgaagtagataaatcagggttcctcacctttggaagggtcgcacgttctatacaaacacattatctgaatataatcaatttttttgaaaggagggcaaccaatgccgcagcagagtcattcaatgctaaaatcaaagcatttagagcacagttcagaggagtaagagatagagcttttttcttatatagacttgctaaattatatgcttaaatataaaatacctcagattgttacgttgacccatttttttctgtccttgatgggaattaaaaaaatgaggataaacggtctttaaaccttttatcctcattgtagttgcggagatccgactcgaacgaatgacctttgggttatgagcccaacgagctaccaactgctccactccgcgatgttatcgttttgtgggtgcaaaggtacggctttttatttaatatgcaaataaaatgcatgatatttttgaggttaagtggattttaatgagtaatatgttgataaatagaacgataataagcctactttttttcttcctttttagggctgttcattaataaaatgaatgttttcttgtaagatatgcggaaatgtcttacttttgctcaaataataaagcaatgtgcaattaatctatgaccgtatcgaagacaaaagctaaattagtggacgttgcccgtcagctgtttgcaaagatgggcgttgagaataccacgatgaatgatattgccctcgcttcgaagaaaggtaggagaacgctctatacctattttaagagcaaggaagatatctacttggctgttgtcgagtcggagctggatattctttcggatatgatgaagcacgtggtagagaaagatattcagccggacgagaaactgatggaaatgatttacactcatctggatgcggtaaaagaggttgtctttcggaatggtactcttcgtgccaatttctttcgggatatttggagagtggagaaagtgcgcaaacgtttcgatgctacagagacccagcttttcaaggaggttctgcgtgaaggtatggagaagggtgttttccagatagatgacttggatatgactgccgagattgtgcattacagtgtcaaaggtattgaaacaccttatatccgcggccatataggggccaatctggacgatgcggtacgcgatacttacgtgacccgtctggtacttggtgcattgggaaagaagtaagaatacattttataaataattttaaaataatatgggattattagatggaaaaacagccattgtgacaggtgctgcacgcggcatcggcaaggctatcgctttgaagttcgctcaagaaggagcaaatattgcattcactgacttggtgattgatgaaaatgccgaggctacggcaaaagaattggaagctttgggagtaaaggcaaaagcttatgcctccaatgcagcaaactttgaagacactgccaatgtagtggcagaaatccataaggactttggacgtattgatattctggtaaacaatgccggtatcacacgtgacggtctgatgatgcgtatgagcgaacagcaatgggatatggttatcaatgtcaacctgaaatcggcatttaactttatccatgcctgcacacccatcatgatgcgccagaaggcgggtagcattatcaatatggcatctgtggtaggtgttcacggcaatgccggccaggccaactattctgcttccaaagccggtatgattgctttggccaagtctatcgctcaggagctgggttctcgtggaatccgtgccaatgccattgctccgggcttcatcatgacagccatgaccgatgccttgtctgaagaggtgaaggctgaatggtgcaagaagattcctttgcgtcgtggcggcacacccgaagacgtggcaaatatcgctactttcctggcttctgatatgtcttcttatgtatccggtcaggttattcaggtagatggtgggatgaatatgtaatttaatgattaatgattagtgattaatgtttaatgagaagttgggtgttagtcattaatcattaatcactaatcattaaacattaacaaccgatgactgtcgtatacgaagacaatcatatcattatagtcaacaagaccgcttccgagatagttcagagagacaaaacgggtgatacaccgctttcagaaactgtaaagcagtacctgaaagagaagtacagcaagcctggaaatgtctttatcggtgtcgcccaccggctggaccgccccgtgagcggtcttgttgtttttgccaagaccagtaaggcactgtcgcgtctgaacgagatgttcaagaatagcgaggtgaagaagacttactgggcagtagtgaagaacttgccccgcgaggaagagggggaattggtgaactatctggtgcgaaatgagaaacagaacaagagttatgcatacgacaaggaggtgccgggcagcaagaaagcgattttgcattaccggctcatcgggcggtcgcagaactattatctgttggaaatagatttgaaaaccggacgccatcaccagatacgttgtcagttggcaaagatgggctgtcccatcaagggagatttgaagtatggttcgccccgctccaatcccgacggcagcatctgtctgcatgcgcggtatatccgttttgtgcatccggtgtccaaagaaccgatagaagtggaggctcccgtccctcccggaaatttatggaatggttttgaaacgatttaatcttacagtaatgaagaaaatcacagttttgtcgggtttgctgctccttgcgggattggctgcccaagctcaggaaagagttgctgagtataatgtgcgtcctgccgttacggtgcgcactcccctccagggcgatagtatcaacttcaagggagacaagtttactaccggcaatcttctgaagacgaaggtcagtctcgacttcgacggaggtcggtacgaacgtatggttgctgatacggctggatatgtaactgtggcaaaggcagacaaggacaatctgttctatctgtttgctaccaatctgcgtgcggagcgtttcatgaagggcaagctgaatgtatattctcctgcccgttttgaggtgtttgtaaacggtgaatccaagcaagtcaaggagacagcggaggacagcttgtcgcaggtccgtcctacggctgtcagtctgcgtatggaccccgaagcggattatgagattgtcatcaagttgctttcaagcgcggacgacaagatgcagccgatgctgaaatgcgaatttgaaaaggaaaaggactttgccgatgtagcctgccggatggcaccggacatgaagagacgtttctctttgttcaacaccaatttcggctcccgagcgagcagggtttctctttcgcccaacggcaagtatctgctgacccgctattcggacaattacgacgtgaagcgttccaggacccgttgtgagctgaccgaggtaaagaccggccgggtgatattgcccaatgccaatgaaaagatgaactggatgcccaacagcaataagctctattatacggttatgggcgaggagcagaatgacctggttgtgttcgatcccgccacgatgcgtgaggaagtgctgctgaagaatgttcccgaaggatatttcagctggtctcctacagaagactatcttatctatatgctcacggacgagggcgaaaaggtgagtggcccgttgaaacgtctcttgcatccggacgaccgtatccccaattctcgtgaccgctattatctcatgaaatacgatgtggcgacgggactttccgagcgcctgacctacggtagtcacaacgtctatctgaatgatatttccccggatggcaagaaactgttgtgcagcacttccaagccggacatcactcgatgccctttctccctctcttctcttttcgagattgatttgaccaccttgcaggcagatacgctggtcgcctgggatgcttatctgggaagtgcttcttactctccggacgggaagcagcttctggtgacgggcagtccgtctgctttcggaggcattggcaagaattgcggtgaacatcccatagccaatgactttgatacccaagcattcattatggatttggctacaaagaaagtgcaggctatcacgcgcgatttcaatcctacggtgtctctcgtgcagtggaaccgtgtggacggatgtatctatttcgatacgactgatggggattgcaggcatatctaccgttatgttccgaagacgggcggctttgaaatgcttccgcttgaagaagatgtgattacttccttcacgctggccaatgacaatccggttgtggctgcctatgtgggcggaggaaacaccagcacgggcgtagcttatacgtacgatacgaagaaaaaagtttctaccctgcttgccaatcccatgaagcccatcctcgataagattgagctgggacagatggaagagtggaactttacagcttcggacggtacggagataaagggaatggtttgtctgccgccgtcttttgacccgaacaagaagtatccgcttatcgtatactattatggaggaacgactcctacaacccgcggtataacttccccgtactgtgcacagttgtttgcgtcacgtgactatgtggtttatgttatccagcccagtggtgccatcgggtacggccaggagttctctgcacgccatgtcaatgcatggggtgagcgtacggccgatgagatcattgaaggtacgaagaaattctgtgcagcccatccgtttgtcaacgataaacgtatcggatgcctgggtgcctcttatggaggattcatgacgatgtatctgcagactaagacggacatgtttgctgccgctgcctcgcatgctggcatcagcaatgtaacgagctattggggcgagggttattggggatattcctataactctgttgcggcagccgatagctatccttggaataatcccgatttgtttacgaagcatggagcattgttcaatgcggacaagattaatacccctctgttgttgctgcatggcacggtagatacaaacgtgcctatcggtgaaagtatccagttgtataatgcgctgaagatattgggcaagccggtggaatttattaccgtggacggtgaaaaccattttgtacttgattatgcaaaacgtgaattgtggcacaattcaattatggcttggtttgcccgctggctgcaggatagtccggcatggtggaatgacctttatccggaaagacattggtgatttcttagctgataactgtcaactatcaatttaaaaagccgtttcccagaatagacaaggaggaaacggctttttgttgtagtgtgcttactgttattgggccacttttgctgtgtcttggacgttctcggctttctgcaaagtatccgttaccacagtgtcgttagacaaggttgttgtcttactcggctgttctaccggagccttagcttgagccaagaacgttccaccacaaacaaacataaacagggctgctactaatactaattttttcataattcatttgcttttaggttggtatatcttattgttaagtctaagtgcttgcttgttgtagcgcttgttgcttacgtctaatatagttcaaatggtgtgccagaaagaatgtgtgttggataatattctgatagctagtgatatatgtttctatgcaaagtgtggcatagtgtggaaaaatgtggaatgtgtggaggggagtgtggaataattccacaccctttagtcggatatgttataaagcttcaacttgttgtacagcgttttgcggtcaatgcccaacagttgtgcagcgcggctcttgttgtttcccgtctgccgcaaggcttcgatgatttgatgcttctctacctcctcattgcggagagggataccgatgatggccggtgcgggttctttcagttcattcagttcgttgatagtaatgaatttgccttgtgccagcaaggttgcacggcgtaccatattcttcatttggcgtagattgccgggccagggatattccaatagggcgcgggatgccttgtcatcaaagccggtcagttgcttgtccatttcgcggttggcctggtccagaaagaaattggcaaagagcaggatgtcttcacggcggtctttgagttgcggcatgcgtagggtgaattcattgatacggtgatataaatcttcacggaacgcccctttttcaatggcttgctccagattttcgttggtggcggataccagacgtacatccacgcttatctctttgtttgaacctaccggacgtatcttgcgctcttgcaaagcacgcagcaactgtatttgcacttcatagctcagattgcctatctcatccaggaagatggtaccgccgttggcttcgacgaaagcgcccgttttgtcggtcagtgcgccggtaaaggcaccctttatgtgcccgaagaactccgaagcggccaattctttgggaatagaaccgcaatcgatggctacaaacggccggtcggcacgcttgctgagctggtggatgcggtgggctacgtattctttgcccgttccgctggcaccattgatgagtacagacatattggtaggtgaaaccagtttcacataattgtagagttgtttggctgcgtcgctctctccctcgaggaagtcggaggaggacaatgagccttctgcacccttcagaggctgatttttcatcttgtcggaatgcatcgtctgtttgggtgaaacggatggtctgtttggggtaaacgcatcatctgttcgggacgaatgcatcatctgtttcaaagcggaggatgatgcattcaaggcttcgcctatttttttcagtaattcgtccgggttcacaggcttggcaatgtaatcgcaggctcccagtttcatggcttggacggccgactgtatgtcagcgtatcccgtcatgatgataagcggtatttgcaggccgtgttcgcccagccatttcaataagtcaatgccatccttgtcgggcaggcgcagatcagacaatatcaagtctacggtttccgactcaatatgtttttgagcacgggcaatgctgctggcggaggttacttggaaaccttttttgccgagccatgtttttagcatcatgccgtaagtaatatcatcttctacaattaatatggatgtcattgctttagccttttatctcttttatgtaggcaaaggtaagtgcttttgtctgattttagtatatttgcaaacttaaattaaataaaaaacaaaatgaaaagaaatcttattgtattattaactatactggtttgcggtctggctgcttgcaagccgggacaaaagaaagaggaagatatggaaaaagaaacgaagctgaagattgaaacaagtgcgggtgacatcaccgtgaaactgtataatgaaaccccgaaacaccgtgataactttatcaagctggtggaagacggcacgtatgaaggtacgctgttccaccgtgtcatcaaggactttatgatacaagcaggtgacccggaatcgaagaaggctccgaaaggcaagatgctgggggcaggcgacgtgggttataccgttcctgccgaatttgtttatccgaagtattttcacaaaaaaggtgctttgtcggctgcacgccagggtgatgaggtgaaccccgacaaggcatcatccggctgccagttctacattgtgaccggaaaagtgtataatgactctaccttgctggggatggaacagcagatgaatcagatgcgcctgaacaatgctttcaacgcgttggcgcagaagcatatgaaggaaatctacaagatgcgtaagaataatgaccaggacggtctgatggatttgcaagattccttgattgcgcaggcagaggctcaggttgccaaggaaccggagttcaagtttacccccgagcaggtgaaggcttatactaccgtgggcggtactccgcatttggacggtgcatataccgtgttcggtgaagtgctggaaggtatggatattgttgataaaatacagaaggtcaagactgaccgtaacgaccggcccgaagaggatgtggttattaaaaaagtgacagtgatagattgatgatagattctgtcattccattttatgaagataaacaaaaagatatttgacaacggtctgcggttggtgcacaatgaggacaccagcacgcagatggttgccttgaatattgtttatgatgtgggtgcccgtgacgaacatcccgagcatacgggttttgcccatctgttcgagcatctgatgttcggaggttcggtgcatattcctgattatgacgctcctttgcaattggcaggcggggagaataatgcatggaccaataatgatattaccaattactacctgacggttccaaaatcgaatgtggaaatcggcttctggctggagtccgaccgcatgctggaactggcattcagtgagcaaagtcttgaagtgcagcgtgcggtggtgatggaggaatttaaacaacgttgcttgaaccagccgtatggtgatgtgggacatctgcttcgtcctttggcttatcaaacgcatccttatcgctggcctactatcgggaaagacctctctcacattgccaatgccacgctggatgaggtaaaggaattcttttttcgtttttatgcacctaataatgcagtgctggccgttaccggaaatatttcgtgggaagaaacggttaggctgacagaaaaatggtttgctcccattccccgtaggaatgtgcccgtaaggcaattaccgcaagaagttgtacagacggcagaacgccggcagacggtggaacggaatgttcctctggatgctttgttcatggcttatcacatgtgtagccgtgaggatgccgattattatgccttcgatattctgtcggatattctgagcaatggacgttccagtcgcttgacccgcaggctggtgcaggagcagaagttcttttccagtctcgatgcctatatctccggtacacgggatgccggcctgctgcatatcagtggaaaaccatctgcaggcgtatctttggaacaagccgaggctgctgtccggaaagagttggaagagttgaaatccgggtttgttggagagcaggaattggagaaagtaaagaacaagtttgagtctacacagatattcggcaacatcaattatctgaatgttgccacgaatcttgcctggtttgaactgaccgggcaggcggaagacatagaccgtgaagtggacaattaccgctctgtgacggcagaacagcttcatagggtcgcccaacagaccttccgcgatgaaaacgggattgtgctttattaccaaaaagaaaacctttagtatgaaaaaattatttgatacgtataagcagcactataaagcattgcttctcctggggctacccattgtggtggggcagttgggagtcattgtgcttggttttgccgatacgctgatgattgggcatcacagcacggaggaactgggtgccgcttctttcgtaaacaatctgtttactctttgcattattttcagtacgggcttcagctacgggctgacaccggttgtagggggcttctacggtaaccgccgctttgccgaggcagggcaggcgttgcggtgtagcctggttgccaatgtgctggtggctttgttgctgactcttgtcatggctgttctctatttcaatgtggagcggctgggacagcccggagaattgttgcctctaatcaagccttactatctggtgttgcttgcttcactggtctttgtcatgctgttcaacggtttcaaacagtttacggacggcatcaccgataccaagacggccatgtggattctgctcggagggaatgcgcttaacatcgtaggaaactatatacttatcaatggaaagctgggctttccggagatgggactgcttggtgcgggtatcagcactttgttctcccgcattgtgatggtggtggtctttgcggcgattgtgcttcgcggccgccggtttatccgttacaggctcggcttcatgcggctggggtggtcgatgccgatgttcaggaagctcaatgcactgggctggcccgtgggtatgcagatgggtatggagaccgcttccttcagtctgagcgtcgtcatggtgggctggctggggacacttgccctagcatcgcatcagataatgcttactatctctcagttcaccttcatgatgtattatggcatgggcgctgcggttgccgtgcgtgtcagcaacttcaaggggcagggagacgggcagaatgtgcgccgctcggcgtatgccggccttcacatcatcctgtgtatggaggtggtgttgctgggtatcgtctttgcgcttcgcggtcaggtagggggatggtttacggacaatgcggaagtgtccggcatggttgccgctctcttcttcccgttcttgatttaccagttcggcgatgggttgcagattaactttgccaatgccctgcgcggcatctcggatgtgaaaccgatgatgattattgcatttatatcctattttattatatctttgcccgtagggtacctttgcggtttcgttttcggttgggggctgacgggagtctggatggctttcccgttcggactgaccagtgcgggagtgatgctgtggttgaggttccgtaaacagaccagggaaaggatttgatagtatgaataatgtctccaaagtaaagattgccgtaggctacactttgttgctggcggtattgtttttttccttgtttttcgtacaccgggaaatggagaaccttattcttactgatgaccgcgatgtacaatggacagacagcgtgcttgctttgatacgcgagaaggataccaatacgataaaaatgctgcgcacgctgagtgaggcgaatgacagcatggtatccaccagtgacattgagcagataattgcccagcaggactcggtagtgacccagcagcgtgtgcagcaccgtatcattacacatcgggataccgtcgtgacacgccctcggaagaaggggtttttccgtcgtttgggtgaagtgtttgtccccccaaagaaagatacggctatccaggtaaagacctcccttgaatttgcaacggatacggtgattgaaccctataatccggccgattctttgcatgagaaactgcgtgccgtggcccagcagaaaaaagctgtaaacactgttatacagcgacgtaaacgctatctgcaacgcttggaccatatgctgaccgctcgtattgacagcttgctgaaagattacgagacggaaactctgctgcgtgcacggacggaagccgagtatcaacaagcggtccgacgccgttcggccaagattatcagtggcattgccgtaggtgcggtgttgctttccgctttttttcttattatcatcggccgcgacataacccgaagcaaccgttaccgtcgtgagttggaagaggcccgtcgtcgtgccgaggatttactcgctgtccgtgaaaaactgatgcttgccattacccatgatttcaaagccccgctcggttctattatgggctatgccgacttgctttcccgtctgacggtggatgagcgtcagcggttctatctggacaatatgaaaacctcatcggaacatctgctgaagctggtcgttgatttgctcgacttccatcgtcttgatttgaacaaggccgaaatcaaccgggtcacctttcatccttcccgcctgcttgaagagatacacgtcagttttgaaccacttacggctgccaaaggactggcgcttcattgcgacattgccccggagctgggcggtacctatatttgcgaccccttgcgtctgcgccagattatcaacaatttgctgtccaatgccgtgaagtttacggaccaaggcagtgttaccatgactgcccgttacgaggaccgtcgactggtagttgccattgctgataccggtaaaggtatggaacctgccgaccgggaacgtatcttccaggagtttacccgcttaccgggtgctcagggtaaagaggggtttggacttggactttccattgtccgtatgctggtacagttgcttgaaggcacgattgatgtagacagtgtgccaggcaagggaagcactttcaccatatatattcctatctatcccgtaaggagtgaaggacggagaatgaaggatgaagaatcgggatgtgctgccacgccgaatggcaattcttcattccccgttcctcattcttcactgaagaatgtcctccttatcgatgatgaccgtattcagcttacccttactgccgccatgcttcagcagagtggtataaattctgtctcttgtttacaactggatgaactgctggatgccttgcgcactgcaacctttgatgttctgcttactgatgtgcagatgcctgctattaatggttttgatttactgaaactgcttcgtgcttcgaacataccgcaggcacagtctgttccggtgattgctgtcactgcccgcagtgacatgcagcgtgaggaatttacggtgcatggatttgccggatgcctgcataagccgtttaccgtcagtgaattgctacatgaattgaatatggaggacaaagggatggaggttatggaagtttcggaaacttcggcttgcccggggtataaattctcttcgctcactgctttttcggtcgatgaccccgaggcggcaaagtccattctggaaagttttgtggctgaaacccgcctcaatgcggagcgtttgcagaaggctgtggagaatgaggatgtggacgagatggctgctgtctcccacaaaatgattcccctctttactttaattggagcagcggaactggttgcattgctgaaactgttggaaacttctcatggagtgccttttaccggagagttgaaagaacacgcccttgccgccctcgttttgatagaggatgtcattactcaggcaacagcttttccgtaatgggggaacagagaagaatacgtgatttttctctgtcgggaaccaaatgtcgaaagaaattgtttactttgtaggacttttaaatacgatgaaagattgacgttccgatgagaagaaaatggttgagaacagcactgtgggtgttgcttactcctattatactgtttataatattgatgatattgctttatgtgcctcccgtacagaatttgatacggaagcaggctacggcaattgcatcaggtgctacgggtatggacatatccgtggagcggattgaccttcgctttcctttgaatttgttggtccgcggtgtattggtggtacagcctgccgacagtgctgttgatgtgcagcatcccgataccttgctgaatcttggaagtttgaacgtacgggtacaggcatggcctttactcaaagggaaagtggaggtggatgacattaccttgaaacaagttgctgtcaactcctccaatttaatggaaggtatgtgcatcaaaggagtactggggcatttctttttcgaaagccatggcatagaccttacaaaagaagatgccatcctcaataatatagaattgagcgatacccatgtgcaggtgatgcttgcagataccactgagactcccaaggacactactgacactgcgttaaactggaaagtcacactccatactctgaagttgaagaacgtctcggtcgatttacagatgccattggactccatggggctgaaagcccatataggagatgctgagattgcggacgctgctgccgacttgaaacaccagttctatggctggagaaaattcctgctgactggaacttctgtcaattatgataccgctggcccggggagtgcgataggcttcgacccctcgcacattgctcttcgcgacattcgcctgggcattgattctgtgatgtactacggcagagatatgaatgccgttatccgggaattttccatgtatgagcgttccggtttgagcgtcacctccctgaccgggcggttgtttgccgattctaccgttatccgtatcccttctttgaagttgctgacacctcatagtgagatgaaccttacggcacagacttactgggaactgataaatatacctaccaccggccgtctgacagcccgtttcaatgcccgtatcggcaaacaggatgtactgctttttgccggtggcttgccggaagctttcaaggaagcctatccgttccgtccgttggtgattcatgccggtacggaaggaaacctgaagcagatgcagatttcccgttttacggctgagctgcccggagccttttcgttgagtgggggaggagaattctggagcttgaccgacagtgtgaaacgcaatggaagcatggacttcgaaatgcatacgcagaacttgaacttcctgaccggactagctgacattgctcccgatggctccatcattgtgccggacagtatgcaccttgcggcacgtctcggtatggagggggcgcagtgcactgccgccctgaaactgaaggagaaggaaggcgccttgaatttggacgccgcctataatcttgctacggaagcctaccatgccgaccttgccatcaacaacttgcaggtgcatcacttcctgcccaaggactctatctatactcttacggcaaagatgtccgctaaggggcaaggggtggatgtggcatcacgaaaaactgtggccgctttgaatgcctccttggaaaaactacagtatggccattgggacatttccggtgtagatgtgcatgccggactcaagtcatccgttgctaccgtccgtcttgccagcgataatgtccttctcaagatgcagggaaatgcggatatgcgtcttgaccgcagctatctggatggcgctttggatttaaatgtggaagaggtgaatctgcataagctgggtttggtgccccgaccattgaaacacccgtttgcctttacaatgggagcggaggcacgtcatgattctctcaagttgaggcttgatgccggtgacttgaatctgcgtttccgcgctcacagcacgttgaagaagttgatggaacagtcggataaatttgtctctatcctgacaaagcagattgatgaacggcgtttggaccatgccgctttgcgccaagtccttccttcagcgggcatgcatctggaagccggtaaccagaatcccgtcagctatttcctggctgcaaagggtatttcctataatgatttcaaactgagcttcggatttactccgcaagtcggcatcaatggacgtacagctgttcacggattgcgcatggactccttgcagctcgatacgatattttttacagtaaagcaggatactgcccgcatgaagttgcaaggtggtgtcataaacggtcccaagaacccgcagtttgtgttccgtagcacactgacgggtgaagtccgtaatgaagatgcggaactgactgtggattatgtgaatggaaaagggcagaccggtgttctattcggtattaatgcccgtccgttgaccgaaggacacggtcgcggtaatggtgtgctgctgaaccttattcctgccgagccgattatcgctttccgtaaattccactttgcggacaatagtaactggatttatctgcataagaatatgcgcgtctatgccaatattgatatggacagcgacgatggtctgtgtttccgtatgcaatccgacaagaatgataccctttccttgcagaatataaacgtagaactgagccgattgcgcttggatgaacttacggaggtacttccttatatgccccggcttacgggattgttctccgccgaagcaaattatatacagactgccacttccctgcaggtgtccgccgaagccaatgtagagaaactgacctacgaacgccaaccggttggagacatcggcctgggggctacctggttgccgggcgacaagaatacgcactatctgaatacctattttacatatgataatgaagaagtgatgaccgccgacggtatcttgacgcagaagaacggaaaggataccctggaagtgtccacccgtttcgagcattttccattgaagatggccaatgcattcatccctgaccaaacggtggcctttaccggagatattgatggagggctttatatttatggttcgctggacaagcctcaaatgcatggtgatattgttttggacagtgtgtctgtctatgcacgccaggcgggagcacgttactggttcgacaaccgtccggtacagataaaggacaatcagttgatatttgataagtttgccatttataccaccagcaagaatccgtttacgattgacggtaaggttgatttccggaatatggagcgtcctactgccaacctcaatctgctggcagagaactatacgttgctggatgcaccgcgtactcgcgaaagtctggtgtatggaaaggtgttcgtcgacttgcatgccacggtgaaggggccgcttgacgggctcacgatgcgtggaaacatgaatttgctgggcaataccaacgtaacctacgtgttgaccgattcccctttaacggtggaagaccgtctcagtgggctggttacctttacctcgttcaccgatacgacgtcggtaaaagcagatgaggttcctgccatgtctttgggaggattggaaatgtatatgtccgtccatattgacgatgctgtccgtcttcgtgccgacttgagtcccgaccgtagcaaatacatcgaactggaaggtggcggtgatttgaatatgcagtatactccccaaggggatatgagccttaccggacgctataccctttcgggtggcgtcatgaaatattcgctgcctatcatcccgttgaaggagttccagttcaatcccggcagttatgtggattggcgggggaatattatgaatcctacgctgagcctgaaggctacggaacgtatgcgtgcttctgtggccgatggtgacggggacggttcgcgcatggtgaacttcgatgtttccatttccatcaagaacaggcttgacgctcccgatttgatattcgatatttcggcgcccgaagatgccgcagtagagaatgagctgcaggcaatgggtgcagaagagcgtagcaagcaggccattgccatgcttgccacgggtatttacctgaacagtggtgccaaaggaggaggtttgtcaatgggagccgccttgaactcagtacttcagagccagataaactccttggcgggaggtataaaaggggccaatatcagtgtaggtgtggaagaccgtacctctgctgaaacgggtgacacgcagaaagacttcagttttcgttattcccagcgtttcttcaacgaccgcgtacagatagtcatcggtggaaaagtgtccaccggggccaatgccacgaacgatgcggaatcattcattgacaatatatcgctggaataccgtcttgatgcgtcgggtactcgatatgtccgtgtattccataataaaaactacgaaagcatactcgacggtgagataaccgaaacgggtgtcggccttgtgctgcgccggaagatggaccgattgagtgaactcttcatcttcaggaagaaaaagataaaaccggaggctgaaaatagcgatatgaaaaagtaggaatgtgatatgaaacgactgatattatatattgcaggattgatatttctggcaggttgctccaccacgaagcacttgcccgagggggagatactctataccggccaaaagccgatgattgtattgaaccgcagtgaaacgtctgttggtgagattgctatggaagaggtggaagccgcccttgctacggcaccgaacaattcgttgctgggaagctctactatccgctatccctttcctttcggactgtggatttacaatggtttccagaagtatgagaagggattcggaaagtggatattcaataaatttgccgccactccggtgcttatgtctacggtgaatcccgatatacgccagaaggcggcggttaacttgttgcgcgattatggctatttcaacggaagcgtcagctacaagacatttatcgacccgaaggactcgctgaaggcaaagttgcaatatacggtgaacatgcgtaacccctactttatagatacggtatattatcgtggtttcagcgagcgtaccactcgcattatggagctgggacgccgacgttcccttatcagttcgggagaacaattcaatgtggctgatttggatggggagcgtacccgtatcagtaccctgctgcgtaatgtgggctgttattatttccgtcccgactacctgacctatcaggccgataccatgatggttcccaatgggcatgtccagatgcgcttgattcccgttcccggtatgccaaaggtagccgagaagcagttccgtgtggggcgtaaatccgtctatcttcttggaaagcaggggcaggaacccaatgacagcatggattacaaaggcttgaccatacattactacaacaaaccaccggtacgtcccaacatgctttaccgttggttgaactatcaaggttatcgacggaaacgtcagatacaggacagcgcaggtattgcccgccagcgttctatgcagagtttgtatagcttataccgtcaaacccgtattcaggagcgtctggcaagcgtcggtattttccgttatgcggagatacagtatataccgcgtgatacggcgtttgtgtctgatacattggatgtgaaggtcattgccgcgctcgataaaccctacgatgcggaattggattttaatgtcaccatgaagagtaataaccagacgggaccgggtgccgcttttacggtgacgaagaacaatgtcttcggtggcggtgaaagctggaatgtgaagttgaacggttcgtacgaatggcagacgggcaaggcaagttcttccttgatgaacagttatgaactgggtatctccacttcgcttatctttccgcgcgtggtgtttcctaggatgggcgaccgtgagtatgacttcccggctacaacgactttccgtttatatgccgaccagatgaaccgtgccaagtattataagctgttggcttttggcggtaatgtcacttatgacttccagcccaaatcgacttccaggcacagtataactcctttccggttgacattcaatgtactgcgcaatcctactgccgctttcgatacgttgcgtgccgagaatcaggcactctacgttagtttgcgcgaccagttcattcctgccatggagtacacctatacttatgacaacgcttccgtgcgcggcaagcgtaaccccatctggtggcagaccaccgttgcgtcggccggtaacctgacttctgccgtctaccgtattttcggcaagccgttcagtgaggaaggaaagaagcttttcggggtaccttttgcacagttcttgaagctgaactcggaattcaggtaccattaccggatagacaagaaccagatgatagcctcgcgtattgccggaggggtgatatggtcgtatggcaacgctacgaccgcaccttatacggaacagttctatatcggcggtgccaacagtgtgcgcgccttttctgcacgcagtataggtccgggcggctatcctcccgagacggataggaaatatacctatatcaaccacgtgggtgatattcgcatagaagccaatatcgagtatcgcttccgtatgattgccgacttgcatggagcggtattcttggatgccggcaatgtatggctgatgcgtaaagatgaaaaccgcccggatggtgaatttacgttgaagaatttcccgaaacagattgctttaggcacgggatttggcttgcgttacgatttggactttcttgtttttcgtctggacttgggtatcgggctgcatgatccgtatgataccgggaagtcggggtattataatattcccaagttcaaggacagcatggcgttgcattttgccatcggttatccgttctaaatgtacctttttgaacggatagtggtaaagaatgaactaaaactcccttctgtcagccataaatttttgtacatttgcaaccgttatcaactgtgatacactaacctttttaaataataactaagtatgaaaccaactttattcttattggcagccggcatgggcagccgttatggtggcttgaaacaattggacggactgggcccgaatggcgaaactatcatggattattctatttacgatgccatcaatgcaggctttggcaagcttgtgtttgttatccgtaaagattttgagcaggatttccgcgacaagattatttccaaatacgaaggccatattccgtgcgaactggtattccagtccattgatgaccttcccgaaggcttcacttgccccaaaggccgtaccaaaccttggggaaccaaccatgctgtaatgatgggtgccgatgtaataaaggaaccgtttgctgttatcaactgcgacgatttctacggtcgtgattccttccaggtaatgggtaaatttcttgcagcccttcccgaaggctccaaaaacgtatattccatggtaggcttccgcatcggcaacacgttgagcgaaagcggtaccgtatcccgtggattgtgcggaacggatgcgaacaacctgctgacttccgtagtggaacgcaccaagattcagcgcatggacggtgaggtgaaatacatcgatgataacggtgaatggactgccactcccgagacgactccggtcagcatgaacttctggggtttcactcccgattactttgcttacagtgcagagtttttcaagagtttcttgagcgacccgaagaacatggagaacctgaagagcgaattcttcatcccgctgatggtggataagctgattaacgatggcactgctacctgcgaagtgctcgacacaaccagcaagtggttcggtgtgacttatcccgaagaccgtcagagtgtagtcgacaagattcaggctttggtggatgcaggcgagtatcctgcaaagctgttctgagtttgttaaccaaaggcagatacccgttggggctcattctctgattataatcggacaatagattcgcatgcctccgctactgccggatggtgggtgacgaagatacatgttttgcctgcgcagtctctgcgcaggttttttattaacagccgttccgtgtcggggtcgagggcagaagtggcttcatctaaaagaagaatgtttccggggcgtagcagagcgcgggcaatggcgatgcgttgggcttgtccttcactgagtccgccacctcgttcgctgagtggggagtctacgccgtcgggaaggtggaagacgaagtcggcggtggcggtttgcagggcttgatatatggcttcttcagaagcttgtgggtttcccatcagcaggttgtcacggatagttccgctgaaaagggtattgccttgcgggacatatacgaagttcttgcgggtttgcggagagacggtatgactggtttcaagtggatgtttggcgggtatcaagagtatctgtccctcttgtggcgttgccagtgccaacaatagccggatgagcgttgtctttccttttcctgtttctccgactacagctacgaatatacctaagtttttcacgtctgtcctttttcacttttttgtccttctgttgctttttcattccttttattttccgggttcttttatttctttgtccttgctttcttgtcttttactccttttaatcggtttatttgtatagctatcgttccccctatcagagtcacgggataccagagtgcttcgtacggtgcaaattgacgcagttcgttgcagcgtcgggtggcgcggcagaaggtgtaccactttcctgcccaatatcctttggggcgtggcttgatgcggttatcatgttgcccgaagttaccggtagacaggatgtcttccaataattgttctcctatctgcttggtgccttccaaggggaaaggaagccggttggcgggcaatcccagtcgggtgacggcaatgtagccgaatgcttgtgcggcatgcaatagtccgaggtcctgcaactggcgaagcagggtggtggcatctatttctttgtggcgattggcaagcagacaagtccagtcgcatagctggcgcaggccgattccgctgttcaggaaatgtacaaaggcatgtaggaagatataaagtgcattgaaggtggccggaggtatggcgatactgacggccttcgagtcctctttcccggtttcggagaatagggcatagtctgtttcctgcggataccattttctgataatctgctgaaagtgccggttggcaagcggactgttcagccggaggatgatgcggtggttctcgatgtgtactcctttcaaactgtagctggcatgcttgtcggacgcttctccctcgactatggcgccttgttgcagcaggaggcggttggctatgggttgtccttgttttcctaaatagatgtcgatgtctccgcattgccggtgcaagggagtgcggtagttggtgccgatgccttgccctttcagcagtacgggatgcagcccggcttcccggtaaagggtattgagttcgggcagaagctggttgaggcgtttgttggcttgttctatctgtgcagtccgggcagcccatttcagatagagggcgcgtggagggcgcagttcggccggtagactgcttatgccgtcaaaagtcagtgcaagcagggcttgtgagtttgccatgcggtacacggtttcccagtcgtccggcgagaccgaccggaagagttgtcggtctgccggagtgccccacaggccggagcgtaccaatgaaaagaaagcgtgttgcatatccgtccttattctatgattccttcgcggtcaagggagtcgataaacttctgcgcatcgcgacgggccgattcgttatctacatcatagcggctggtcagggcttctgtcacgctgtctgtatcgaactctttgttttctatctcttgccaaagcatggcggaagtttggttcaggctgatgactttgctgaagtccacgttcgacgagccgtcttgcatgatgatgtagtcatcgcctatccggtgcaggataaatccttgtttgattttcatggttattttgttttatattcttctgaacagggcgagcagccagcggcgagcagggtttagcttcatccaccagtaggagtagagcttccagactttgccgtcggcggtgtaccgtttgtcttttcgcatggcttcggtcatgacgcccattacccgtccgatgtcggtttcttcggtctgggcgaggttgccgtcgccttgcaggatgagtatgtctccgttccgacggatgatgcggtgaaagacgatgcgttccgtcaggtcgcgtgccagtacggtgacgcccggttgcagctgttctgtggtgaaatcgcccagtgtcacccggtcacggcggtccactaagaaaggattcatgctgttgccccgcacggtgatggttactgtatgcccctctttgatgagacgcgccacttcgggaagcaatatctcgttgggaatgcttttcttcatcggctgttcagttcatcattcataacttatccttctaccgtctttctgcaaagctccgtcgcttcacggtcgggcaggcatttcagatgatagacgggtgccagcgtggcaagttccgtcacagtggtgacaatggcgttatagatttccttgttctgcttcaggcaagagcaggaggggaggagggtggcgaaagcatgtgctgctctctcttgctctatttcattctgcggtgcttgttccaagcggacgaaggcgcctacggtcatggattctttccgatagcatggtgtctttccgctccacggagaaccgaaaacagtggcttgcttgccgaggctgtccacatgtactatcggattgtcatcgttcagtagatggcagtccgagaactgttgcagccagagcccggtgtgcgtacttttgcccgtgccgcttttccctaagaagaggtagcctttgcctgtttcagtagcgacaaccgaggcatgcatcagcagtgtatggtggcgggcggcattgaaggcatagagcatcatcaagaagttgttcagtacgaagttcgtttcgttttccggagccggtgtttctgtcctgcaggccggtaggtggatgaagcattgcctgaagttatcgttgcactccatccaatagtttttcccgcttttccgtggggtgatggatacaaggtgtgagctgtggggcaaagggcgaatgatgcaatcggcatcttcccagttgaaacatatatcatcgggagttttcgctatggttcgttttgtcgctgtttcgtcatcgtctatctctgtttcaaagattactttttgcgtcgtgtctattgtcgtgatgaacggaatcagtgaaggcaacgccttgaatatattgaagtcggaaggtttcaccatgcggaaggtgtgcggtcctacttgataatccaatatctgtattctcatatgttttgattgttagttgttattcatgatactttgggctactcagaaaaataatgaatgtttgtgtgaatgaggaagatttgagagatttttcaactgtcttgttgtcattttttagacgcggaggacgcagatttataaaagaaaatccgctgtccgccgcatctaaaagatagtaataaggcgattccgatacctcttcgtttggtctgcgaggatatattgcttcctttcttagaatttggcttatcggttctcctgacttgtttggccaacaatatattctttcctcccatcaccgactttgtgggctgctgtatatacactgccgtcacgggtaacctcgtaacctgttaccaaataggattcattgtcgtccatattcggatttgccgggttgaaattgatgaacgttccaccggacacctggatgctggcagtgttcttgtctgtattctttaagttcagtacccagtatctgccatccgtgtcgttgttgggtgtaccatatttgccggattcaaatgttcctccatagatattgattttcccattctctcttgcataaatcaggtctatctgggtgttcagtttctgggtgttatagtaagaaccgccatgaatatttactgtcccgtgtcctcgggcttcaattaccatgcgataaccatcgtctttcgctgtagcagatgcatcgcacttcacattgccgttgcctgaaatgtttagtgttccgttctgtacagtaaagatttgtgtgaaaggagtggcatcagctgtttctgaggaattgatgatgtcgtggccattcaggtttaagtttgccgttgcgtttgcagcattcaatatgtagcctgtggcaagctccgtcttggcgatgttgatatttgagagaagttttatatccacagttgcgttggttgccatgtacttcagtacgcttgggtcggagaatgtacctccggaaacagagatgatacttttggcattttcggttcccacggatgcatctacctttaagtcaccgttgaaagtaccgcctgtgatattcagcttcataggttcggtatttcctgcactcttggaaatttccacttttccattgatgacgctcgtaccgcttaccgtaaccgtgactccagcagtgtactttgcatagccgcatacgtcgaatgcaaattgattcgcattgcttcctgcgttgatagtggtattgttgatgcttatattgccacaattgttgcttactacgtattgggcatttgtgtcttctactgtcatattatctaatgtcaggttgcagtagttctgaatcatgattttgttgttgtcactcttcagcgttccgttcttgaaagtaacgtttgaaccttcgagtaattgacagctgttcgtttcggtgccggtggaacctacggtcgggtcagcaagtgtaaggatcttgccgcctaagtccatcgtcaaggtttgtccgcttgtggtcttgaatcccgggcaggtcttgtcggcggtcaactttatgttcacatttgcatttgtcttcatgtacttcagcgcgcttgggtcggagaatgtaccgccggtaacgttgatgaccggtgtataagtggtgccttctgtgatgagtgactttgcttcggcaatcagtgtaccgcctttgatgtttactgtggcaatgccatatgctccacttacgttgatggcggcgcagtccagtcctccggtaccgtcgccccagttgccggtgctgcctgtgcctttactggtaatcaaggctgtgccttccacgttcagagtgcctcgttggatgcatacacctcctgcggcaccataaaccttgccgccactgatggtcgttgtgccggattggggcagatagactgcatagtcagcagtagaaatgagttctccgtctgtgatgttgatgatggagttctgcgtcttgtaattgccgttgcctgccactgcaaaccatccggcttctatcttgccgcctgtcatggtgaagtctccaccgtccgtcactccgacgccatattggccgttactgttcggagtctttctgactgcactgatgttgccgctttccatggtcatggaggcatcttcaccggctatttcaatcagactgccattataagaagccgctgtataatcctggctggcaactatcttgcctttcttctcggtagagctgtccttcagtgtcatcttgcccaagacgatgattttgcctgttgcgctgttgtcggcagtcagtgtatatccgttcaagtcaagaaccacggactttccggcgggtacactgacgctttgccctgtgatgtcggcatcggcggacaatttaaaatcttcgccgttggcgaaagcggcctttaggactgccacgtcggattgaactacaaatttgctgtcgattgttgccggaagtgatgcttcggttccttttattatatagattgtggtatcgccggcatcgtgtaccaattgttctacctttccatatatcttcaagttaccgccttttacggtcagcttctttacggtgacgcctgcattgataatcaatgtctgctgggcggtagtggcagtcacttcattgtaagtggctttattgcctactgctgccaatgtaacggtggtgcttggcatggtgatggctacagaaggagcttcttgctctgctgtggtttccggcacagccaaggatacactgttggtggcagtggcggcgggagtacttacgctggtattggtcttgtcggtcagctttaacggggcagaagtgctggttgtcggggctgtattgaacgccaggttgatgtccgagttctgtaaaaccgggatggcgatgccgtcgttgctgccggaagtggtattgaagctgccgctgactgcaatgtcggttacggttgctgctgtcggtgcttcttgtgggagattttttgaatcagctaaagctgtactaagcgcactgggggttgtagcctctaccacaacgcaatccaaaggaggtactaccaatatgtctcttctgcctaggattttgtcattaagcgtcttggtaaaatataccttgtcgcttccattcgtcagttgggcagtgatggaactataagtacctgtgggcaaaggaatgtagaagttgcgagactttatatcagctgaggctgtgaaggaggcggtgatttccttgctttcatcgctcgttactgccagtatcgggtctgctgcggttaagtctaccgtacaagtacctgcaatgttattggaggcaataatcttgaaagtagtggcctctgccggaatcttgttgacggtcagttttatcatggctgccatgtgcttgaaggacagagcgctcagattgtcgggatttgtcaccttggcatacatcgggccattgctgctgccgttataatttgtaagcgtggcaggtagagtcatggtcaatgtattgccgcttacgctcatgttttgttggtaaggatagatggagaatacagccgtttctccgcttggcttgctgccgttgaaagtggcggaagtttgaccagcaccgcttgcatattctaattttgtattgctataattactttctgcattactacagaacaaccctagggcatcggtatcttgccatagaatcttgtatttatcgtttacggtagtacgggtgtcggtacctgcgccttcaaacgttgcgttaacggtgatgtttcctttccgcccgctgttttcaaattcctcttggctgcaactgaatgcggtcaaggcagcagttgccatgcaggcaacttgcataaggtttcttaatttcatcataatgaagtcccccttagttttctacggttaagatgtcattgattaggtcttccaagtcgctgctggatgccgaattgtagctatgggtagaggtgctgcccgaataggagcgcgtaatgggatggtaaggttcgccgcttgttgcaatgactccttcattctccattttgataacttcgatagacggagtgatgtatgcttctctaccgtctggtgtgttctgtttcatatacacaaattatttaaaggttaaacaataaaaaaaacgtgagtaactatgtttgtatatcctttattcaggccttcgcattgccctttccctggatatacaacagtcactcacgtcgtttgtgtatataccatcccccctgatgggagaaaaccatataaacatagacgtgagcatccttgttgttatcttcagggaaattttcaaagttgcgaagtttgaataaagaagataatttcaataatgctcttactaatatgtaaataaacccactacgctatagcggatttgtgacaaagataattgttttttgtttaagtgtatctatgtttctctattttttttgggaaaggctcacgtctctttcatttataggagttaggagagttatcacttctaactcccgataactccttcaaatatttagtaactgtctgcattgtctttgaggatgtttttctgaggagcatagcggctatgtggcgaataaagaggggaagacagaccgaaaagaagctgaataaaatctttttaagcaaaattaaaacagagatttgatatactttaaacagaacaccctgcaaactccggcttgctctgtccggcagtttgcagggtggctgcttggttttctcgcgtgtacgtagctccttacgccacgaacggaagtcgatgccatagcaatttttcataataagactttccatatttttgcaaatgtccgtactgcctttggctgaaacaatttatataagtaattgaagtttcgtaagtgagtatgcctgctgataaatgggaatttatcgcacagagcgcgaagcctgctctcataacctatggagagcacgagtgaaagcttgtggatttttatctaaaacataggtattcctttactcttctccctttgtttgtctgctgtggcatagggaatttatgacgcctaacggccatgaacaaccctgctttcgaccataaagcaatcgtttgacgaccgtaagcagagttgttcatggccgttaggcgtcactaactccagagctattacagatgaagtacgtagcccgaacctattgcgcacaaggcgcaaacgtattatacaacggtgtaaaagacattagagtgcattattcatagtcggcctttgattcccgataactcctactatgctcctacagtccaactccatatccgttgacttcacagtaaggacaagcccgaaaatgcaggaaaaccgaacctgccgattcatgtaatctgcatgctgtattatggtaggggatagcagcttactgcaaaactcaggcgtttcaggcaggtggaagcaaattttgcttccaccttttcaggttgcttccaccgcagggcaaatgccgatggacagggggatgcaggaggtgggtggaagtgtggaagcaaagtgatggaaaattaatttggcattcacacaataataaccgtatatttgtagcatggctgtctgcctcctcttaaattcagataaagaggaggtagacaaatgcttgctatgagaaacacataaatggttataaccaagtgatgaaacaattaattgcatgttgcgggttggattgcgaaaattgcgccgcccgtatagccactgtcaataatgacgatgagctgagagagaaaaccgccaaagagtggagtgtgctgaacaatacgccggaaattacgccggaaaccatccattgtatggggtgccgtgcagacggggtgaagtttgcctattgcagcgattattgtgctatccgcaaatgtgtgtacgaaaaaggtttcaatacttgtggcgactgtaaggaactggatacttgccaggtggtaggtgcggttcttcagcatgcgcccggtgcaaggggaaatctttattaaccgtaaaatctttgattaaataaaatattgcttatctttgcagtatgacaaagacatttaaatcggatttggttttgtaaacaatctgtgttccatgcacagattgtccctttcgtttactttcggataacttctttcgagagtgtttttctattgttataattcaagtttaatccgcatattatgctgaaggtgttgtgatactttccgtatatgcaaaatatagtaagaaaatgagtaacgaaaataaaaccatccacgatttcgaacttagtttaatctgtgactttttctccaatatggaacggcaaggccctggcagtcccgaagcgacgttgaaggcattgagctttgtagacggccttactgataaatcccttattgccgatataggttgtggaacgggtggccagacaatagtagtagccgggcatgtgccggggcggattaccggaattgaccttttccccggctttattgacatcttcaaccgtaatgcaaggcagttgggcctgcaggacagagtaaaaggaattgtcggttcaatggatgccctccctttcggtgaggaggagctggatatgatttggtgtgaaggtgctatctataacatcggctttgaacgtggcttgaaggagtggcgtaaatatctgaaaccgggagggtatattgccgtatccgagagttcatggtttacggacgaacgtcctgcggaaatcaatgacttctggatggacgcctattctgaaatggatacacttcccaatcaggtagccaagttgtacaaggcgggttatctccccgttgctacattcattctgccggagaattgctggacagagcattactttgcttcaaaggttgcggctcaggagattttccgtaagaaatatgccggtaataaaattgccgaagagttcagctcactccaaatgattgaggatgaactatacggcaaaggtatataaaaaaacagattttttacgcccggtaaataagaaagtcaagaccgcgactatctttgtggtaaaaacgaggtcatagggtttccccatcctcatatgtccaacgggcttgatgtcccaataaaaaaatacttctatgaaggtagtctgcggtcttgacgtacacaaagatagtgttttttgctgtattctgtgtgctaatggagaaaaaatccagcataaattcggagttcttaccgaagagttggtcacacttcgcgaccttatggtctctgaaggtgttgaagagtgtgcaatggagagtaccagtatctactggatacccatatggcgagtgcttgaagggtcagtgaaacttcatctggtaaacccttattttataaaacagcttcctggcaaaaagagtgatgtgaatgatgccgaatggatagctacttgtctgagtaaagaactgatagcatcaagctttgttcctgatgataaaattcaacgtctgcgtcaatatgacagaaggatatttgacctgaatgtttccataagccgcaatttagtcaaacttgaccaatgcatccagaggtgcaacatcagaatcagtaattatatatccacaacagattccaaagggtaccgttcaatagttaaacttatatcccaaggtgtgacagatgcggaagtccttgtgaaggaactgcatggaagaacaatcaacaggcatggcagagaaacattggtgaaagcacttaccggagttgtcagcgagaccgacatagacattataaaccagcttgtagaagagattgaattgcagcaacgacacaaggacgaagcacaggaaaagatgactgcactatgcatggagtggtttcctcaagaagttgaaaaccttcagactataccgggagtgaaagaacgtagttcgacctcaataatagcagaaataggaacagacatgacacatttccagacaccaaagaaattggtgtcatgggtggggctaagaccccgtaacgaggaaagcgctggcaaaatcaaggcacgaggtatcacacatggtaacaggtttgtaagaaaaaccatgattgaatgttcatggggagctgcacgtatgaaagattcatttttcgcagaattctcatacaggcaatgtatcgaaagaagaaagaacaagatgaaggtgcaagtagctattgcgagaaaaatacttgttgcagtatggtatgtacttagtcagggaactcagtatatcaaaccaacagatcattatacggcaaccgatatgactgccgtataatgatacaaccgtccgttacaaggtcaatatatttgtggtgattatatcccgttttcgcaaagtggctatcgtttcggacggagtaggacacccggttgagttttaatctcgaagaggaaatgtacataattgttcattgttccgactataatcggaactgaaccgtcatgcagtagtgcaaggaaaaaagatgtagaaaggaatagacactcgtttccactcacaaagatagtcgcggtcttgcttttcatagaggaaatataaggaattctacggttatgtgttttttattgctaagaaggtagattgatggcagacttctcttattgaggaatgcgggtattctcatggcagaatatccgcattttgtgttttgagtggattttattgttttgaggatgtgcggaacttctgaggaggtattcccgtatgacgtttaaagaatttgttgaagaaggccgcattattaaaacctagactcacggctatatcctttatcggagtgttggcggtacaaagttgtgctttggcatccatgatgatagtattgttgatgatttccatggctgtatgtcctgattcctttttgacaaggcggcaaagagctgccggtctcatattcattttcaatgcataataggacacttgatgctcccggacatagtctgtgtgtaccaatcggataaaaatgcggtattggttgaaatgcctgctgcccggagtctcttttattctagggcgttccggacagagttcggatataccttgtaacagataggtcagtagagtttgcaatgaaactagacttgaggggctttctgttctttggtagaggtgtgacaaataggtcatgaactcggcataaagctggaagtccgttttcgatagaggaaaaatatagtgtttgcctataatgtgaaacttatccatcatgaccttgccggcccctgaactctggataagttgttgggaaaatatgacgacatatatttcagcatcgtctgacgtgtgtagcaattgtacgaaggtctcgggaggaataactaggagggtgttagcttcaaccctgaattgagtatggtttatgatggttttcagaactcctttggtgcatagagcgaagatactggccttggtgtggtatggcttttccactagcggattcagttcattggttgtgatatgattgcaggcaatgaactcggcatttatattgaattcggatatattcatgttggagattttaagacacaaaaatgggggataataatgtataaatgacagagataacagttaaaatcaatattacgctcaatttgtctctgttaaataaggtaaagttgtgaataatagaatatatacatgctaaaacggaatattgatttataagggtttgtttgtggcataagcattttagcccgaactttgctccttgtatgataaaacaattctgatgaatccgaatgttcctcaagaagtacgtataataaatgccatctccgagcagttgttcaactcatggcccgtcagcattattatgattgatttggaagattgtatctggcgtctgaatcagcaggtgatgaatgaactccatttgaatgagtatgtgatagggcggcgtatcactgacttattggaagtggtatgtgataaaaagaatgtgttagaagaccttttgctgcaacttcgggagagggatgtgcggattattcccttagatatcaattgctttatacgtgaattgaagagtggtatcagttttctgatacaaggtgctatggtgggaattcatgaagatggacaattggtgaggattgtactctatttcaggaatgtgttggaagaacggacacagaagcatttgctgaatattgcgctgagccgcacccagatatttcaatggtctttcgacatggaacataatctgatgattatagaaccgcgttattttgaatatttggggattcctacgcgtgactatacgctgacgcctgaggaattcgcatttctgattcatccggacgaccggaagggagtgtttgatgctttggctttacagttgcatggtaatttgtacgaacacccagtggaataccgtctacggaggggagacggcaagtgggagtggtttgaggcgcaatctacctatgtggggcaattgacggatttgccgttccgtatcatcggtatttgcatgagtacgcagaaatacaaggatacggagaataaattgaacgaggctttgcagaaagcgcaacgtagcgatgagttgaagagcgtatttcttgctaatatgagccacgagatacgtacgccactaaatgccattgtgggcttctctacactactggcttgtggggatgccgacttgtcgcggcaggagattatggaatttacgtctttgattgaaaagaacagccagttgttaatggtgttgatttcagatattctggatttgtccaagatagaatcgaacacgatggaattccattttgagaaggtttctttaaatggcatattggaaagcatttacagtgcgcagaagatgaatcttcggaaaggagtggagctactgctagaccttccggaccgggcggcagttatctatacagatcctacgcgtttggggcaagttgtcaacaatcttatcaataatgcggtgaagttcactgctgaaggacgcataaccatagggtataggctgaaggactttgctacattggaagtctttgtggaagatacgggaactggcatgtcggaagaagttctggcgcacatttttgaacgtttctataagggagatgcttttgtgcagggcacgggattgggattggccatttgcaggactatcgttgaaaggtttcatggaaaaatagaagtggcctcaactcttggcaaggggagccgctttgcaattgtccttccgcaggaaatgcgggagtagtgttctctttcttggatatttgatgtaattatgtgagcgtatgatattgtataacgttgaaaatcgctacctttgcagtcttgaacgataaattcattgacactatgatatctgtagaaggactgaaggtagaatttaatgccactcctctgttcgaagacgtctcttatgttatcaataagaaagaccgtatagctcttgtcggcaagaatggtgccggtaagtccaccatgctcaagatattggctggcattcagcagcccactgccggcgttgttgccgttccccgtgaatgtactatcgggtatttgccccaagtgatgatactcagtgacaagcgcaccgtaatgcaggaggctgaacttgccttcgagcatatttttgagatgcaggcgggcatcgaacgcatgaatcagcaacttgccgaacgtaccgactacgatagtgaggattaccagaaactgattgaccgcttcactcacgaaaacgaacgttttctgatgatgggcggcaccaactaccgtgccgaaatagagcgcacgctccaagggctgggcttcagccgcgaggactttgaccgctctacaagcgagttttccggtggttggcgtatgcgtatagagcttgccaagctgttgcttcgccgtccggatgtgttgctgctcgacgagcctaccaaccaccttgacatcgagagtatccagtggttggagaacttcctttccacccgtgccaatgcggtggtgcttgtcagccacgaccgcgcctttttgaacaatgtcactacgcgtaccatcgaaataacttgtggacgcatttacgactataaagtgaaatacgatgagttcgtggtgcttcgcaaggagcgccgggagcagcaactacgtgcttacgagaatcagcagaagcagatacaagatacggaagatttcatcgaacgtttccggtacaaagctaccaaggctgtgcaagtgcagagccgcatcaagcagctcgaaaagatagagcgcatcgaagtggatgaggaagacaactcctctttgcgcctgaagtttgtttgcagtagccgtagcggtaattatcccgttatctgcgaggatatggagaaatcctacggtgggcacgttgttttccacgatgtgaatttgactatcaaccgaggagagaaggttgcttttgtcggtaagaacggcgaaggtaagtctacgcttgtaaagtgtattatgggtgagattacggattataccggtaagcttacactgggacataatgtgcagattggatattttgcccagaaccaggcacagcttttggatgagagcctgactgtattcgatacgattgaccgcgtggccgtaggggatatccgcctcaaaatccgtgatattctaggtgctttcatgttcggcggtgaggcttcggataaaaaggtgaaggtgctcagcggtggagagcgtacccggcttgccatgataaaactgctgttggagccggtgaattttctgattctcgacgaacctacgaatcatcttgacatgcgttccaaagatgtgctgaaggaggctatccgcgattttgacggaacggtgataatagtcagtcatgaccgtgattttttggacggacttgcgactaaagtgtacgagtttggtggcggactggtgaaggaacatctgggaggaatttatgatttcctgcaaaagaagcagatagagagcctgaatgagttacagaaatccccttcactttccgcttcgcccactgccggtaaggctgcatcaggaaatgctggtgcagaaccggctcaaccctcggcagccaaactctcctatgaggagcagaaagagcttaacaaaaaacgcaagaagctggaacgccgcgttgccgattgtgaagcggagatagagcagacggaggctgccattgtcattcttgaggccaggatggctacaccggaaggtgcttcggacatgtcgctttatgagcagcaccaaaaactgaaagagcagcttgaccgtgtgatggaagagtgggacgcggctactgtagagttggagaatcactaactattatattttatatatttatgaaagcaaatcatttgttacccattgcagcattctgtctgatgacggcatcctgcaacaccggcaagcagcaggctgaacttacagcaggcatccagctcgccaatcttgacacaacggctctacccggaactgacttttaccaatacgcatgtggcggttggatgaagaacaatccgattcctgctgaatactcacagtacggttctttcactatccttgcagaaaacaaccgcaagcagattcaaggactgattgaagaacttgccgccacccagcacgaagccggcagcgtggcacaaaaaatcggtgacttgtacaaaatcgtaatggacagcgtgaagctgaacaaggacggtgtggcccccatcaaggctgaactcgaccagctggctgctttgaaggacaagaaagagctttatgccttgctgggcgatatgcagaagaaaggtatcatcgcctacaacgtgctgtatgttggtgctgacgaaatgaacagtagcatgaatgccgtacagacctatcagaccgggctgagcatgggcgaacgtgaatactatctggaagatgatgaggctactgccaaaattcgtgatgctttccgtacacatgtacagaagatgtaccagttggctggtttcgacgaggctactgccaagaaaggtatggaggtggtgatggatgtggaaacacgtctagccaaggcttttcgctctcgtacggagttgcgtgacccgcatgccaattataacaagatgagcatggaagagttgaagaagaattatcctactttcgattgggatgcttatttgtctgccatgggcttgaaggatgtgaaggaaatcatcgtaggccagcccgcttcactgaaagctgctgccgatattctggatacgctgcccattgaacagcagagcctttatctgcaatggaaattgattgattctgccgcaagcttgctgaacgatgctatggcagaacagaacttcgacttctacagccgcaccatgagcggtacacaagagatgcagccccgctggaagagagcggtaagcactgtaagcagcgcgctgggcgaagctgtaggtcagatgtacgtggagaaatatttccctgctgctgccaaggagcgtatggtgactttggtgaagaacttgcaggaaagcctgggcgaacgtatccagaatcttgcttggatgggtgattccactaaggtgaaagctctggagaaactggctaccttccatgtgaagattggttatcccgacacttggaaagactactccacactggaaatcaaaaacgactcttactgggcaaacatggaacgtgccaacgagtggagccatgccgaaatgatagccaaggccggcaagccggtggataaggacgaatggctgatgactccgcagaccgtcaacgcttactataacccgaccaccaacgaaatctgtttccccgccggtatcctgcaatatcctttcttcgatatgaatgcggatgacgccttcaactacggtgccatcggtgtggtaatcggtcatgaaatgactcacggattcgacgaccagggtcgccagtacgacaaggacggtaacctgaaagactggtggactgctgaagatgccaagaactttgacgagcgtgcccaggtgatggtaaacttctttgatagcatcgaggttgctccgggtgtatatgccaacggacgcatgacattgggtgagaatattgccgaccacggtggtctgcaggtttcttatcaggcattcaagaaagctacggctgccaatccgctgccggtgctggacggtcttactcccgaacaacgtttcttcctggcatacgcaggtgtatgggctaatgatatccgtcccgaagaagtgctgaaccgcacaaaaagtgatgtgcactcattgggcgaatggcgcgtaaacggtgcattgccgcaaatcggtgcttggtatgaggcattcaacgtgacagaaaaagacccgatgttcttgccggtagaaaaacgtgtatctatttggtaaaccaacaaaataacccttaaaaaaaggcggcagactggaaacagatgccgccttttttaattatacctaatttattgtgtatgaatgtatgtatgaataaacaaaatttgtaactttgcgcatcaaatactaatatacgcatactttaatacgcaaatccatgtctgaaacaaaaagaatcaaaacagctctggtatctgtttaccataaggaaggtttggacgaaatcattaccaaactgcatgaagaaggtgtagagttcctctcaaccggtggaacccgtcagtttatagaatccctgggttatccctgcaaggcagtggaagacctcactacatacccttccatcctgggcggacgcgtgaagactttgcatccgaaggtttttggaggtattctttgccgccgcggattggagcaagacatgcaacagattgaaaaatatgaaatccccgaaatagacctcgtcattgttgacctctatccgtttgaggctaccgttgccagtggtgccgaagaacctgccatcatcgaaaagattgacataggcggtatctctctgattcgtgccgcagccaagaactataacgacgtggttatcatcgcttcgcaagcacaatatcagccgttccgcgacatgctgatggaacacggagccactactaccatcgaagaacgccgttggtttgccaaagaggctttcggagtgtcttcacactatgattctgccatcttcaactatttcgatggcgaggaaggttccgctttccgttgttctgccaacagccagaagactttacgctatggcgagaatccgcatcagaaaggttatttctatggcaatattgatgctatgttcgaccagattcacggtaaggaaatctcttataacaacctgctcgacatcaatgctgccgttgacttgattgacgaattcaaggatacgactttcgctatcctgaagcataataatgcttgtggactggcttcacgtcccactgtgctcgaagcatggaacgatgcgcttgccggtgacccggtatccgcttttggtggtgtgctcatcactaatgccgtgattgacaaggctgctgccgaagaaatcaataaaattttctttgaggtgattatcgctcccgattatgatgtggatgcgttggaaatcctcggtcagaagaagaaccgtattatcctggtccgcaagccggcagctctgcctaagaagcagttccgctctttgctgaatggcgtattggttcaggaccgcgaccttaaggtggaaactcctgaagaattgaagactgtaactacgaaggctcccactgcacaggaaattgaggatatgctctttgcaaacaagattgtgaagaacagtaagtcgaatgccattgtgctggcaaaaggaaagcagttgttggcaagtggtgtaggtcaaaccagccgtgtggatgctttgaagcaggctatcgagaaagccaaaaacttcggtttcgacttgaatggcgctgtaatggcaagtgacgcattcttccctttccccgactgcgtggaaattgccggcaatgaaggcgtaacagccgtcatccagccgggtggaagtatcaaggatgaactctcgtttgaatattgcaacgagcatggcattgccatggtgactacgggattccgtcactttaaacactaattcggatttacgatttgacgatttacgatttacgattgaagttacatcgtaagtctgaatctcaaattgtaaagaagaggaatatcaatcgtaaatcgtaaatagttaaatcgtaaatattaatgggattattctcctttacacaagaaatagcgatggaccttggcacagccaataccatcatcaccacgaatggcaagattgtggtggatgagccttcggtggtggctttggaccgtcgtaccgataagatgattgccgtgggtgacaaggcaaagatgatgcacgaaaagacccacgaaaacatacgtaccatccgtccgttgcgcgacggtgtgattgccgacttctatgcctgcgagcagatgatacgcggacttatcaagatggtgaacaaccgtaaccgtctcttctctccgtcactccgcatggtaatcggggttccttcgggcagtaccgaagtggagctgcgtgccgtgcgcgactctgccgagcatgccggcgggcgcgacgtttatttgattttcgagccgatggctgctgccatcggtatcggtatcgatgtagaggctcccgaaggcaacatgattgttgacataggtggtggttctacggaaattgccgttatctctttgggaggtatcgtaagtaacaactccatccgcattgccggtgacgacttgactgccgatattcaggaatacatgagccgccagcacaacgtgaaggtcagcgagcgtatggctgagcgtattaagattaatgtgggtgctgccttgacggaactcggtgaggatgctcctgaagactatatcgttcatggtccgaaccgcatcacggcattgcccatggaagtgccggtatgctatcaggaagtggcgcattgcttggagaagtctatctctaagattgagacagccatcttgagcgcattggaaaatacgcctcccgaattgtatgccgacatcgttcacaacggtatctatcttgccggtggcggtgcattgcttcgtggactggataagcgtctgactgataaaataaacataccgttccacattgcggaagaccccttgcatgccgttgccaaaggtacgggcgtggcattgaagaacgttgaccgcttctcattcttgatgcggtaatgcgaaatttattaaactttctcattaaatataattactggttcctctttcttctgttagaggttgccagttttattttattatttcgctttaatcattaccagcagagtgtgtatttcacctctgccaatggcgtggcggggaaggtttatgaaatatcgggtggcatcacttcctatttccacttgaagacggccaacgaagacctgctcgaccgcaacatgtggttggagcagcggctttcgtttctggaaaatgtcttgaaggagaaaggattggactccgccaggttgtacagcatggaacggcttgctcctacggagtatcagatattcaaggcgaatgtcataaagaacagcttgaacaaggctgacaattatatcactttagaccgtggaacaacagaaggtatccgtcctgagatgggagttgtagatgccaatggcgtggtgggtattgtgtataagacctctccccattactcgttggttattccgttgctgaacagcaagtcgagcatcagctgtaagattgtgggcagtgattatttcggttatttgaagtgggagggaggtaattcccgttttgcctatctgaaggatttgccccggcatgccgaattcaatctgggagatacagtagtgaccagcggctattccaccgtgtttccagaaggtgtcatggtggggacggtggatgacatgtctgactcgcacgacgggctttcgtatctgttgaagataaagctggctacggactttggaaaggtgagcaatgtgcgcgtcatttcccgcaacgggcaggatgaacaaaaggcattggagtcgagggcggacgagaagtgactaagaaattagggattaggggttaaggattagggattaatcatctttatatcttataacttatacactcaataacttgtaactcgtaacttataactcattagcgttgttaattaattatctgcataaaataggatggttcataggcttggtactgttgcaggtgctgatattgaacaatgtgcatattgcaggatatgccactccatttctgtatatctacttgatactgaagtttgagtcggacactccccgcaatgcgttgatgttgtgggcattctttttagggctggctgtcgacgtcttttccgacacaccggggatgaacgctgccgctacggtgttgctggctttcttgcgccccactttcctgcggctgttcgtgcctcgtgacacgctggatacactggttctggccatccgtacaatggggattcttcctttcctgaaatatctggttgtgagtgtgctgatacatcacggcttgttgcttaccctcgaattcttctcttttgcccatattggtacgctgttgttgagaattgcggcaagtaccctgcttactgtgacctgcattatggctgttgagggaataagaaagaaaggataaagggattaaggattaggaattgatgaaagactatacactggaaaagcggaaatatgtaattggagcggcggctattgtcatcgttcttatttacgtgttccggctgttcgacctgcaaatcatgactgatgactacaagaagaacgcggacagtaacgcttttctgaacaagatacaatatccatcacggggggctatctacgaccgtaacggtaagttgctcgtgtttaaccagcctgcctatgatattacgtttgtgcctcgggaggtgacgcagctggatacactcgacctttgcagtgccttgaacattacccgtgagcagtttgacaaacggatgaaggacgtcaagaaccgctggatgaaccccggttattccaaatacacccatcaggtgttcatgacgcagctttctgccgaagagtgcggtgtgtttcaggagaagctgttcaaatttccaggtttctatattcagcggcgtactatccgtcaatatacctataactctgccggccatttgctgggagacatcggcgaagtgtccaagaaagacattgagaacgatgactattatattcgcggagactatataggcaagcaaggcatcgagaaatcctatgaaaagtatctgcgtggagagaagggggtggagattctgcttcgtgacgctcacgggcgcatccagggacactacatggacggacagttggaccgttcctccgtacccggcaagaacctgacgttgggcatcgacattgaccttcagatgttgggagaacgactgctccaacacaaaatcggtgccattgtggccatcgaaccggctacgggtgagatactatgtatggtttcctcgcctacctttgaccctcatctgatgatagggcgccagcggggaaagaaccaccgcctgctgcagatggacaagcggaagcctttgttgaaccgtgccatcatgggagcttatccgccgggctccaccttcaagacggcgcaggcactgactttccttcaggaagagattatccacgaagattatccgactttcccttgtgcgcatggtttcaatcataaaggccttcatgtgggatgtcacggacatggttcgcctctgtcgctgattcctgccatcgctacctcttgtaattcctatttctgttggggattgtatcgcatgttcggtgataaaaaatacggttcgccgcagaatgccattaccgtatggaaagaccacatggtatcgcagggcttcggctatcggctcggtaccgacctccccggcgaacagcgtggactgataccgaatgcaaagttctacgacaagccctatcggggttcgtggaacggtctgacggtgattagtatctccatcgggcagggagagattctcgccaccccgttgcagatagccaatctgggtgccaccattgccaaccgggggcatttcattactccgcacatcgtgaaggagatagaagacaatgaactggacagcatctatcgcaatccccgttatcccaccatcgaccgcgaatattatgaaatggtggtgaaaggcatgcgtgccgctgtagacggaagtacgggtagcgccacttgccgcatggcgggagccatcctgccgggtgtggaggtctgcggaaagacgggcacggcacagaaccgcggcaaggaccattctgtctttatgggctttgccccgatggacaaccctaagatagccattgccgtctatgtggagaacggtggtttcggtgccacgtatggcgtacctatcggtgccatgatgatggaccagtatctgcatggaaagctgtcgcccgagaatgagatacgggcggaagaattcagtaaccgggtgatactttacggagatgaggagagatgatgattagggattaaggattaggggttagggatgaacggtgagtgacttcaatagtaaatagtaaatagtaaaatcgtaaataaattggtgacaaggagagatagcatatggaaatcattggactgggtgacgattgtcgtttacctgctgctgattgtattcggctggttcagtgtctgtggggcgagttatgattatggtgaccgtgactttctggacttctctacgcgtgccggcaagcagtttgtctggattatatgttccttcgggctggggtttgtgctgctgatgctggatgattccctctatgacatgttctcctaccttatatatatagggctgatgctgttgctgattgtcacgatattcattgcgcccgacacgaaagggtcgcggtcgtggctcattctggggccggtcagtttgcagccggcggagtttgccaagtttgccacggcgctggcgcttgccaagtatatgagcgcctactcgtttacgatgaagaattggaaaagctcccttatgctggctttcttgattcttttccccatgttgctgattatcctacagcgggagacgggttcggcattggtgtactctgcatttttcctgatgctttatcgggagggaatgccgggcgtggtactgttctcgggtatatgtgcagtggcctactttgtggtgggcatccgttttgatgcggtgatgattgccgatacaccgacgcctatcggagaatttgccgtgctgctgatggtactgctctttgccggaggcatggtgtgggtctataaaaagcgctgggagcccacgcggaatattatcggcggttcgctgggagtgctgctcgtggcttatctgatttcggaatacgtagtacccttcaacttggtgtgggtgcagtgggggctttgtgcacttgttatcgggtatcttgtctttctttctttaagcgagcgccatttatcttattttctgattgggctgtttgctttgggttcgataggtttcctctactccagcgactacttcttcaataaagtgctggagccccatcaacagatacgtatcaaggtggtgctcggtatggaagaggaccttgctggtgccggctataacgtgaaccagtcgaagatagccatcggctccggggggctgaccggcaaaggtttcttgaatggtacgcagacaaagctgaagtatgtgccggagcaagatacggacttcattttttgcaccgtgggtgaggaggaaggattcgtagggtctacggctgtactgttactgttccttattcttattttacggctgattgtcgtggccgagcggcagcaatctccctttggccgggtgtatggttattctgtgcttagtatattcttgttccatctattcatcaatataggcatggtgctggggctgacccccgtcatcggtatcccgttgcctttcttcagttacggaggttcttctctctggggattcacaatcttgctgtttatctttctgcggattgatgcgggacgtaatcgtcgaatttagttatgaccgtttccttgtgggacatacgaatggacttgattatcattacattgcatttacacattgtttacatcgtaatgtaacggccgttacaccgcattgtaacgtcctttacgctgtatcgtaacgacttttacgctatattgtaacgccctttacatgctggtgtaacggtcgttacatcctggcgtaaaagacgtaacgctacgaggtaagagggcaagttatgataccccgcccgtttccgcttcaaggagacgtgagtgggagactgaggtggttgttagaagaaggtaataaagaacaatagggagttcctatctcttcagtttgatgccgatgtcattgattccttgcagcctttcgtccggtagcgtataggccactttaaagaggtaggtgccgggtttgccgattcgaacgcttcctgcgggaacggcagtctgatagagacctccccagccgtcacctttccagattccttctttgtccgcgaggattagctgtatggtgtccgtgggtgacggaatggaatctgcggtggtgtagcagatggatagaggtagattctgataggggtagttgcttcggttacgaacttccaaagacagtttgtagtaggtcagtgagtcggtgaccttcacgtcgaaagagagcgtgtcttcgcgcagccagccttcggtgggaagggattggaaggaatggtatacagtctgtttgtcgcaagcgctcagcaggcttgcgacaaacagtagtatgatacctttcaggcagagattcctattcttgagccggtttgtcattttgggcaggtctttcaccttgaggtttgggcttattgttacggggcggacgacggttgttattgttccgttgttgacgttcgccttgttgctgttcaccttgtttgggtgcttgccggtcttgtttctgtctcggttgccggtcttgcctggattgttctctctggttgttggattgcggagcaccctgctgctcacctccttgcggacgaccgtttccactctttttctttctcttgttacggctgttgttgctgttctcgccaccgttgccgtcaccgccactcttgcctttccggctgcggtcaaagcgggtgaggctctcttgttccagcaagtccaccggctttttgggctcggagcgatgggtttcttctatcaggctgtcgggcttgatgccacgtttgttcaaaccgataatctcgaaggcgcgtctgccgctgatggtcaccaggttggcagggatgttcttgtcacttgagtaggttatctggttgctcagaatgtcggctttgaagaagaagaactcgccgtctttggtttccagggtaatctcgcgtgagggcaggcgtttctgtgcttccacgtagcagtccacttcgtagttgaggcagcacttcagcttggcgcattgtccggcaagtttctgcggattcagtgatatgtcctggaagcgtgcagcgctggtagataccgacacgaaggaggtcatccaggtggcgcagcagagttcgcgtccgcagggaccgatgccaccaatgcgtccggcttcctggcgggcgccaatctgtttcatctcgatgcgcacgcggaaggcgtcggcaaggaccttgatgagctggcggaagtccacacgctcgtcggcgatgtagtagaagatggctttgttgccgtctccctggtattccacgtcaccaatcttcatgttgaggttgaggtccagggcaatctggcgcgagcgtatcatggtggcgtgctcgcgggcttttgcctcgttgtacttctccatatctacgggcttcgccttgcggtagatgcgtttgatgtctgcctcagacttgatattggctttcttcatttgcagcggcacgagacgtccggtcagggtcaccacgccgatgtcatgtccgggggtggcttctacggctacgatgtcgcctttctccaggggtatcttgttgctgttgcggaaatatcccttgcgggtattcttgaactgaacctctaccagctcgctttcatcggcattgcccggtatgtcggccagccagtcgtaggtgttcagttgcttgtcctgcctgccgcaactcttgcagcagagacctccgcttccgttatgtagtttaaatttcatcatctatttatttactatttgactatttacgatttgatactttgcatttcattattttgccacttttcattgtttcaataaaacaatcattttgagagagaagtcgaaaaacaccatgcgggcgtttacgttctgctcgatgtggcgttgcgcttcacttagttcgtccatgatacccatgacgttccgttcgttgacaaagggggcgaaacgggtggcgaagttctgttcgggcagcgtcatgtagttcatctccttgcggtgcaggttgtagatgaagttctcgcgggtcatgcgctggcagtagtccaggaagttcttctgccgttcgcgtcccatggcagcaagctgctcgctccattgtttcatttcccgtatcttgcgctggtaggagagtcgcatcaggctgacaaagaggttgaagaacagttcgttctcttcgttcagatggatggtctccaatactttgatgaagtctccgtttgccaggtgggctatcgtctcgctgtcgcggggctgcactccgtacttctgctgcagggcttcggctatgtcggcttcttcaatcttaggaatgttgaagcgctgcgtgcggctgaggatggtgggcagtatcatttccggagcttcggagatgaggaggaatatcgttttctcgggtggctcttccagcagtttcagcagcttgttggcgcatacttcatgcagcttttcgggtagccatacgatggtgactttgtaacctccttcactggatttcagactcagcttgcgggttatctcgtcgctttctttggcatagataatagcttgtccgttttcggcatccatctcgttcagccagtggttcagcccgaagtaggggctgttcagcaacaggtgccgccagttggcgatatagtcgtcgcagacttcctttttccctttggcgctcttgacgatagggtatacgaagtgtacgtccgggtgcaccagcttattccattttacgcaggagggacaagtaccgcaggcatcggtttccgtccggttgggacagcagatgtagcgggcataggcaagtgccaatgggagttttcctactccggcagggccacagaagagttgtgcgtgggggatacgtccttcctgcacttcttgtatcagcctttgcttggctgcctcttggcctattatgtccttgaaactgaacacgggttaattagttataagttattacttgtgacactgcctattgtcaattgtcaactgttgattgtccattgtttagtagatttgtttggctacttccttgatgctgtctgtagctcctaccgagtagaagtggaggcttgggacgccatgggctatcagctctttgcactgctgcacgcaccattcgatacccacttgctgagcttccgcatcggtgttgcacttcagaacctcttgggtcagttcctcgggcaaatctactttgaacgtcttgggtatcatgctgagttgtgacaacttcttgaagggcttgatgcccgggataatcgggatggtgacaccggcttgacgggcacgttccacgaagtcgaaatatttccggttgtcgtagaagagctgggtcacggcatactctgcacccatttccattttcttctttagccagtagatgtctgtatccatgttgggggcttcttcatgcttttccggatagcacgccacaccgtatgaaaacggggtattggtaactttcatctcggagccgtccacaaaaatacctttattgaagttgttgatttgctcttgtagttcgacggcgtggtggtaaccgttgcccacggggataaaagaggattcgtgctttgccttgtcgccacgaagcaccagcaggtcggtgatgccgaggaattgcaggtcgagcagcacgtactccgtctcttcgcgggtgaagccgctgcaaaggatgtgcggcaccatggtgatgttgtacttgttctggatggcagcagctacggctacggtgccggggcggcggcgcaggcggtttcgctggaacaatccgttgccgaggtctttgtacacgtactcgctgcggtgcgtggtgatgttgatgtatttggggtcgaattcccgtaacgtatctatggtttgatacagcttttcgatgcccgtacctttcagtggtggcaatatttcaaaggaaaaagctgttttttcgttactgtttatcaggtcgattactctcatttctctttcgttatctttgtccgattggcaaaaatcttgcacattgggaacaaaaatacaaaaaagaaatgagaaatgccgaaattgccggctattcttttatacagcggatggaaagagctttatagtagggcttaccggtgacatgggcagtgcttgatacaaactcgtcgctttcgccgagaaaataaatggtgctttccgaaagggtatgctttgtatgatcccaactccaaaaggcggtcattttattggggctgttgtgtcctttgttgtaccacattcctaccgggaaagcattgaaccgggtatggttgttgacgggggcaacttcaccggataccattgcctgccattctcctgcttttagtatggaggcatcgttgccggtgtagtttttcagctgttcccagtctgcatccgatggaattttccagccctcgggagccagctctcctgccagtatggattctccattgtaaaaataaatatcatatttgtccggcttgtaatatccggctttgtctgttcccaagtcactctgttttttcaagggagctccgtcacggtaggtggtggcatggagctctttacccatccagtattgggctccaatcttgacaatggggtattcggtagacactccttttctgatgtctcgaagggtgtagcatgccacattcactttgatggcgttttccggtttatccagaagtagcttatggttattgtctatatagagcttgtctatgccggtatattcccctttagtgtaggtaaatccatagtcgtctgtattccagcttattcttcctccgcagatggtgtctttacggtctgcaagctgtaggatgactccattgctcaggtcggtcttttcattttcgcctatgggataggctataacggctctggaagtcaatgacgctgatttgagatattccttgcagacttctgcaatgggtatcccttcgtgataaattctgtacacatttgaaagagaaaaggagagagcggagatatgtatggcagtgtaatcttccatattgtcggtgtcgatgggagggaggctgctccattccttgatttttccggcaaaactgctcagtacgttgctgttgctctgcatggctgatatgttaatgatacattgcgtgctgctactcatttccacttcgggtattgcacaactgtatatacgtccgctccactccataatgaaggattgcttgccatcatttatcgtttggggtatgatgatgaattccttgccggtaagtttgttgtctttgacgctccattcgccggaggctatgatgtcttgtgtccccgtaagattactgaaagtcccgtcttccagattataatcggccgaggtcttgagcccggttgcgatgatacgcggattggctttcagcaaatcattggcagagttgcttgcgtcgggtgtcagagagattgccagtttggacagcttgtgttggaactccagggttacagatttggttttactggtgattccttgcgctttagctaccaagaagtcactttgtgcgcggtttttctcattgctctggtctatctgcacagatacgggaagaacgggtgtaccggcagctaccccttcggtttggtaagggtggtaactgataaagtccagtgacacatctccttccggatagaatactgtctttttgggaaccagtgtggagccttccgtatattccagggccagattgtcaatataccgttttcccttgatggagccggaggaagtggttgcaaacaagcccattctgtctcctttttcaaaggcggtgtttgtgaccttggtactggccttttccattttgatagagaacgtgataggtgtcgtcccttcctcgatttccgcttctgattcttcgtcaatccggttcacacaagctgtattccctaaggacatgcagcagaataaagaggcagccaagactcctcttgcaagaataagtttcttcattatattattattgtggggcaacggtttttccgctttcccaattatacccaatgaaccttgtcttaaaaatatggatttagcagagctataaccggtatggaaaagtcttttacgcttttggatgctaattatcagtatcacgcttgatgccgcagtgctttttaatcttattttttaataacttttaataggtttcgggtacaaatgtaattaaacgtgttaaatgaagagggataaatcgataaaacttttataatttatttatcacactctgattttttgcctaactttacacgctaaaatcgtagacagtaataagttaaaccatagatataaactcatgcctttaaatttacccgataaactacccgctatcgagttgctgaaagaggagaatatatttgtcattgacaattcccgggcaacccagcaggatatccgtccgctgcgtatcgtgattctgaacttgatgccgctaaagattacaacggaaacggacctggtgcgtctgctttccaatactccgcttcaggtggaaatctcgttcatgaagataaaaagccatacttccaagaacactccgatagaacacatgaaaacattttatacggatttcgacaagatgcgcggtgaaaagtacgatggcatgattatcaccggtgctccggtagagcagatggattttgaggaggtgacttattgggatgagattactgaaatcttcgactgggcgcgtacgcatgtcacctctacgctctacatctgctgggcggcgcaggcagggctctatcatcattatggagtgccgaagtatgcactggataagaagatgttcggtatctttgaacatcgtaccttgcaaccgttgcatcccattttccgtggatttgatgatatgttctatgtgccgcatagccgccacacggaagtgcgccgggaagatatacagaaggttccggaattgacgctgctttccgagtcggaggatgctggtgtatatatggcggtggcccgtggagggcgtgagttcttcgtgaccggccattcggaatactccccgctgacattggatacagagtatcgccgtgacttgaataagggcctgcccattgagataccccgtaactactatgtggacgatgacccggacaaaggagtgctggtgcgttggcgtgcccatgccaatctgttgttctccaattggctgaattattttgtatatcaggagacgccgtataatattaatgaaatagggtgagttactcgtaactaaacgatgataaagcaacgtaaaatagagctgctggctcctgccaagaatttggagtgtggcatagaagcagtgaatcatggggcagatgcggtatacatcggtgcacccaagttcggtgcgcgtgcggctgctgtcaactctttggaggatattgccgctttggtggagcatgcccatctgtataatgcccgtatctatgtgacggtcaataccattctgaaagaagaagagctgaaagagacggagaggatgatttgggagctgtaccgcatcggtgtggatgcactgattgtacaggatatggggattacgcggttgaatttgccgcccattccgttgcatggcagtacgcagatggataaccgtacgccggagaaagtacgtttccttgccgatgccggtttccgtcaggtggtgttggcacgcgaactttctttgcaggagatacgcggtatccatgaggcgtgtcccgacgtgccgctcgaagtctttgtacacggggctctttgcgtcagttatagcgggcagtgctatgtcagccaggcttgtttcggacggagtgccaaccggggggaatgtgcgcaattctgccgtttacccttcagtctggtagatgccgatggcaagaccattgtgcgtaataagcatctgctttctttgaaggacctcaaccaaagcgagatgttggaagaactgctggatgccggagccacttcgctgaagatagaaggccgcttgaaggatgtgacctatgtgaagaatgtgacggcggcttaccgtaggaagctcgatgccatttttgcccgtcgcaaggaatatacccgtgcttcttcgggcacctgccgtttcgattttcagccacagttggacaagagcttcagccgtggtttcacgcattacttcctacaaggcaggggaggggaaatcacttcattcgatacgcccaaatctttaggagaggagatgggcactttgaaggaacagcgcggtggatatattacggtggcaggcgtgaagcctttccacaacggagacggcgtctgttttttggacgagcaaggacgtttgcagggtttccgtatcaaccgggtggacggtaacaaactctatccggcaggggaagtgcctcgcatcaaacctcgtacacggctttatcgcaatttcgaccaggagtttgaacgtatccttacccgtaaatcctccgaacgcaaaatcggtgtttgttgggagttggcagatacttctttcggtttcagcctgacggctgcggacgaagatgataaccgcgtgacactctctttcccttatccgaaagaaccggcacgcacgccacaggcggataatctgcgcagccaactggctaagttggggaatacccctttcgaggtagccgggcatttatcagaagaggcgtcgggtatcaggctcaatctctctgaaaactggtttcttcctgcttccgtggtggcagactggcgtcggcaggtgatagataggctgattgtggctcggcgtgttacttatcgtcgtgagttggctgtctggaaaccgacaagccatgctttccctgctacttcactgacctatctgggcaatgtgatgaacagtgctgcccggagtttttaccgtgagcatggactttcgtctatagcacctgcctacgaggcacaagcggttccggatgctgtactcatgttctgcaaacattgcctgcgtttcagtatgggatggtgtcccacctatcagaaaggacattctccttatagggaaccttattatttggttgggacggacggcaagcgtttccgcttgtcttttgattgcaagaattgccagatgaaagtcattgctcatgaagagccgctttaatgaaggacgaagaatgaggaattactaataaagacttgaaaatgaggagtgaggaacgggcacataatgaaaggctggcaaatgaccggtaccgggaagcgggcagggacaaacatcctttgcgttcactgcgttccctcctattctgcattctttatttttcatgcttcattgctttagtttcctgccattattcccgtcctaatcttgaagatgaacatctgtctaaggagacgcgtgattcgctggcctatctttttgagcggcattatacttggaataccaatctggaagtgctggcagattctgtgaatttggcttgtctgcccgtgaaggactgctataatatgctttatcggggagaccgcgtggtggttgccgagttcgccatccatcctgccgacagtgtggatagtgtatgggtgaagcttgcccattcgcaggaagtgcagggttggttgcgggagtccgaaatgatgcatgcctttgttcctacagacagcatttcgcaggccatctacttgttcagtgatacccatgcctcttattttatcattatttttgccttgtttgtggcagtctggctgttccgggcttttcggcgcaagcagttgaggatggtgtactttaatgatatagacagtctctatccgttgttgctatgtctgctgatggcgttctgtgccactatttacgaatctatacaagtgtttgcgccggagacgtggcaacacttctattttaatcctaccttgtcgccgttcaaggtaccgcttgtgctttctgcttttctgatgggtatctggctgtttatagtggtgttgctggcggtactcgacgatttgtttcgccagttaagtccggcggcggccgtattctatctgttggggctggcctcctgctgcatcttctgttattttttctttatcctgactacatctatctacgtcggatacttgtttttgaccgcttttgtatgggtattcctcaaaaggcttcgcatttcgctgctggcttcacgctatcgttgcggcagatgcgggcagaaactgagggagaagggagtctgcccacattgcggagctatcaatgaataaaaaagctttgtaacttttccatattcagtaggaaaatgtaactttgtagttgaacttttaaaaggaggaattgattatgagtagtttggagttggaagccggaaaattggagttgattcgtgagatagtcaatatcaatagcagtactgcattggagagcctcagaaaatatatgaaggaggttttgaataagaatagtcattccattccgacagcggcagatagcaaattgctgactaagcgtatgcttgcaaagtatgccggtagttggaaggacaatcgtgattctgatgaaatcaatgatgatatatatgcatcacgcctttctcgaaaagaagaaaactttagcccctttgacgaatgaaacgatatttgcttgatctaatatttgtgttcacttcatgcgtcagaaatttggagtagacgaacatattgaaaaggtgggctgggaacattgttgcatttcggaggttacggtagcagagttgttgttcggtgcagagcgaagtaataatgtggagagaaacttgcagcttgttactgatttctgccaagatatcaaggtaatacctttgtcctcggctttatgttgttatgcctggagtaaggctgccttatatagtcaaggaactcccattgaggatttggacttatttataggatgtacagcggtggctaaccaaatgataatggttactgaaaacaagaaacatctggaaagaatacctaatattgaaattgaaaactgggtacatagaggataacttctcctctgtcagatagaaacatagaaacggtcgttcgggtatgcaatgtgtaagtacccgaacgaccgtttctattttcctttactttcggagggacaaagctctccaatcagaacctgcacctcaactctattcccgcctgcacaggccgtcctttctgcataaatccgttccccatactctcaaaatagaacgaagcatactctttgtccagtgcattgcgcacccagaaatcaatctgtccatgtcctttctggaagctgatacgtccgttcagcgtgccgtagaaggcttggctcacggtattcttctcggtccagtagatgcgcccggcaccggtgtagttagcgttcagctggatgcggtccagccagtgtcccggacggatgcggaagatgtactgaccgcccacgttcatggtatgcttgggaacaaagggtacgtgcttgccgttgtagctgatttcctgaagctccccattcactttctcgttggtgatgtaatccttaaaggtggcataggtataaccataacttgcattcagcgtgaagtccgtagcaacggcagccgtcaaggcaacctctgccccctggctgcggcttttgccggcatttgccgtttcgcgtcccagtccgcttggggcgaagcgtgaaatctgctggtcgcgggtttccagccagaagatggcggcgtcggcatgcagacgtccgtccagcagattcaagtgtgttcctatttcgtagttccaggtctgttcgggcttgtagacggtggcggattttgcatccggattctctcccgcatcggggaagtatttgcccaccagctctttgtaggcatccggcacgttgggcataatcgcctctttgctttgccgcatcatgtcattcttcaaactggattgcagcaggtcggagaacatctgcacgttgtagcctcccgaacggtaacctttgctgaccgttgcatacacatttcctctgtttcgcgcaaagtcatactgcaaagcaaacttgggcaacagctgaagataatccttatcaatgtttccttggtagcgcgactctacggtcagcgccgtctccggcatcatctctatttcgcggatgacgacgtcgccccgcttcatttctcccttgatgcccaccttgtagtccaggctggtgccggagttgtaatccatcttcatacgctcataatccaggcgtaacccggcagtgaacgacactcctttcagcccgaataaatctctgaaggtggattgatgaaagagtgccccattcagcagcggagtgtcgaaactgcccccgatgggcatggtccggctgctgatgcccagtgagggcaggatattcatgctcatggacggtcccatctctacttgtatttgcgatgggatgacactgcccaacatctggttcagcatccccattccggcttccctgaaagtgacgggagcttccgtattcagccattggtagaagccgaaggcgccggtggtccattgccagcggctgccgcttttactcttcaagatgatttcctcgctcagtgcgtgggagcgttgtttctgttgcagggtatagatgtcgttggcggtgaagtcttggtctatgtccatgcagtcctttagaaactggtagccggtgaccatgctcaacgtgaagtgctgtgtctggtattccaggttcagacccgtgttcagcaggttgcggtagtagttgctgcgggcgttattggagatttttccgatgtagggcttcagcggctcgctctgtgcttcgggggccaggctgccttggtagaaatacgggtagccaccctggtcgctgtattcgtagttgatgtttaggtccaccttccagttgtccgaggggaggtagatggcgcggatgcgtccgcctgccgattgccccttgtccgctttctcgtccctcaccgtgttgcggaagaatcctccttgataatcgtaaaaacctccggtggaaaaggcgaaccgttccgaaaggcggtgatagtgggtcagcgaggtattataggcattgtacgtacctgcccccatgcggaagtccgtcccctggtaggagaagggcgatttggtgtgcaccttaatcaatccgcccatggcattgcgcccgtagagcgtgccctgcggaccgcgtagcacgtcgatgcgctctacgtcggcatagctgaagtcgaaggctgacttgtctatataaggtatattgtctacataaagtcctacggagggagtgttgatgcgcgagccgatgccgcggatatagactgccgaagtcagtcgcgagccgtagtcggggataaacatattgggcactacggatgtcagattcttgatggagttcacctgtgcgttctgcatgtcctgctgcgaaagcagggtgacggcggcgggctgctcgcgcagtttccggttttctttgggggcggcaatgacggttatttcctctacatccaccactttcaaggtgtctgcctcttcggcaagtacgttgccggttgccaggaggcagaagataccggtcaaaattctatatctattcataaactggttttttagcgcctgcaaagtaaagggattcttgcggaagggacaatcctcatttattaggatttcgttcctggagtgctaatcttaaatcgttccatcatgcggaaaatatcgttcctccgtggggtaaaaatcgttccaccatggtggaacgatttttaccccacggaggaacgattagatgttagcacattagcacactaattggggcgaagtttttctgaaaagacttcgcttctgatgtatccggttgtaggattatattctgtccgcttccacatatccgtgcatcacggcatagatagtcagcccggacacggacttgatacccagcttctcggtgatattcttgcggtgtgagatgacggtggtcaggctgatgttcagtttgtcggcaatctccttgttgatgagacctttggtaatcagcaccagcacttctatttcgcgggcggaaaggtcgtgcccggcggctgtatttattgccatatccgagtgtctggcgggtgccggctttccgtggttttgtctgtattggtttccgtattggcgcagctgcagaatgttttttgccagattttgttcgtcctgatagatgtttagcgtcggcatgcccgacagttgggggacggtttcaccattgaccagcacaatggttttgggcttgcgctccagaaagaaagcggtatgctcgaagtaaatctgtgaagagatgaaataatgtacatacatgtcaggcgtatcatccatcagttcgccaaaggaacggaaagagcggatgatggctgtcgggatgatttcctccagcaagttctgcagtcccagacaggagagggtgttggagtcgacgattgctatttcaggagtcattctcgtttttttgtttctgcaaaaatacggattattttttagggtttgtctgtgcggggctgcaaaatgaaaaattctcctatgcagaactattctccctctccttttggggagcggggagtgtctcctttcgcatattggctggggctgacattgaaatatttcttaaagacttcccggaagtatttcccatcgcagaaaccggttctttctgctacttcagtcacggaatatttcccttctttcaatagctcggtagcatgtttcaaacggatattccgtacgaaatctgccggtgcctggccggtcagcgctttcagtttactgtagaaactggtacggctcatattcaggagcgagcacaatacgtccactgtgaaatcgggattatccatgttctcctcgatatgtctctttacattcgacatgaatttccagtcgagactgttggagcaagtggtagttgtggagggctcttcttctgtattgatttccaaattcgcatatctcttgcgcagcaatgcgcggttggcaagcagattggcaatgctggctttcagtatgtttatgctgaaaggttttacaatatattcgtccgcaccgatatggagtccttcgagaatgttcttttcatctcccagtgccgtcagcagtactaccgggatgtgggatgtttcaatatcgttcttgatggcgatgcataattcgtcgcctcgcatttccggcatcatgatgtcggaaagaatcagtcccggccagaattgttttacaatggtcagcgcttccttgccgttgttgcatacttgtacattgtaaatcggagagaacgactggaagagatagttgcgcagctcgtcattgtcttctacaatcaagatgcgatgcagtttgtcattgtcttcagtccggagttctccggcaagtttcaaaggaacggtggggacatccggttcatagaaggtcttcttatccttaacggacagagtgaagttcttgaactgttctttctctttgggaaggatgattctgacagtactgccttggcattcggtgctctcaatgtatatttttccattgtgcaggcttaccagcttccgcaccagcatcagaccgataccgcttcccgttattttggagttgatggcatttgttccacggaagtgcatcttgaacagttttctttgttctttggcgggaattcctattccattatctttgacttctagtctccaggagcttttcatgtcataaacagaaatgagtatatcgccattttggggagtatacttcagagcattggatatgacattttccaggatagagtccatcttctctttgtcgaaccatacattcatgtagctgaaattgctttcgtatctgaaagtgatatgttttatggtggcataggtctggaaattgttgtatatctccttgatgtaagtattcaattcatattctgctatgtacagatgaggggaatatacttctgcccgttcaaagtttatcagattggtagtcatgcgcaggagggagttgacatttctcagtgccatgtgcatattgttggtctcggcttcgttcagtgtcttgttttcaagcatttcttccagaggtgcctttatcagtgtcaatggcgtgcggatatcatgcgcggtattgacaaagaaacgggttttctcatcggatatctttttctgttttctcagtgccatgacacggaaaccgacaacggacatcagtactgtcagcaggacatagcaggctatggcccaaaaactgaaccagacggggcgcgcaatgctgatgtcgatgcttcgctcttcaaaataaagataaggctcttccttggataccgcccgtatgtaaagtttgtaatcgcccgaggcaaggttggtgaagcggagatgcccttcttcacccaggcggttccagtcatcgtaaaagccttccagcttccagtagaaagtgacattgtccggcgcgtcataattgatggatgaaatactgagggaaaaagtgttctggttatatttcagctttaaccggtctgtctggttgatgttttccttcaagggggaattcggactgccgggaaagactgtctgatagagtatctgaaaatcgctgagtatcataggagagtagatgtacttgggcaaacgggttccttcgggaaactcgatggctccgtctgtgctgccaaagacaaaacccttgttcttgcgtagcgttccggaagaggcactgaagcaggaggacatcagcccttgctctttagtccagttgtggaatgtcttctccgtagggtggaaacagctgattccgttttcggtactcatcaggatatgcccgtccgactcggggagtatggtgtagatgttgtttgaaatcaaggcacaattgtccttgtgataatgcttgaacgtactgtcctttgcgttgtagacaaccactccggagccgtttgttcctatatatagagagaggtcttccgcttggtaaagtgtgttgatgtaggtcgtctcttcctgcaaggcgacatattggaatctacccgactctttgtccagcagatacagtccggcacttgtcccaatccacatgtgtccgtcatccttttctgtaatggcggtgacggaatttattccgggatacagacggacggaattcagggacaaatcgaagcacttcagattatagaaccctccggaccagatatatcctttggagtcttttacgatgtcgcggatatacttgtcaggacgaatgttgtccggattgagcaggtaaggggagaaatattctaccgagagtgtccttttatttattttgtatactcccgaagtatatatcctcctgcccaaataatgccgggtgatacctcgcatagcgtaatgaagatgtgattcttgtttttcagttgatggtcgaaggagctcaggaatgaatgccactgcccggttttcgattgataaaggctgattccgttacttgttccgaaccataggtctccgtcactgtcttcaatgacagagtgtacctggtcgttgaccagcgattgtctgtttccgatagaatgctttatccagttgtagcttttgtaccggttgtctataatggtaattccttccgggtagttggctatccatatccgcttttcttcatcaatataaatgtcattgatgttattgctgttcatctcattgtggcttttgtagctggagacgatgtacggttccgagatacacgagttcatgttgattttgtgtatacccataccttctgtcgctatcaatagctctgtctggttcagaggcttgattcgggcaatgtttacatcgctcaaatccgtattggagtgtataatccgttgttgccgtatgtcgtaggcaaagactcctttttcaaaagtaccgatgaaaagtctttgtgattcttggtggaaatagagtgaactgatttgggcctggattttgtcaagaggttcaagagggacaatctgcaatgtctcattttcgagtttgacatatcgcaatcccttgtcggtacccatgaagaagtggttattgtccacttgttcgatacttgtaatgctgcttttcagttcattggacatttgatggacctctccggtttgtgtgtcgtagagagcgatgctgtatctgctgcagagccaaatcctgtgattgcagtccatatagccgtagctgatattgaccggtgtcttgggcagtttatatactctgttgaacacatcgtgttcttggttgtattgaaaaatgcgaccggctttacctatgacccataatttccctttctcttcaaaatatagccaaccgagatggatggggaaacttgactctttgttttcttctattaatttataatgcttgatgtcttttccattgtaccggtctatgccttcgttggtgaggaaccacatgtaacctaccgaatccttttgaatgtcgaagattctgcggttgctcaatccgttttccacccctatgtatttatatgtttgcgccgtagctatgagaggcaaaaggaatagaaagcatacaatgtttatgatgaacctcataataaatacaatataacaacatatatgtgataatagtttacaaattaaacgagaaaaagtgaaaaatcaaaatttggatgtaaatattatagcttaatcaaagaatgcctttgccgcttccgcacatcgttcgccgtcaattccggcagaaacaatgcctccggcatatccggcgccttctccgcaagggaacaatccttttacgcgtacatgttgcagtgtctccttgtctcttgttatgcgtaccggcgccgaagtacgggtttccactccaatcattgtcgcctcgttcgtcaagaaaccacggctgtatttcccgaatagctggaaacctttgctcaggcgttctgcaatgaaagaaggcatccagaagtggagaggtgaggaaaccagtcccggtgcatacgaagtttccggcaggtcgtaactcagttttttcttagtgaagtctgccattctctgtgccggtgctgtctgcttcatattgccttgttgccagcagaggcgctccagatactcttgaaaatacatcatgcttaattgggagttgacggttggcaattgacaattagtcgtgctgtcgtgctgcatagaaattgtaaattgtagattgtcaatagtaaattgctctatgtcttccgggcgtagctctaccaccattcccgaattgctccaacgggaaccgcggttgctgggactcatcccgttgactacaatctgctcgggaccgctggcggcgggcacaacgaagccgccgggacacatgcaaaagctatatactcctcgtccgtccacttggtttacaaaactatattcggcggcaggcagatattttccccgtccgttccggttgtgatattgtatttggtctatcaaggtggcagggtgttctagtcgtacgcctacggcaatgcctttagcttcaatctctacattgttggcggcaagccagcggtatacgtcccgggcagagtgaccggtggcaagtatcaccgggccaaggaaagtcttgccggtatttgtttcaatgcctttgacttcatccttctctatgagtagggcgtccatgcgtgtttcgaagtggacttcgccaccacactggatgatagtgttccgcatgttttcgatgacacgcggcagtttgtctgtacctatgtgcggatgtgcatctaccagaatggaagtggaggctccatgttggcagaagacgttcagaatcttgtctacattgccacgcttcttactgcgtgtgtacagcttgccatccgagtaagctccggcacctccctctccgaagctgtaattggactccgggttgacgagttgctggcggctgatttgcgccaagtctttcttgcgttcccgtacgtcctttccacgctccacaatgacggggcgcagaccgagctctatcagtcgcagggcggcgaagagtcctccgggaccggcgcctaccactactacttggggctttccttctacattattatataaggtatgttgatattcgtcctctttcggcatttcgttcagatatgcccgtacgttgaggttgatatagattgtccgttggcgggcatcgatactgcgcttcaagatgcgcgttgctgttatctcccgtgcattcagtcctttctcatgtactaagtactctttcaggcgttgctcgtttgccgctacttcgggcaatacgcgcagttggtattcttgtatcataatgattatccgaatagggcacggaatgcttcttccaccttccgtaccggtatcaattccattttaatcttcttcgtgttcagtccttgcatattatacttgggaagtatgaatcgcttgaatccaagtttctctgcttctccgatgcgctgctctatgcggttcactgggcggatttcacctgacagacctatttctcccgccatgcacacctccggctctatggccgtgtccatgttgctggagaggatagagctgatgacggcaaggtctattgccgggtcgttcactttcaatccgccggcaatgttgagaaagacgtctttctgtgccagcttgaagcctacacgtttttccaatacggccagcagcatattcatgcggcggatgtcgaaccctgtggcagagcgttgtgggttaccatatacggcactgctgaccaatgcctgcgtttcgatgaggaacggtctgatgccttctatcgcggaggcgatggctatgccgctcataccttcatggtcctggctcagcagcagttcggatgggttgctcacctgccgtaatccatcttgccgcatttcgtaaatacccagttcggcagtgcttccgaagcggttcttgatgctacgcaggatgcggtacatgtagtgctggtcaccctcgaactggagtacggtatccacgatatgttccagtaccttggggccggctatgcttccttccttattgatatgcccgataaggatgaccgccgtatgcgtttccttggcaaagcgcaggatggaggcggaacattcccgtacctgggcaatactccccggcgacgattcaagggtttcggtagaaatcgtctgtatggagtcgatgatgacgatgtccgggcggatgttcttgatatggacgtaaatctgttccagggaagtttcgcacacgatgaggcaatcactggaagcacttgtcaagcggtcggcacgcagtttcaattggcgggtactttcttcgccggagacgtagaggatgcgtttttccggtatgcggagtacggtttgtagcaccagggtggatttcccgatgcccggttcgccgccaatcaaaacaagagatccttgtacaagaccaccacctagtacccggttcagttcggcatcatggaggtcgatgcgcggttcgtcatcggctacaatttcatggagggttatgggtttggctttggcggtctctatgcccgatacgggacgcttgttcaccacttctttccgtaccacctcttccacatacgtgttccacattccgcacgacggacacttgcctacccatttgggagagtcttgtccgcagttgctgcatacataaaccgtcttctctttagccatagttgtgcattctcttctaaaatgattgcccaaaggtacaatttttcgatgcagggcttgcagactcccatagagtttttttatttttgtgagtagaaaacaataacatgttataaaagccatgatagaagatattcttgcatacaacaagcgttttgtagccgagaaggggtatgagaaatacatcacgaataaatacccggataagaagattgccatcctctcttgtatggatacccgtttgaccgctttactgccggcagccttgggcatcaagaacggcgatgtgaagatgataaagaatgcgggtggaatcatttcacatccgttcggtagtgtcattcgtagcctgatggtggccatttacgagttgggcgtgacggaagtgatggttattgcccactccgattgcggtgcgtgccacatgagcagcgcccagatgatagagcatatgaaggcccggggcatcaagcaggagacgattgatatgattcgtttctgcggagtggatttcgagtcttggctgtatggattcgaagatacggagaaatcggtaaaaggtacggtggaagctattatcaatcatccgctgataccgaatgatatcaatgtcagcggtttcataatagattctgtgacgggagaattgaccccggtgcagtgatagttgtgcttcacacggtaatttcccctgccagtggtcgtcccatcagttcgcgtatttcggcaggtggataatcgtgccccagaaggaacatcagcttggttacggcagattccgttgtgctgtcatatccgcagacaactcctgcctgcatcagttggtaaccggtttcatagcgctccatttcaacagtgccggcactgcattgggtgacgttgacaatgatgatgccttgttcgcaggcatcatgcaggcggcgtagaaaccattcctttcggggagcgttgccggaaccgtaggtttcgaggactacggccttcagtcctttagtggcaagtatggctgccacgacattttcctgaatacctggaaaaagcttcagtatggcgatgttggtatcaagcagataatgaggctccagttcgtggggagtgccgtgcgtatgaatttgcacattattatatttaatatgtataccggcggaagcgagtaccggataattgaaggaacggaaagcattgaagttctccgcgttcattttggtggtacggttgccgcgcatcaggtggttttcgaagaagatgcagacttcgggtacgatgggctgtccgttggagtggcggtcggtggctatttcgatactggtcagcaggttttccttgccgtctgtgcggagcacgccaatgggcagttgcgagccggttaggatgacgggcttgttcagcccttcaagcatgaagctgagtgcagaagctgtgtaggccatggtgtctgtgccatgcaggatgacgaagcctgtatattggttgtagttgttgctgatgatgcgtaccagtttgcgccaggcatcggggtccatgtccgaggaatccatgggtgggtcgaattgataagtgtcgatacggaacgcaaatctctgaagttcgggaacatgtttctgcaactgctcgaagttgaagctttccagggcgccggtttctgcattctctatcattccgatagttccaccggtgtatattagcaaaacggaagtgttttctgggttcatgcgcacttttctttcatgttttccatgcaaatataatgatatatattgagaatgatagcaaaatgttagaaaagaataaacggatatacagaaaaaaggtatggaaagtgtgaaagtgtaagccgtaagttgtgcatatttcttgcctttttagaggctttctgtatttttatcgcaaaaaagtcgcaaaaagtgatagattgaatgtttttattgttacttttgcaacacttatcataaatgatagaaacaagagactatgaacaagtactatcaacatacagtcacatccatgtggaccatgacccttaggggttagggatagtattttgtgtttctacgtgttacaccattttcaagcagtttttccatttaattaaagtcaatgcaagccgtagcagcttgtttccgacacattgtatcaaccatctcaacaatataaagagaaatgaaagtaatgaaattcggcggaacgtccgtaggttccgtgaacagtattttgagcgtcaagagaattgtagaagcagtcgatgaaccggttatcgtggtggtgtccgcattgggcggcatcacggacaagttgataaacacctctagaatggcggcagccggtgatgcttcttacgagaatgagttccgggagattgtctatcgtcatgtggaaatgattaaggaagtgattccggcaggcgaggcgcaggttgccttgcaacgccagattggtgagttgctcaacgagctgaaggacatctttcagggcatttatctgataaaggacctttcgcagaagacgtccgatacgattgtgagctatggcgaacgtctttcatctatcatcgttgcccagttgacgggagcggagtggtttgactcacgcaagtttatcaagacggaaaagaagcattccaagcatgtgctggatacggagctgacaaattcgttggtgcgcgagacattcagcagcctgcccaaacgcgtattggttccgggttttatctccacagacaaaatgacgggagaggtaacgaacctgggtagaggtggctctgactatacggcggcaatcattgctgctgcactggatgccgacagtctggaaatctggacggatgtagacggattcatgacagctgacccgcgtgtgatttccagggcatacactatcaatgaattgagctatgtggaagctacggagctttgtaacttcggtgcgaaagtggtctatccgcctacaatctatccggtttgccacaagaatatccccattctggtgaagaataccttcaatccggagggtgtgggaactgtcatcaagcgagaggtttccgacccgcaaagcaaggccatcaagggtatttcatccatcaatgatacgagcctgattacagtgcaaggccttggtatggtaggtgtcatcggtgtgaactaccgtatcttcaaggcgctggcaaaaaatggcatcagtgtattccttgtgtcccaggcttcttcggagaattcaacgtctatcggtgtgcgcaatgcggatgccgacctggcttgcgaggtgctgaacgaggagtttgccaaagagatagagatgggagagatttctcctattcaggcagaaaagaacctggctaccgtggccatcgtaggcgagaacatgaagcatacgccgggtattgccggaaagctgttcggtacgttggggcgtaacggtatcaatgtgattgcttgtgcgcagggtgcttcggaaaccaacatctcgtttgtagtggacagcaaatcattgcgcaaatcgctgaatgtcatccatgattctttcttcttgtcggaatatcaggtactgaatctttttatctgcggcataggaaccgtaggcggcagcttgatagagcaaattcacagccagcgccagaagctgatgcaggagaacggcctgcagctgaatgtagtgggcattgccgatgcaaacaaagccatgttcagccgcgaaggtttcgatttgggacgttttcgtgaagaactgcaggagaagggaaaggacagctctctggaaacgctgcgtaatgagattatcggtatgaacatctttaactctgtctttgtggactgtacggcaagtgcaggcgtggcttccctttacaaggacttgctgctgcacaatgtttcggtagtggctgctaacaagattgctgcttcttccgaatacgagaactaccgtgaactgaaacagattgcccgccaacgcggtgtgaagtacttgtttgaaaccaatgtaggcgccggactccccatcatcaataccattaacgaccttatccatagcggtgataagatattgaagattgaagccgtgctgagcggtacgttgaactatatcttcaataaaatcagtgccgacattcctttcagcaagaccattaagatggcgcaggaggaacgttactccgagcccgatccgcgtatcgacctcagcggaaaggatgttatccgcaaactggtgattctggcacgcgaggccggttactgtttggaacagagcgatgttgagaagaacctctttgtgcccgatgacttctttgaaggctccctggatgacttctggaagaaagtgccgagcctcgatgccgatttcgaagcccgccgcaaggtgttggaagccgagaacaagcattggcgtttcgtagccaaactggaaaatggcaaagcatctgtcggtttgcaggaagtcggcgccaaccatccgttctacgggctggaaggcagcaataacatcatcctgctgaccacggcacgttataaggaatatccgatgatgatacaaggctacggagccggtgcgggtgtaacggctgcgggggtatttgcggatattatgagcattgcaaacgtttaatccaaatcgtaatatagaaagatgaaacacatcattatattgggtgatggtatggccgactggcccgtgaaggctctgggaggcaaaaccttgctgcaggcggctgcaactccctatatggacaagctggcacgcatgggacgtgtgggaaggctggtgacggtggccgagggatttcatcccggcagtgaggtggcgaatatgtccgttctgggctataacctgccgaaggtgtacgaaggccgcggtccattggaggcggcgagtatcggtgtggacttgcagccgggtgagatggcgatgcgctgcaacattatctgcatcgagggagacaatatcaagaatcattctgccgggcacattactacagaggaagcggatgtgttggtaaaataccttcaggagcatttgggtgatgaccgcgtgcatttccatacgggcgtgcaataccgccatctgctggtaataaaaggaggggacaagcgcattgactgtacgccgccccacgatgtccctttgaggcctttccgtccgttgatggtgaagccgatggagggtacggagaatatttcggtccccgaaggcggtgcagagcttactccgaagcagactgccgatttgattaatgatttgattctccgttcgcaagtgttgctggaaaaccatccggtcaacatgaagcggaaggccgagggtaaggaccctgccaatagcatctggccgtggagtcccggttatcgtccgcagatggagcgcctttcagacaagttcccgcaggtgaagcgtggtgctgtgatttctgccgtggatttgattaacggcatcggctactatgccggattgcggcgcatcaccgtagaaggtgcgacggggctttatgataccaactatgagaataaggtggctgccgcccttgatgcattgcggacggatgattttgtctacctgcatatcgaggccagtgatgaggccggtcacgaaggaaatgtccccttgaagattatgacgattgagaatctggacagccgtgccgtaggtcctatctacgaggctgtgaaggattgggaggaacccgttgctatctccgtattgcccgaccatcccactccctgcgaactccgtacgcatacggccgaacctatcccgttcctcatttggcatccgggtatcgaggctgacgaagtacggacatttgatgaagtggcagcctgtgaaggcagttacggactgatgaaagaagacgagtttattaatgaatttatgagttccaccacagagtaacacagagtttcacggggttttatttatagagaattctgtgagactctgtggtgaataaaaaaataccgcaatgaaatattatagcaccaacaaacaagcccccgaagccactcttgaagaggccgtggtaaaggggcttgccgcagacaaggggcttttcatgccctttacaatcaaaactctgccacaagagttttacgatagcatcgatacactcagctttcaggagatagcctatcgcgtggcagatgctttctttggcgaggatgttcctgccgatacgctgaaacagattgtttatgacacactcagtttcgatgtccctctggtccgggtgacaaagaatatttattcgcttgagctgttccatggtccgacgcttgcctttaaggatgtaggcggtcgcttcatggcgcgtttgctgggatactttatcaagaaagagggcaagaagcaagtcaatgtgcttgttgctacctccggtgatacgggtagtgccgttgccaatggtttcctcggtgtggaaggcatacacgtctatgtgctctacccgaagggaaaagtcagtgaaatccaggagaaacagtttactaccttagggcagaatatcacggccattgaggtcgatggcacgttcgacgattgccaggctctggttaaatccgcttttatggacggggaactcaacgagcacctgcaactgaccagcgccaattccatcaacgtggcgcgtttcttgccgcaggcattctattacttttatgcctatgctcaactgaagcgtgccggtaagggagacaatgccgtcatttgtgtacccagtggtaacttcggcaatatcactgccggcctcttcggcaagcgtatgggactacccgtggaacgctttatcgcttccaacaaccgcaatgatatcttcttccaatatttgcagacgggtgtttatacaccgcgtcccagtatcgctaccattgctaacgcgatggatgtgggcgacccgagcaactttgcccgcgtactcgacctttacggaggcagccatgccgccatctctgccgaaatcagcggtgccacttataccgacgagcagattgccgaaactatgcgggaagtgtggaagaaagaccattacctactcgacccgcacggagcctgcggcttccgggccctggccgaaggactgaaacccggcgaaacgggtgtattcctggagacggcccatccggcgaagttcaaggatacagtggagaagattatcggtgaagcggtagagatacctgccaagcttcaggcttttatgcgcggtgagaagaagagcctgccaatgtcgaaggactttgcagacttcaagcaatatctgatgcatgtataaagaatgggacgtcagtaaagaaaaacaccggattgcttgacattgcctttcggatgttgtatctttgtaactgcaatcttagttcagattcaattttaaattagcataaaaggagaggcgtcgcttctccttttttgttgtgttcttccgtcacttcattagccaaagcttagggtttagcctcataactcgctctaatttggactttgattgaaaatcaagaagttgggcgtttgcctatattatataggtaacaatatggaaacgagcggacttctgctcgtttctgtattttgcaatatgcaaagaacgcctcaattcggggacaaagatacgatatttttcttaatatcccataatttacaagaagagaaatatggaaattaggacttttttacatagaaatttaacttcattttttcgtaaaagcaaccaaacataatcactcagtgatagctacatacataatagttttgcttttcccactacatattcaaaatagcatcaacagaaaggtgttgtatattgctaattgctgttgtgttttaatttaatatcccgtaaggaaattcggtagaatcaacattaaaatagtaaacgttatttgtgtctaaatcaaaagcagtcataacgacaggtgatacatctcgtgcattagtagttgtaagaccttcattcgtccataaaaaccctaaataagtaggaatggctccccataaaaaagcatgtgaactgtttgaaatattataaaaacaaaccttatctgaaaagactaaagaaagaaaataatttgagtttttcacaaacagtttgtaattgccagtagcttttaaattaaaagatttatcatataaataaaatgatttacttttattatttactaaataaagtctgtcatcttcgttataaacagaatagttcggaattggtttgcctaattgcaaacctaagtaactatccacgaccttaaccctaatagtaacgctagtattctccgtcttatcctttacaacaagataaacaatcccattcttttttgtctttatttttatttttccagcatcaatagtggcttccaaaacattatcatctgacacttcgactgaaagattgttgcttccaccactaaacataatttccgatgggttttctaataatggcttttcgtaatactctttttcaaaacacaatgatgaaacatcagtaccattactacagccatatactatagaaaacacaaaaaaaagaaaaaagtattgaattattttcatatttgccaatagaataaagcatttgatgtacataactttgtacaccaaatgcaattaaaactaattatttcttatgaatttctgttatttcccaaaaatttatattataagtgcctaatgttgtctcaaaatcagtcgaagcatctgcatttaccttataaaagccattgtcaggtccaccccatcccatattagcatgaaagtacaaatcgttatttcgtaaaatttctctgcttgtcttagtgcaaattgcatatccatctataacccaagcatgagaacctttttctgcctgttcatttgcagtatgtgttccacccattattgcaacgcaaggcatctggcggtttgcatttatcgtatttaacaatggatctggggcatatttattataataagtgccacaagaaacatacttctttaaataatccaataaattagaaactgaagttgtactactttttacacgaggtatattcggatcatcataaggcccatacttaaaatcctcatcaatatttggtgttgtatttgttccttcatacatatgcttaactactttggaaatcatcatagcctcctcataatctccgccaaaatacgaatcatacttcaatttcggttttttagtaacaaatgcccagtctatgactgttccatcaatcgtcatgctcggagcgatagctgctaaagtttgaactcctgctgtaatagcacaccccatagggtaatttgtttccgtatgatattcattataagttttaggcaacaacaagttataaggattgtcttgatcccactcggtctttaaaacagctccaccattttgaggcattaacgatataatctggctcaaaggtttgtcataagctgtagaacgggaagttgtttcatggctttttacaccattaacctcaatcaaatcttttatttcttcatatgttactgtagatttacccaaacaagaagctactttcttcaaggttttctctcgtaactcaactttgagcctttctattttatttatctctgaaacagttgaagcttctgccaattttaacatcaaacatgccccagtactatcttttttctcaaaattaccattttctatatatgccaaaacaccagcacttcgagagtcggcagaaactaaagcatacccactcttttctccagactgtaaacacacctcataaacaggaatactatcagtcgtagtccctcttgttgtcttgcttgatataattccgccaatgcgatatgagcccacaatagacattcttggattggcagcacttcttgtttttgagcccaacgaagtggaaaaatcatttaccattgccagaatctcatcctctgataaatttgtaggattatcatttgcaatactcattgcctcatccatagacaaattaacattcacgttctcaataacaggattactgtcattaagaatttcatcttggcacgatgatacaatcactgccaataatattaaaactaaatactttttcatatttatactgtactattggttaaatgatgcaaatttacgaaatttattttaaatcgatatataacgaatgcgttatttatgtattattaacagtttttgttgttaaggcgttaaaatatattgcattttggcattttttactttattaatatataagaactaacatcctttgcttttggttcattaccaaatgagtctatcaaaataatgctgcagtcattcttcaccttacaaaatatattgtcaccactttgcggatgttcaagcatcagaatgcagccgtcaagcactttgaaaaaaaacattcaatacttcgcaatcatccgaatccgtttggagatttctgcttcaaacgatagatgccataagcatttagcgtgagtttgtttctacattagtcggtaacacaccaaaatatgcccttgctatggaatccaagttaatactgttttctaaaactgccgtatattcttcggctttaacagagtcaatacctacatcgttttgtcctgtgccgcataatatataggaagcaacaaatgagataaccaaaactgctataattaccaatttcttcttcataaccatcataaaagaaaaagtgtccgcaatgtcaagcaagtggcatcacggacgcgaatgaacagatgagagttaatgaaaagtcagtatgctgctatgttgttgatgcacggacaagctcttgcactattgaacacgatgcgaatgccgttcgtctttactttatcgaaacgaaggatgcgcttgtagccgatggtcgttgtctattatttcttattaattttctttttaatttcattcgcctctttaaataggctattagcaatgctatctttaattgctgccattttgaccattttatagtgatggtaaacagaatcctcataagcagcaacacgattttttacatcatcaataactttctcatctcgacaaacagagaaaaacttctctatgtatcgaacattggggtcgtcagatggaagcaccatcttcaaagcacgatatttcaagtctgcctctccccaatcctggtactctcgccattgggtaaaattgccccaaatggaaattacaagggatagagccaagccaccaatgaaaagaagaacatactttgaagttggctcgaaacgatgggtgacaatctttttttgaggtgtattacccattgcgtgaagtttttcctgcacattttttgatgtggcattcagctcttgtttcacctgattaattgcatcaaacaagagtttgcttcgctgttctccgttacttgcttctttcttggtaaggtcggtaaagatgcagatagcttctcttaatcttgccaatttgtcaatagactccccttcttttacagccatagcaaggattgcttgttcaagcttgcttatattaacacttacagagactggagtgctttccgcctctgtattctttggtgaggcagaaagttcatcgactttctgctccaatctctcaactgtgccgtagatggcttccaatagttcttctttcatatttcttttgttgtttgaatggtttgtaacttgcatcaaaggctaaagcctcttctgcgtttcttctttttcttcttggatgattcgtcctctgggaaaggctcaaaggtctgagagttggcagaagcaaaaagtccaatggaagaaatgccgtcccaagggtcttggctgctatccgacatggatggctcatgtttgctcttgtgatagccttgttcgtattgcagagtagagctggattttggtgatacatggttctccattccctcaaaccttgcattcagcttgccaaagctatagcctcggctaatctgcgtacccttgaagctatatccgtccttacagaatcggatgccttgtaccttggttctctccttgtccttatagacaagctccaagcgaacacctcgttttgcaagttcattcttgaacttctgccagctatctgcgacttccaatgcatcattgacggcattgtgaatctcgtatttggcacgctccgcattgcgcaatttgcgagtgttagtattgctcttgtccgttccgtaggtcagtccatacctggattttagagccttggtcacctgctcattacgcctgtaatcattcctgcctgataagagtttaccctcgttattgatgcggttatacacgatatgacaatgtggattgtccgtgttgtgatgcctgatgcgacagcttggcaagttggttgagattgttcgccatgccaatgagattcttggcgatggctatcgtctcagtgttgtgtccactgaccacctcgccgttcaaggcggactcacggatgtactccgccaacttgcggttggctttcctcgccctcagtctcaaagcctcgtagcttggctttgagaacttcaccgtgacagatttcgacagcttgcgaaccctgcccgtgggcggtcttccgccctttttcttgtattgttcatgtatgcttgtcattcgatatactgtttacagttggtacactcactttctgcgaccgtcgggagcaaagttcctccgccctcatggtggaacgaggcgttttggggttcccaaaacataacctcgctccctctcataacacgttagttggaactacagcctttcagctatccacgtccaaggtcgcagaccttaattctcacaatttgcgccaagcctcgaagtcctcttcataaaggcttaggtggtggcgcacgatgttctcgatgatgcccgatacgctcatgcgtctccctccgaggatgcggacgacacgatcaagacggtctcgtacatcggaactgacgaagactggcttgcggtcgtcaatccttggaacttggaggaaggtctgctgatactcctccaatgtcgccttgcgctgcttgccactgatgcgcttctgcggattcggtggcgattgagcctcattcgtcagctcgtcctccatgttggaggttgttgcagccacattctctgtcacaacttctaaatcggagttctccacctcttcaaagaaagagctatgtttttgggcatagtctttaccataagtggatggttgaagcgaagccatcacctcctgtgtcattttctcctgctgttcaggaaacattttcgtttcttttgttcttgccatagcttaacttgtttaaattgttggtatagtggtcacggtatgcaccattgaccgattgtcgggtgcaaagtaagtgtactgagtgcagccatgcaactgattgggtgtaacgtggcaatttagttgtggcttgcttatttgcataccgagatagttgtgagaacttcaacgtatttctcaactcatcattgttcatgtattcgttgcagtcgtgcaagtttttcttgttgtttttggcgttgaagtcggcaaaccccggcaacatactgccacagaaattgaaaacgcttgtttttagattgccgtgccttatctttgcactcacaaacgtggagcacagcatatgcgtggagctttgcgacatataacatagtattgacttagaaaaaagaaaagtatgggattcatcgtattcgaggaagaggcattcaactatcttgatgcccagttggagaacttcgtgaagcgcatggacagaatccgtgagcgcagtgaggacaagaccatgaacaagtggcttgacacgcaggacgtgtgtcagacgctcaacatctgcccacggacagtgcagacgcttcgggacaacggaactttggcttatacgcaaatcagccacaagacctactacaagccggaggacgtgatggctatcgtagcagtagtggaggacaagaaaaaggacatgcgctttcgcaagcgcacaggttaggctgtcaatatacaacagccactttatccatagcagcaagtaaaccgagtaacgtaagtatcaacaataaaacgagacaactatgagcaatgaagtaatgacaagaaacagcgagtggatgaaccacatcgtgaaccacctcaaccgaatggttgacaattttgaacgtgccgttatgaactaccgtcccatgcttggcggtgagcgcttcatgacggacaaggagctttgtgccagactgcaactgagccgaagaaccctgcaggactatcgaaacaacggtgtcatcccgtatatccagcttggcggaaagatactctaccgcgagtccgacattcagaagattctgatggctaactatcgtgaggcgtacagaatgaagggcttgtaggagaaatacatgtccttgatgagtggggtgaaatgaacaaggcgacaacgtataacttaccgagcgtggttgttataggttgtcgcctcgttttattggctataccgagttggtcgtgtttgccgggtatcatttgtgttacctgtataaatctaataccatgctaaaacacactgcggtggttcgcccaagtggctggaggcgcaaagcctccaagaaacgttgctttatggcaggtctatgccattgcgttctctgtaaagatacagaccagtttagtgcggcttgtctgcctgccgatgacggactgcatgatgaactcccgaaaggctctgctctcaatgctgtcaatacggaaggctaccgcaatgacgagttcaaggctatacacatcatagctgatgcggtcgttcttcctgacatgacggcgtacaccctgctctttcagaatgccatccttgaatatagccttgacagccttgcgcacatagcagccgaatacattatacatgtcggcaatctcctgcatggtcatccatacagtatcggtcggcatggataccgttccgctctcgctgatagttataatacctctgttcatttttcaatagttttttcgttcgataatctgttcctttctcgcttggcaataagcttatccatgtcatttgaaatcttctgctccgtcacctgcgcatagacctgtgtgcttgtgatgtctgcgtgtcccatcatcttggctatgctgccgatgggaatgtcctcgttgagcatcaagactccgaatgtatggcggctggcgtggaatcccaacttattgcttatgccaagcaccattccaagggtatgcacatcaagatagatgtctttcttctcacccagtggaaaaacaggcttgctgtcgtccgtggtattgtagagcgaaagaatcttctcggctatcggatggagtggcacgaagaactccacgcctgtcttctctctttccttgcggatgaacttcctgccatcggagttctcactgatatggtgagggtacagtttctttacatctatataggataaggaggtgagcgaggcaaaaatgaaacatctgcgtgcaagctccgttcgctcgtcagccatcggggtagagagcatcttgatgaagtctgctttgctgatatgggtcatcttcggggctgccttcttctcataccctatcttggctatgggattgaagcggataatgctcctgtccactgccttgtacatcaacatgttcagccagagaaggcaatggttcacgtagctgtcgatacgtccctggtctcgtttcaggaatagcttgtattcctccccgaaattcttgtcaatgtcctcgaaggcgatgtcgtccttatccaacgaatggacaaagtctctcagattcttctgccatgtccgcttgtgcagaaaggtttgtctggcttttgcggttcgataccattccacgatggtatcaccaaagctcagcaagaactttccagtcgtgtccttgtccttcaacactgccttcagcatttccacggtgatgatgccgttggtggaaagaagtgagttgtatttatccttgacctcagcaaggaaacttgccaatcgtccgctgtcccttgcgttccgtacctctcccttcttggcattccactcctgtggggtacaggatatgcctgtggaaatggctgcacttttgccgtcaacggtgatgcggcaaagtatgttggctgttccgtctgccttcaccttctgtctgttgatgtaaggcaaaatagaaaatgtacttctgctcatagttgttgtccttataatataataatgtagttgaaactgtaaaaagaaaagttgaaagccttgttcataatgcgagaataaagtccttctcggttgcagcgatgaacttgtccatgtcctcaaacagcttcttttgggttactctcgcataccgctgcgtcatcttcacatccttgtgaccgagcatcttgcagatggtctccatcggcacaccagcctccagcgtaatgagactggcgaacgagtgtcgtcccgaatggtaggaataggtcttgctcgtttccgccaacttgcagatggtgatgagatcgatacgaacacgattcgtgctcagcaatggaaaaagggtatctcttgccccgtcctcgtatttcgccatcagctccaacgcctcgggcaggagtttcacccttgcaagtgttccggtcttcttgcggttatagatgagccatttgtcaccatcctccaataccttgacattggctttcgtgatggaaacggtgtctatgaaggctgttcctgcatagcaggcgaaaagaaacaggtcacggctaacggatagtctcggcttgtcttcgggcagttccacatcacggatttttatgaaatcagacatgctgagagtcttgggtgtcgtaacctttggagtgccaacccgataatgggcgaacagcaggttcttgcacaagcctcgctcaaaggcgatgcggcacatcttcttgaagagcgacacatagatggtgatggttcctgatgaaaagcctttctcgtcaagcaagtaatggtgaaagtcactgatgaaaggctcggtcagctgtccgaaagccaaatcagtcaacctatacttctccccgatgaactcagcgagattcttgcgaatctttctgtaagtccagacactgctcttcgacatatcgatgccctcatgggtgctgagttcactgatatgctcgtccacgaaggagagaagggtggtctgtgtcttgacgctgccctgcaaggcctccttgacatccttagcctcgaagtccgttctcttttccacaagcacatcgaaagccttttggatggaaagcaacaactgctcgatgtccttgttggtttccacggcttccttgctcttgccctccaatcggctggcacgaggattccaaagcgatggagtgcaagacaacttgcaggagaactgcgccatagtcctgttcaccgtgatgcgtcccatgatgggagcttttccattcttgtccattccgctcttttttaggtagagcaacaccttgaatttttcgattttcataacgcttacattttgagtgtgcaaatataatcattttgtaagcgttccttgatacgcaaaacattgagaatcagcgcaataaaatccgttgatgcacaaagttgcctttccgcattgttacctgctttgcataggtaactgtggctcacgatttagtaactgaactacttcaatattcctcactcgcttgctttatggcgatttggcaactttgtgcaaatctgctcattcccaactgtttacgttccaacctctcttattctcctttggctgctttagagctttatgttaactctcctaaaccggtgctttacagatttaatcctccacttcagcaagcggaatggcaggcatttgcttggaaaatcccggcggttttgacgaaaagctcggatgtttttgacgaaaagtccggatatttcggatgaaaagctccgagctttcggatgatatgttcagcgccgacagatggtgtgtcgaggataaacagatgatatgttcgggacggatacatggtttgttccggctatatgaacggacgatcatgcgtctgttccgttaatcttccataaatctgctcttgacaagattgactgctttattctgtatcgggttcttcccggatgaggtctatcatgctgcccaacttatgatggttgttccataacacaagcacttctatcttccggagactgtgccggtaaagaagcgtatagtcgggatgcgggatggtgtaccgtatgttctctgcttcggtgggctgtccgataaacggattcagcgtgacacggtacaatgcattttggaacaaggtgtacagagccccgccacaccgtttgttgccatctctttcttgcgaggaaatcagcaggtccttcagagcttctttggcaagtggcgaccagattatttgtttagccatgcttccacctccttactgattgtgacatcctcttgtccttctccctcatccagttgccggcaggctttcttaaggtcatggcgtagccgggtggagaatgcgaggacttgctttgtttgctgggacgattgctcttctttaacttttgccataacgttatctcctttttccttaaaacatttcaaagtaatgaattgtttgaggggaaaaatacgaagctgatgaaagataagaaactggaagccaatctcagtatggttgcatcgcgcgtcatggcggggttgaatatgaatggattgaaatttctgctccctttgtggctgggtgcattgacaggtgtcacggtgcgttgtgtctttgctgccgtggcattttggataacaagctggtttgtaaaggaggcaccggtcacaaggcggcagcggatagggctgttctgtctgggagctttcggactctacgggttcatgttctgctatctgctgggcatcagtaagacgactccggtttccagtgccatcttcaactccatgcagcccatttgggtctttctgatatctgtctttttcctgcacgaaaaggctacgctgatgaagataatcggcatagcgctgggttttggcggtgcgttgttgtgtatccttacgcaaggcagtgatgacctggcgcacgatgcgtttacgggcaacatgctctgtatggtgagctcgctggtctttgccgtttacctgattgtgagcaagaaactgctggaagaggtcggggtagtgacgatgatgaagtacatctttggcggtgcggcagtaacgggattgattgtgtcgtccattataggctgggatgcacccttgcttacggatgccttgcatggggagtggcactgggtgccgtgggcggtgctggcgtttgtgctggttttccctacttacctcagttactttctggttccggtgggcttgaagtatctcaagacgacggttgtagccatgtacagctatctgatactggtggtgactaccgttgtttccctcaccttggggcaagaccgtttcagttggacgcaagccgctgccattgccatgatttgtatcagcgtgtactttgttgaagtggcggaagcgaagaagtagtgacgaataccaggtattccccttccgcctcgatggtgaattctgtactggtgcattcgttgagtgtgccttgccaccagttggtgaaatcgctgaggggatagaccagtcctttgccatgcagaccgtgtgcagtgaagttgatgatggatacttgctgtccgggatggcttgggaaggtgcgggtactccggcaggggatgaagatgccgtaatcggtataggtacgtacatcggctccggcacggagatagtcgatgagcaggctgatatttcccagtgtatggtcttcacgtttgcccgtggcaccgatgatggcgatacggcgtttgcctttcgccagcaggaagttgacggctttagtctggtcgttggtctcctggtcgctgatacggtgtaggatatgtccgaacttccggcggttttcatcactgagggagtcaccgtcgccgatgattacgtcgggagtatggccccggcggatgtattcgtccgctccgccgtcgcaacaaaccacgtaaggcgcttccgccaatatctttaaaggtaggggacttgcaggatattccccattcgccaaaactacggcatcaatagttaataattgctcgttgctcgttgatagttcgtctttcatgtctttcttaatccctaatctctaatccttcatccttgttcatcattttcctccatttgaagtagccaaagatagctataattgtgtaaagggcatatagtccggctgtaaaatcaagtcctttgtagatgtacagtccggcgctaacggcatctaccgcaatccatgcccaccattgctctacatatttccgtgccagcatccacatgccggctatgctcagtgcggtggtgaaggagtccagccagggcacattgctgtccgtgaagtttatcaatatccaggcaatgccaagcagagcggcgatgaatacggcggtaagcggcagcaagtagcgcgccggcatatgggtgataggaagttccagtttttgttcttctgttcttgtgtcctctcctttctgtcctgcacctttccgccgcaagatagtccggcgcagaaatgctccgtacttccacatcatccagccgtagatggcagcacccagataatagatgttgatgccgaagtctgcatacagccccgcatcatagtagacaaaaatatagacggcaggcataatgatgcccgctatccaaagataaatgcttgcccggtactccaaccagagatagagaatcccgaccacagtgcctataatctcaagagtatgttccatcagaaattgattgctatatgtcccaatacattcgttcccgcctgggcagcgtagccggcatagttgtaacggacttttcctccgttgtcgtcgtgatagtatccgctgcctgcgtatccgttgttttcgtattcttcattgaacagattgtagatggtgcaccctacggttaccgactttactttaggcaacttgaaggtataggacagattcaggttgcttacgaaataagcatccagtgtgcactcctctcgcttggcgttactcatgtattgcttgctgatatattgtgactgcaacgaggcctcgaatcccttgaacgtatagccgaagcggttgttcagtatgaagtcgggagagaatgcgatgggggtatccccgtgtttgatgacccatgcttccgacccagcctcctcgttttcaaaaagtgtctcggtaaagttctgcacacggttcttgctgagtgtggcattgatgtcccattgcaagccgcagtccagtttgatgccagccatcagttcaatacccgtacggtagctgtcgggcacgttgctggccatggcttcgcctatctcgttcagctctcccgtcagtaccagctggtctttatagtccatatagtagaagttggcacccgcatggatccatgagttggcgaaggtatatcccagttcgtagtcgaacaaacgctcagccttgggatgttcggtgaagtagccgtcggtgtagttgttgcgcgtaggttctttatgggctacgctgaacgaaccgtataggcggtggttgcggtcgatttgccaggacagtccggctttcgggttgaagaagtcgaaatcttcgtcaatgtccaatttttgcattcccggagtggcggcagtccagttgtacttgtcgttcagtccgtttatcttgtagttgatgtggtggtattgcaggtcgaggtaggcgctgaggccgcttaccagttcataattgactttcagataaatatttccgtcgttctttgtggcgttgttgcggtagtagtcgtggtcggggttcagttcgccgatatagttctttacccaaagcacttttccgaagtggtcgccgtcatagcggttcagtgcaccgcctagcgaggcatgcagacggtcggctttgtagcttacggagaagattccaccgccaaaccagttgtccattgccttcttgcggataaggtcgcttacttctaccttgccgccattgtattcgaaaggagacatgccgtactctgctaacgagcgttcacctttatattcttgatagtatccgtcgcctttggtgtagtgcaggccgatattcaggttccattgtggggtgaaattgtggttgaatagcagctggtaattcttttgcgtatagttgtcggtctggtcgtcatagaaatgcagtgcacctccttcgtccgtgaggtaatgcttctcgccgttgtcgtctttataatattctttgttgtatacatggccgtcccggtcggtggcgtacatgaatccgcaggaattataacgccgtccgtaacgttccatctcttccttgctggcatagttccatgcgtggtaagtgcgctctttgccggcaaaggttatcagcttgatagaggtgttgtcattgtagtaccctccttgcaggtaataggagttcagtcccacagacgcccggtctatatatccgtctgtactgatgttggagagccgcgcgtcgaacgaccaatgattgttgatgagtcccgttcccactttcaccgtctccttgtgcgtatggaaggagccgtaggaaccgttgaattctgcatagggtttcatggagaaatcacccgtctgcatgttgatgctggcaccgaaagctcctgcaccgttcgttgaggtaccagctccgcgttgcacctgcatatccttgacggaggaggcgaaatccggcaggttgacccagaataccgtgtggctttccgcatcgttgatgggaataccgttagcggtgacgttgatgcgtgtgccatctgttccgcggactctcagtgtggtgtaacccaccccggcaccggcgtcgctggtagtaatggcggagggtgtcatactcaacagatacggcaggtcttgtccgaaattctgttttttcagttgttctttgcctatattggtgaatgccaccggtgtgctgtttgtggcacgtgtggagatgacttccacttcctgcaggtttatcacccgcagactgtcttgctcttgtgtctgcgcacagacacccagtgctgccataaggaggcaggtcgccattgcatgtctcttcatttgcaattgtttcgtttagatgaatacagaaaaggggaacttttcttcttttccctccgccggcattacccggatcaggttaatgggtatgatctcagcccgtcgtattagggcaccccttagttgaaatcgggagcaaaggtaggagttttcgtcgaaagtggcaagttaagtgaacgaaagtcagagttatttgttaattttgcagcattaattttaaaaaaagagtatagttatgttatcatctttattcatggcagcctttgctgcccaagttgctgacgatggtttcagcaaactgcagatattccttcagcaattgatagattggggcgtaagtgccggtggacgtattattggagctgtcatcatctttgtggtaggacggttcttgatttcctttcttaggaaaatgctggcgaggttattggcaaaaagacatgtggatgccagtatccagagctttgtgaaaagtttagtcaatatcttgctgaccattctgctgattattgccgttatcggcaaattgggagtggaaactacttcttttgcagctttgttggcatctgccggtgtggctatcggtatggcactttccggaaacttgcagaattttgcgggtggattgattgtactgttgttccgtcctttcagggtaggcgactggattgaaagccagggagtgtccggaacggtacgtgagattcaaatcttccatacgattctgaccacagccgacaataaggtaatctatatccctaacggtgcgttgagcagtggtacagtgactaattacagccgtgaggatacgcgtcgtgtagattgggtgatcggtgtagaatatggtgagaattatgacaaggtagagagcaccgtgcgtcgtatcatctccgaagacagccgtatcttgaatactcccgaaccgtttgtagctcttcatgccttggatgccagcagtgtgaatgtggtgattcgtgtttgggtgaagagcggagactactggggcgtttattttgatatgaacaagaagatttactccgtattcaatgaggaaggtatcgacttcccattcccgcagttgacggtgcatcaggcgaaagactgagtgggctacaagtttcaatttactggctatcagctactataagttacgggctacaagtgtactgcattatcatactgcaggacacttgtagcccgtaacttaatagtagtcggtaactccgtaatttatttataacttaattctgcctctatttcttcgcagacatcttgctccaggttgagcagctgattgatttcttttcgtttttccaaatccgtgaaatagctctccactactgcatagatgttgaagccggttgtggaacccgcagccaaatccaatgactcaaccattttctctactgcttgatgaatgcgtttcttactgataaaatgcagttcattactatgaattaagctcttttccatgatattttctgttttagttattgtagttataacattctatcaagcaagtaagttcatgtagattgaacagatttgacagtcggtcgaatgatatttttcctatatttcctctatgaaaagcaagaccgcgactatctttgtgagtggaaacgagtgtctattcctttctacatcttttttccttgcactactgcatgacggttcagttccgattatagtcggaacaatgaacaattatgtacatttcctcttcgagattaaaactcaaccgggtgtcctactccgtccgaaacgatagccactttgcgaaaacgggatataatcaccacaaatatattgaccttgtaacggacggttgtatcattatacggcagtcatatcggttgccgtataatgatctgttggtttgatatactgagttccctgactaagtacataccatactgcaacaagtatttttctcgcaatagctacttgcaccttcatcttgttctttcttctttcgatacattgcctgtatgagaattctgcgaaaaatgaatctttcatacgtgcagctccccatgaacattcaatcatggtttttcttacaaacctgttaccatgtgtgatacctcgtgccttgattttgccagcgctttcctcgttacggggtcttagccccacccatgacaccaatttctttggtgtctggaaatgtgtcatgtctgttcctatttctgctattattgaggtcgaactacgttctttcactcccggtatagtctgaaggttttcaacttcttgaggaaaccactccatgcatagtgcagtcatcttttcctgtgcttcgtccttgtgtcgttgctgcaattcaatctcttctacaagctggtttataatgtctatgtcggtctcgctgacaactccggtaagtgctttcaccaatgtttctctgccatgcctgttgattgttcttccatgcagttccttcacaaggacttccgcatctgtcacaccttgggatataagtttaactattgaacggtaccctttggaatctgttgtggatatataattactgattctgatgttgcacctctggatgcattggtcaagtttgactaaattgcggcttatggaaacattcaggtcaaatatccttctgtcatattgacgcagacgttgaattttatcatcaggaacaaagcttgatgctatcagttctttactcagacaagtagctatccattcggcatcattcacatcactctttttgccaggaagctgttttataaaataagggtttaccagatgaagtttcactgacccttcaagcactcgccatatgggtatccagtagatactggtactctccattgcacactcttcaacaccttcagagaccataaggtcgcgaagtgtgaccaactcttcggtaagaactccgaatttatgctggattttttctccattagcacacagaatacagcaaaaaacactatctttgtgtacgtcaagaccgcagactaccttcatagaagtatttttttattgggacatcaagcccgttggacatatgaggatggggaaaccctatgacctcgtttttaccacaaagatagtcgcggtcttgactttcttatttaccgggcgtaaaaaatctgtttttttatatacctttgcaaaaaatataaacgcggcaatgaaagaactgtttataaaaatactccgttttctgatgtttgtactggtcgtagctttgggctgcatcggatataacatctatgaagatacgttggctgctgtgtggatacccgtaggggtaggacttgtggtggcagtcgttacacttcctctatataaaaaatggatatggctgacaacgatggagcaaaaggcagtgaatatattgtgccatgtggtgtgcgtgggtgtcatcagttgttcgctttttctggtagggaattatcggatggcggctcctgcttcgacaaaggaggtgacggttaccgtacttgagaagctgataaaagaacatgaaaagagacgtaaagtaggcaagcatcgttatgtgtcggacggagtacgtaaggaatattacttaaaggtggctttcgaggatggagcgatagagaccttgcatgtttccacagccacatacaacaaagcacgaaaaggcaaaccgaaagtcctgactttgcagaaaggaggtttcggattgccggtgataacgaaggggctatagttttcatccccccatgcaagacatcagatgaggaactgaatgctcttcttaaagatttctgcgtacaaaatgtccgtcaatccaaatggtggcatggtgtcctttgaatttcagtaatacataattgggagctgccgggcctttatctccaccttaccggtgagcactacgctgtttccttcttcctgaaagcacaaacctgctttcggattggctgcacctttgttttaagactgtctttgccggttgccaaccatacggtggtggccccttccgacttgatattgctcattggaacggggctgggatgatattctttataggttgtaaagatacagataaactgatagggaaatccctatgtataaatagagagaatcacggaaaaggaggtttttatcatactacatttgctgtatggataaatactaaaactttctattatgaaaaagatgtcagttgttttaggcttgttactcgctgtcttggtgatgggctgtggcatttatgaaagctacgggtttgattataagcagttgagcagcattgaacgtggtatgagctttaaagaggtgtgtaccattttaggagagcctgcatttagagatttgaataaggagggagaggcttggacattccgcgcttatactcctgcggggtggtcggctgtcaaggtgtggttcaaagacggaaaagtggacgaaatgaagagctatctggaggatacttatccggttaccacttcgcgggacaagagtttcatgaatgagaaaaaagaatcttccgacaagagtagcgaaacaaaggtaatagtttcgccggaagggaaacattacatcaaaatgggctcggtagtagtcactcccgaaggcaagcatataatagtaccttgattataccaacataatcgtttccggatatagtataatgtgaatatacctttctataaagtgttgatatttataaagttctatattttttgcagattttaggtatatgtagttcaaagaatgttatctgaaatgaaaagaatgggcaatgtttgtcattgctctgtctttatcttatatttgagtagataatataggatatcattttaagaaaggaactaataataagataataatatgaagagtattgagaaggcgaccaataatatgaaaatggtatattccattttgtgcaatcttaagaagtgtacaatctttgaattgcagaaactgacgaagttcagggatgtggatttgtgtttggccttggggtatctgctgcagaataaccagatttatcagaagcgtattgataacatggtttactatggagtcatcgcaaaatgaaaagagatacaataggtttaccacacattttgcttacatgcttgcatggtgctttctaattgtttgttataccgcattttacagtatgtaagcagatgccatgcaagtatgtaggcaaactttgcttgcatgctgttttttcttgtgcaaatggctggtcttctttccgcaaagaacagctctttctcctactaaaagcttattaatgactattgtgcacggttgtgatgcagtttcttcactattgtggtacggcttcttcatgcttgtggagaagtcgtaccacaatagtgcgcatgcctaactatcatttattcagtgtattgacagcctatgttagagcaatgaaagactgatagactgtctttcattggctgtgtgtctaccttcaaaagagtgatatggtagtggataatgttcatgttttgctgctttttcagtgaaagaaatcatgaatatttggatacttgaaaaataagtcccacctttgcacgcgaattagaaaaccaaaagagttttgtaatcctcatcggagggctgtaaaaatgccggataagatgactgggtaaaaccaatcattttatccggcatttttttgcttttgggcaagacaataacctataaatatagttgaacatgaaaagagatgcaattgatttgagtacactgaatgtgtttacattgtttcggaaatattttgttcctacgttgctgggtatgctcagtatgtcggccgtaacagcgattgacgggatatttgtcgggcatggagtaggtagcgacgggattgcggccgtaaatatctgtgtccctttactgatgctttttacgggaatcgggcttatggttggtgccgggtgttctgtggtcgcttctatccaattgtcgagaggcaaaagcaagtctgctcggttgaatgtgacacaagcattactgtttgtaacgattgttgctttgataccctctgctttgatgatggcttttccggcagaaacagcccggatgctcggctcttccgaacatctgttgcctatggtgacggattatctgctgtggtttgttccgtcatgggtctttcagatatggataacggtgccgctgttcgtcattcgtctggacggtgctccaaagctggctatgttgtgcagcctgattacggctgtaatcaatgtggtgctcgactggctgtttatctttccttttggctggggagtcatgggagcagcatttgccacttccatcagcatcatggccggcggactggtggcgatggtctatctactgttttatgctcggcatttgcgtttacaaccactcaaatggagtgtcaagagcctgcggctttccgtgcggaatattggttaccagtgccgtatcggtccttctgccttattgggagaggcaacgcttgctgttcttatgttcgtcgggaaccaggtatttatgtcctatctgggggacgatggcgtaggggcattcggtatagcgtgctattatattccttttgttttcatggtaggtaatgctattgcacaatctgcccagcctattatcagctataatttcggactgggctacaaggaaagagtgatgacggcggaacgtattgcgttgctgacggctgtggtctgcggtgtggttgcaacggtggcattcactgtttatccttatctgctggttggccttttcatcagtcttgacagtgaagcggcgaagatagcgatacacggtttcccctattttgcaagcggctttgtctttttcattgtgaatattgctgtggtaggttattttcagagtgttgaaagaataaagccagctacgatttttgctttgttgcgtggctttgttttccttattccgagttttattttgttgccgaagttcttgggtgtgtcgggaatctggttggcaatgccactctcggaggctttgacaatcattgtgattctgctttttgttctgaagcatcggtatgcttataaagtttccagccaactcattacgtcgtagatgcctttaaaaaaacgaggttgtgccaacgttttgacataacctcctaaaaccgtaacctaagatttctaaaattggcgagattggacaatcatacatttgtatgaactctatatatttgcaaattatatcgttatagatgaaaagtagcactgaaaatatatacaaacagaaagtcaatcaagtaattgattacataaattttaatctgcatcagccattgcaattgaatgtaatagccgacatagtaaatatgtctcaacggcaattgctccgtatgatgagttctgctttggatgaaccattatactcttatgtggcgaggcaacgagtagaacgagctgtactatatatgcaaactgaagacatgagtttacagaatttggctgggttagtcggctacgataatccgcaatcgttctccaaagcatttaagaaacaatttggtatctctcccaaaacatatatcagcagattaaggatgcgattaaaagagtgcgaacatgatggaaaggagtgcgaattgcattctgaagtctacaatttcgagggattaaatttagtatatatccgtatatggggtaagtacggagaggaagaaccttatgaaacagtatggagtaaattgatacatttcttaaagagcaatgacttacttctgcccgatacacgttttattgggttaagttttgacgaccctaatgtgacaaaccctaatcaatgtcgtttctatgcttgtgcatcggtacaaaaggaaattatgcctacttgtgaatttggtacaatccggctaccacaaggtaaatatgcggtctatacgttgcaggggtattatacagatttgcaggactggtataacatcattaacgtaagccaagaatattcacttcgtcatgggatgtcttttgaggagtatatcaattattcaaaagaaaataaaaaagagagtatcacaaaaatctacataccgataaaataaataaaagcatggaaaatagtttacctaaatatataactctaacagaggataatatagataaagaacatatctgctgcgcattctctgacaaaaaatgcttggaaggatatgagtccaaaaaggaatggctaaaaaaggaatttgctaatggctatgtttttaggcggcttgatgcacgagccaaagtttttatagaatatgttcctgctgaatatgcgtggcttccggttactgcccctaattatttaatgattaattgtttttgggtttcagggcagtataaaggtcaagggcatggatataatttgctccaatttgtgattgaagatgcaaaaaagcaacaaaaaaatggattggttactgttgtaggtacaaaaaagaaccattttatgagtgatacgaaatggttgctgcaacatggctttaaggaaatagaaaaacttccaaatggattttcattgttggtaatgagttttcatgagaatagtgcagttccatattttaatgattgcgtcaaaagtggagaatgccccgacaaactgggaatagtggcttattattctaatcgttgcccatatacggattattatgtaaatggagtgttgcgtgttcttgcgcaagaaataaatattcctttgaaagtaattaaattggaaacgagagagcaagcacaaaactctcctacaccagctactatattttctcttttttacaatgggaagtttgtaactacggatttaagtatttgtactgagtctaaatttacaaaactattaaagtagtaaaatgaaagaactggttaataacatgttagctgaaatagaggtcaatatatctgaaatcgacctctacggttatgatattgttgaaacttttctttcaatagtgcgtcgtttgcaagcggttctcaatgatttaaaaacaaaactgcaaattcattccttctataagatttatcggatagaaacacaatgccccgatggtagtaatgatgtaatcagaaactatattaagtaaagaactggataacctgacctgcttctttaaccgtaatctggacttttaccaatattatcgttttcattcgaccttgtatgatgaatattatgttgttcgtggaaagtttgatttacgcctatgtaccgatagcgcacaattcgataaagacctgaatttctcaaccttgtttcttcgggtggcattaacaatggcaacgtgggaataaaagaaatgatgaattttctcagtacggtgctctaaatggagttaggcgattattatgccgcttatattgccatgaaagaacggaagaaggattggacggcatatcttagccgtttgcaagacagcttagtcaaacgaatggacgaaggatagtaaatgacaaacttctgtttttcttttcgccagtattatattgcttcaatattataaatcaaccatttagtcttgttggggtaccgtgctgtggatgctttccagcatagaattgatatgtacggcttctgcggttctgccggaagccttgcctaacttcacgctccagtgagccggatttatttccagtttggtgttgaactgggctacaacttggtcgatagtgatacgtgcgataatcggtgcgttgccgttcttctttactgcatttcgtttgacgaaatagagtagcttgaaagtacttctcataatctcttttttagttacaaaattaaattgatgaactgaaaatgagatatttgcagtacggacaaatcaagacaacaaaccgacaatttcagacattccgtgacctaaaatccgaaaggtcggacaggtcacgaattggtcacgaaagtatgtctttttgtgaccatttcgtgtcttaggtcacggactttatacaaagaaaaaactcctgcaataccttgatattgtaggagttgtcttttctttgtctggttttgtccagcttcttggtgatccgcctggggctcgaacccaggaccccaacattaaaagtgttgtgctctacctgctgagctagcgaatcagaccttattgctgttaagcgggtgcaaagataggcacttttgtttaaaaaacaaatggattaagggaaaaagttttgagaacgacttctgcttttactcttcttgttgattatcagtctgttcaaacttgtgaattttttctctgtttatgatgaaacgttgatagtaggagagcataagggtggtaagcggaagtgctataatcatacccagcatccccatcaatgacccccaaatcgataaagacagtaagatgatggcaggattcaggcccgtaatcttccccatgacacgcggtacgatgaatccgtcttgaatggcttgtactatgatgaataccgcaagggccgatgcaatgataatccagaagtttcctcccgtatccgctgctttcagtatggccagcacgatggtaggtataaagccgataatctgcaaataaggtactaggtttaaagcgccgatgaacaagccgagtccaatggccagtgggaaatcaataatcagaaagcctatactgaacagaataccgacacacaatgccacgaatgcttgtccgcggaagtatctgttcatgccgtctttcacatcgttcattacattgattacgaagggccggtatttctgtggtaccaggtgggtccacccttcggaaatgctttcgtaatccagcaatatgaaaactatatagagaagaatgaggaagaaagtgaagaaactgaacagcagattgacggattctgacaacaaggaccagagccggggaacggtttccttgatggcgttcagcatattctcttccttgaacaattgggtgacaaactgggtgtctatgttctcacgaaggaattcagagagtgttttgggcacattgccgtcgtgggttccgttggaaaagtagtctattaccaaatcttttaccctgacgaattcgtccatcatgggaggcacaagcagatagaaggcggttcctcctacaatcagaatactgaataaggcgcagaagatggatatgacccggttcttgagccttaatctgtactggaagaaggtgaccagggggtatatcagataggcaatgagccatgcgatgaagaatggcagcaatacgccgcttagacgcttgaagagcataaggatgccgataataatgacaccgagtatgacaccgcggataaaactgtcgaatgtaatctttttgcgttccataatgctctgttttttgtattcgttaatgaccgctttccttttggtcggcttggatggcttgctgatagcactctcggcatagcggttcgtactcttcggtttctcccagcagtacttgtttgtcgttcttgacggtacggtgggagaacgaggcaagttggccacatttcacacagatggcatgtactttggaaacttcgtctgcaatggcacacagtcccggcatagggccgaatggaataccgcggaagtccatatccagtccggctacaatgacgcgtataccattgttggcaagctggttgcatacatcaatcaggccgctgtcaaagaactgggcttcgtcaatgcccactacatctatctctgaagtgaagagcagaatgctggcagacgagtcgatgggagtggaggctatggaatgactgtcatgcgatacgacatcggcttcggaataacgggtgtctatggcaggcttgaatatctctacgcgttgtttggcaaattttgcccgtttcagtctccttatcagctcttcggttttgccggagaacatggaaccgcaaatgacctcaattcttcccctgcgtttggtttcctgtatatgatcttctgaaaataataccatgttttcgagtgttatatttaagcgcaaaagtaacacttttgtttgctttccgatattttttcattatttatttctacatttgtagcgttaacacggactgtgtaaaggatatgcaaaccctattaaacgacatagaattagatattcaggaattgaaatgtttgatgcaggccatttcaagtgatgccaatccgacattgaagattgtggcaaaacggaatatccagcagatgaaggcacgcttggaggcgttgcaagaactgcttgaggaggcgccaacggctgttgtgtcgcccctggaggaaccccctgctgttactactcctttgaccgaatcggtttctccggtcgaatcggttattcctgatacagtgaagatggtatgtgaggaaccggaaacagttcctattttggcagaacgcatcaagcctgccaaggatttgaaacatgccatcagtctgaacgattcattccgttttgtccgcgaactgttcgcaggcgatgctgcacggatgaatgaagtggtacgacgtttgggtgaggctccttctttggacaaggctatggatatttttgcttcggaagtgcacccggatgaagaaaatgaagccgccgtcgattttatggaactcctcaaaaaatatttcagctaaacaaccgataagtatgggaaaactttatgtagtgcctaccccggtaggaaatttggaagatatgacattccgtgctatccggattctgaaagaagtggatttgatacttgctgaggatacacgtacctccggcatattgctgaaacacttcgaaataaagaatgcgatgcaatctcaccataaatttaatgaacataaaacggttgaaagtgttgttaatagaataaaggggggagaaactgtagctttgatttcggatgcaggtacgccgggtatatccgacccgggctttctggtagtcagagagtgtgtgcgtaacggcatcgaagtgcaatgcctgccgggagcgacagcttttgtaccggcattggtggcttccggactgccgaatgagaagttctgttttgaaggtttccttccacagaagaaaggaaggatgacccgtctgaaggcattggccgaggagtgtcgtaccatggtgttctatgagtctccccacagattggtaaaagctttgacgcagtttgccgaacatttcggtgccgaacgtcaggcttctgtttcgcgggaaatctcaaagatgcacgaagaaacggtgcgtggaacgcttacagaattgattgaacatttcacggcgaacgaaccgcgcggtgaaattgtgattgtagtaacaggaatagacgattaaataacttcattaaccaaacgtaaaacgaaagcgtatgaaaaagttagcagttttaattgtatgcgcggctgtaatggcttcgtgtgacagcttctctggtggcagtaagaaccagctgaaagctgaaaatgattctttattgatggaactgactcagcgtaatgctgaattggacgagatgatgggcactttcaatgatatttcagagggatttcgccagattaatgcagcagagagccgtgtggatttgcagcgtggtgctgtggcagaaggctctttgaatgccaagcagcagattgcgtcggatattgagtttatccgtaagcagatggaagagaacaaggaacagattgccaaattacagtccatgctgaagaatagtaagaataactctgcccagttgaagagggctgtggagtccctgactcaggagttggtggcaaagacccagcgtatcgaggaattgcaggctgagctggcttccaagaatatccgtatccaggaactggatgctgccgtaaccggtttgtctactgagaaagaagaattgactgccgaaaatgaggcgaaggctcaaaccgttgccgaacaagataaggcactcaatacggcttggtttgtatttggtacgaagaaagagttgaaggaccagaagatattgacaaataccggacttttcaaaaaaggccaggtgctgaaagattctgatatcaacaaggactactttacacaagtggatatccgtacgacaaaagagattaaactatactctaaagatgctgatatcttgactactcatcccgctggttcttatgcgttggagaaagatgataaaggacagctgactttgaagattacaaatccgaaagacttctggagtgtgtccaagtatttggtaatccaggtaaaataacactgttatagactgatacagaacggacgcagattattggaattgataatctgcgtctatttttatatatctctttcctttaaattatggcatcccaatataagaacctgttttttgacctggacgatacgctttgggcattttcccttaatgcacgcgatacattcgaagagatgtatcacaagtatgattatgaccgtttctttcgttctttccagcatttttatacgctttatcagcatcgtaatgtagagctgtgggaagaatacggcagagggcaggtcagtaaggaagagttgaaccgccagcgttttctatatcctctggaggcagtaggggcgggggatactgctttggccgaggctttttctgatgatttcttttcggtcattcccacaaaaagtcggctgatgccgcatgcgtatgaggtactggaatatttggcagagaaatacaacctctatatcctttccaatggtttccaagagctgcaatgtcataagatgcgttcggcgggtatcgaccgcttttttaagaagattgttctctctgatgacatcggtgtcttgaagccctggcccgaaatctttcattttgcactttctgccacacaatccgaagtgcgtgattctttgatgataggcgatagttgggagaatgatgtggcaggagccaaaggagtgggcatgcaccaagtgttttataatgtaacagggaaggaagaactgcctttccaaccgacttatcatatcagtaatctgaaagaattgatgcagattttgtgacattgaaatttttagttgtacttttgtctgcagaaacgtatattatacagctatggacacaatcttacctttcgctttactttgttttacctccttctttacgttgacaaaccctctcggcaccatgccggtgtttttgaccatgacgcatggaatgacagaccgtgaacggcagtcggtagtatcgcgcgccactttggttgcctttataacaattatggtctttacgtttgcagggcagttcctctttaagttcttcggtatctctaccaatggtttccgtattgccggtggagttattatctttaagattggcttcgatatgctgcaagcccgttataccccaatgaagctgaaagacgaggaaatcaagacttatgccgatgatatttccattactcctcttggaattccgatgctttgtggtcctggtgccatagccaatgccattgtgctgatgcaggatgcccataccattcagatgaaaggagttcttataggaatgattgcctttatttatctgattaccttcttcatattgcgtgcttccacgcggttggtcaaaatcctgggtgagacgggaaacaatgtgatgatgcgcctgatgggacttatcctgatggttattgccgttgagtgttttgtcagcggagtgaaaccgatattggtggatatattgaaagaaggaggcataccatcactggcacacctcctctaaacactttatttataaaaacacattgggaaaattcccaagtttctttaggctactattgattaatagcctggattttgttctatgttcggattggcattgatttcaccgacgggaatcaacgggagcgctttcttggagtcgcggttgaatgtacgcgcttcttcgctcaatacgtcgtgccatcctctggcattaacgtccgtgtagcgtgtaacagtttcacctcggcgcataacatcgaaatagcgctgtccctcacctacaagttccttgcggcgttcaatgtagatgcggtctaatgtgatgtttccgctggttacttgtttgctttcatccgttgtgcggttggagatgatatcgttcagcaagttggcagccttgttcttgtctccggcttggaaagctgcttctgctgctgacaagtaaacttctgacaagcgtagcaatgggacattggagtaacgcacatctccgtttacagctggcattttgttgatgtaaactttgcgcttgtcaaatcctcctgctgccgctgccaataatatgtcgttacggatgtctgccgggtcggatgtaagcatgtcagagaagtcttttgtgacaattacatctccatatccgggagaagcgccagccttgtcggcatataaataggcaataccttcacggtctgtccagtcagtattgttgttgatggaaatctcgaacatgatttcttttgaatgattggcatcacttttgctccatgctgcaacatattctgacggttcccaaagtttgtaagacgagtttgatatgatgtcttctgctacgaataaagccttgctccattcgccttttgtcatatatacacgtacctgcaaggctttggcagcccaaaggttgacataacccacttcattggttttgggcagtgcatttgagttgattgcatctgtcaaatctttttcaatactctcataacattgagctaccgtgctgcggcttggcttttctgtcgattctagtggggaggtagcgatgggcacaccgagtgagctgccttgatctaccgtataaggtttaccgtagatacgtgtaaggtcaaacagtgccatggcgcgcagaacttttgcttctgcatcatattggtcaatagtggcttttgcctctgccgcatcggtcaggttgccactttctgctgcctgaatcagacggttggcgcgtgcaatgactacataaggcatctgccatacggctgttgaggtggtgaaattgtctgcagttgtatattccatatagtagtagaagtttgctcttccacttccaccgttatattcatattggatatcttcccctctcatgtcaccgtatacgaacatgaggcgtccataataattaatcaggctactgttacctttaacggcagcataaagtcccgtccgcacattggccaaatcatcgctgttcttgattgcggtttcagcatctattccgtctgcgggtgactgatccagccaactgttgaggcatgatgaagtgctgactgccatagctgcgcaaagcgttgctgtgtataatgtctttaatattttcattttcgtatctttattagttagaaattcaattctattccgaatgtatatgttctcaatgccggagtctcaaatgtgcatagtccgtctacacgcatttccggatctacaaataagtctttagatttccatgtaagcaggttggaccccgagaagtaaattcttgccttgctaagtccaagcttgttgatatagttttgcggaatgcttacacctaatgtgaggttcttcagacgtagataatcagtaggcatcagccagcgtgaagacagtgaagctacgcttccatattcaaatttaggcaatgtggcattcgtgtcgcccgggccggtccacatctttgagatgtcatagtatgtcggtacggcaccaccgtatagatgtgaaccgccattggagtgctgccaagtggagtagtcaaaagcatcaccacccaatgaataagtgaaagtgaagcccaagtcgataaacttccatttgaggttgttggtaagaccgccttctatactagcctgatgcctgcctacaatagttttgttggcttcagagatatttgtagttgtcttgcgggcattctctgttccgtcattcagatagaacatttctttaccggtctcggcgtcgactccggcgtattcataaacatagtatgaatagtaaggttcgcctacacggtgaatcagcggtcctgatacgatttcattctgctggccatccaatttggtcagtttgttgctgttgtgtgccatgttcagagaagtggtccacgtgaaatccttgtttctgaaattggttgatgtaatggtcaactcaaaaccggagttcttcagtgaaccgatgttttgcggggtggtatacccataattgccatcataatatccgccgacttgtgatacggggaggtcgtatataaggtcactggttttacgctgatagtagtcgaatgttacagagatacggtcgatgaatgaaaggtcgagaccgatattccatgttttgttcttttcccatttcaggtccgggtttgcaattccgacgattgacattcctgactgtccattgtatatgattccgtatttataaagattcatataagcgtaatagtctgatggttgcgttccgtttacaccgtatgacacacggagctttccatctgtcaatacactcttgacaggattcaggaaactttcgtctatgaatctccatgctccggaaaccgaccagaaacttccccaacggttttctcttgccagacgtgaacttccgtcggtacgatagctgagaccgagataatatctgtctgcgtagttataattggcacgtccgaggaacgaagtcatgcgatagctctgtctgttggtttcggcacttgttgaaccggcatttgtcaattcgtacaaatcacccggatagtcttggcctgccatgtagttgaaagcatattccgtatcttgtgtttcaaaaccaagcagggcgtcaatattgtgcagaccgaaagagttgatgtaagagagctgggtttgtgtattcagctggtcattacgattgacgatacgctgcatgacaccaccgggggcaccattgtttgagtgtctgtcccaaagaacgtcattggttccttgtgcgtaatcataagcaatcttttcacttaaatttaacttgtcccaaatattgtaggtcaacttgattgtattgaatgccttcatcaaggtataaacatcagaactgtgttctctttcatacaagggattgactccaaatacgccgcaaccattgtttaatgtgccgtcttcattataaggggttgatgaggggctctggaagaatgcgtaattggccacaggcccatcataggaggtagcttcattagttttgttttgtcttacttttgagaattggcttgtaacctgaacttcaaagtctccaaacttatgagtgaggtttgcattaccagtgaaacgttccagaccttgtttgtaaatgataccttcctgattggtataagcagctgaggtgtagaacttggtacggtcgttaccgccagatacgctcaactggtagttctgatgagaaccgttacggaaaagcaggtctttccaatccgtccatccggttgagggttttgaagcaaagtcctcgatgttctggtctgcaaaagttgcggcatctgcatcggacatgtttccggtgtataacccgtaattcttgagaccggtccataagagttcgcggcgcgagtcaccgtcgagcataggacgataatctattgccatgtttgagaaaccccagtcggaacggaaacttacatttgttttgccttgttttccgcttttcgtcgtaatgaccacaacaccgttagcagcacgcgagccgtaaagagaggcagcagccgcatctttgataactgtgatagactcgatgtcattggtattgagtgaagacaaaatatcagttcctgcatcactataagtgaactcggataagtctccacttgtgaccggtgttccgtcaataacataaagcggattgtttccggcattgatggaacccataccacgtacacggatactgcttacagaacccggattacttgaacttgagccaaaagtaacaccagcgacattaccagaaagtttgtcggcaacagaaagaacaggtacatcttccaaggtggaagtgtttacagtagaagcagctccagtaaatgatgcttttttaaatgtaccgtaaccggtaaccacaacctcttcaagcagctcagaatcggatttcaaaattacctttacatgaggtttaatcgttacttcttgggtttgcataccaacaaacgaaatcaccagagttttcgcggaactacattatgtctatattgttgataataagcaatataaaataaataaaaagagctcctgaaataaagtattcctctagagaagatactctatacatatccactgtaaatgacaatctacttatatgatactatttgtaatggtaatatcctgatttgaaggtgtttaattctgtactgatgtgctataatcataacgtcaggatcttttttctcaaaaactagaagggctttgtcaatatctatcatttagttgctttttgtcaattatttactcgtgttgtttattccatctatgagaatgtaaacccttatgtaaaatactattgaatttataatggttacataaacactatcctacctatttatccattttatgcatagaacaccatgtaattgtctctatcttataaatggagattattccaaatacaaagtaattggagtaaagaattctatagctatgaaaaactactgtttggagcatgtcaaaaacgtaatgaggaaattttcttgtaagagaatatagtctacatagaataacgaagactgagtggatatattttttattataattcaagggaataaagaatgtacttttgtaatccgcactggctctcgtgtcgtgcagacaattcaggtttgcagtttattgaagagaggatatttctatcgtttcagctcttctccataaagtctacgcagtatgatacgtgccggtacacttttaatctctccattgggcaagccttgtataatgcattcattgcgcaatgctttttcttcaagcatacgacgttcggctaatgccaaaccgaaatgtaacttttcgcttagttcttttcgttcattctctgacataactttgtattttattaaatcgttcaatgtgatgtatatgcatatccattcctcgtccaccttcagcaacaattatacggggtgtttcgctattatctgccaatagccaatagtccacacaaggcatataaatattgaaaaagttatcaatacctgcttgataacgccggagcacaacctctttgggaatgtcgtgtccaccattacgtacacgttgggctacacgctgaatagccaagtcgggcgaactcagccagaaatatattaaattgactttatatccttgttcttgtgcacgatggacaaggcgagtgtaagatcttgtggcaagtgtggtttctatagaaaagttttgttgatttttcagcaattcattgattctttgcaacatcaaccgtccggcttcaatggccatactttcgggattaaaaggagataatccacgagctatttcatccgcattgacaaactccttgcattccagaacatccggcaacacagtataagatgccgtagtcttaccagcaccattacaaccactaatgatgtagagttgttttttagaatccatattcatgcatttatctaattgcaaacatacaatatttttataagattatggataattgatagttattgttttttaaaagttgattgttgttgcgagagtctagaataaaaaatgaggttgtgcagttcacattttgacaacctctatcaaaaacactttattttccaaacaactccggtggaattattcccttccaaggtttaactcatcgttgtaatctgtttcattcagatgctgttcataatttaatttgcaattccatataaaaaataggttcctttgttacaaaactttctattggcaatcgaaagtttctctatttatatcatatttttttgtatattagcaatatatataaagagaggaagattgtgtggataaaagtctattacgctaagttatttatgagcagagaaacgagcaaggtgtttgttgccggcagtaatgccaatctacttagtaaagagttgggcacttttcttactggcagatatgtcactatggaactttatcctttttctttccatgaattcctgaaactaaagcaagtagcaataaaacaagatacattttatgctgcagaaggcaaggtgctactccttagtgaaatacaaaaatacctaggaataggaaactttcctcaatacattcagtcagataatgataactacttgctttcactctataccgacatcatttataaggatgtagtggcgaaacaagataagcaatgaaaggcagcttggagagatgatgtattatttggcaagtaacgctactcatcgctttgcgtacaattctgtaactaaggctgtcgatgttaaaagtccggacacgataaaatcatatataggatttgtggaagatacttacttggtacgacaactatcaattatctaaaggcataattattactttggaagacgaggaagaaataaccgttaatccccggcaacagatttctatacgtcctatttggaaatgattgttgcagaaataaagtggaaaagatagaataacaaaagccgcttacttcacagtgaacggcttttaaaacactttatttagaaaacaccctatcaaatagagatgttttgaaagttcataaatcagatatactccttcttacagacttatttataagcaggattctgatcattatttgtcagttctccattagcatcaatctctgcttgcggaataggtaattcaaatctatcagagccagcaggaaggtctaattgactagtccacaaatcgtgtccgtcaactccagttcttgtcaatgccaaacctctacgtttcatgtcgaataggcgatgtccctctgcaaataattcacgccttctttcttgttgtatctcatctgctaaaccggcatccgttccactatatttatccaatccacgagctatccgaacaacatttaatgcttctttagccacatcataatgctgtttgtcagcagctaattcagcaataataagatacatctcagaaccacgcagcatattgaaagagccttgtcccatttcattgttacgactatgaatctttgttgtcaagtatcctgtttcactgatataatcgtttgtttcagaatctttcgggaactgagttttgcgtatatctttatcttccattagattaatcaaagcctttgaaactcgtaatgagctataaccaataacagcatcttcataatcatctccacacaaataccagaaagagggtaatgaaagaccttaattccgcaacactattacaaatataactttttaagtacctgagcaacaaaaagttgctcaggaatttgccatgtcagatttttcacctatcttagtgttgcaaatcaaaatatgtatcaaacccgacagacatggcaaaggtagcaattaaatccgagaaactcactccttttggaggaatattttcaataatggagcaatttgactccagactctcatctgtaatcgactcaaccctcggtatgagatgcaggctgtatggttatcaatacagcgaaatcatccgttcgcttatgagcgtttatttttgtggcggctcatgcatcgaggatgtcaccactcatctgatgtaccacctttcgcttcatccgacacttcgcacatgcagtgccgacacgattcttagagccataaaggaactgacccaggataacatttcctacacatccgacactggcaagacctacgacttcaacacggcagacaagctgaatacactgctcctcaattgcctattgtccacagggcagctgaaagagggcgaggggtatgacgttgacttcgaccaccagttcatagaggctgagaagtttgatgcgaagcctacatacaagaagttccttggttatcgccctggcgtggcggttattggcaacttgattgtcggcattgagaacagcgacggcaacacaaatgtccgtttccaccagaaggacacgctgaagaggttctttgaaaggtttgaacaaaacaagcttattatcaaccgtttcagagctgattgcggctcgtgttctgaagagatagtggaagagattgctaaacactgcaagaccttctatatccgtgctaaccgatgcagttcgctctacaatgacatctttgccctcagaggttggaagaaagtggaattgggcggcattgagtttgagctggcctccattctcatcgagaaatggaaagggaaggcataccgtcttgtgattcaaagacagaagcggatagacggcgaactcgacctgtgggaaggagaatacacctaccgctgcatccttacaaatgactacgagtcttccgagaaagagattgtcgaattctataacctccgtggagggaaggaacgcatcttcgatgatatgaataacggattcggctggaacaggcttccaaaatcctttatgggagaaaacacggtgtttcttctgcttatggcactcatacgcaacttctataaattcatcatggcgaggcttgacgtgaagaggttcggactcaaagcaacaagccgcatcaagacgtttgtctttaagttcatctctgtgccagccaaatgggtcaggacatcaaggaagtatgtgctgaatatctattcatgcaacaatgcttatgccaatgtgttccagaatgactttggataacaccgacaacttatagtcgtgattttgcgtattgcctcaagtcgcatggtggggtaaggggcatttatatgtctttatggtgacattcgatgcactgtgccccctttttactaacgatgcagattcttttcgcttctgtatcatattaggcgcgtagttgcggatttgaggtttctcataaaactccaaaactttggaattaaggctgatggctttctgcttatttccggcattggaatatattgttgacataattcctagaatattgatataatctacttttgccgtgccatattggcgcattatgttttcagccttttctatttgaactagggcattgtttatatctcccttggcaatattggcttggcttatttttaccataataaatgccggtattgaatcgctgcgattagcttggttacaagcctctaaaaaatcttgtcccagagtgatagcttcgtcatattgtccgaacatttggtataagtcaatggtattggacaataaaatttcataattgtttgatgtttttccttctgctagttcacatagagataatgcttgcatcatcaaagttttggcctgttcgtagtttttgttcctgaatgcaatgaccgactgttggttgacaatttgtgcttcgagtaaagggtatcgtttatgagctatgctgtaggcttcatctagataacgagtagctttgtccaatccgtctttcattgagaagtctgtatttacagatgcaagcgacagaagggcatcaacatatctttcagagtattcaccataagtatgcttgcatatatttttatttatcaggtagttttcttctgcattgatagagtcccctaatgcataatatagattccctatgataatggtactgtttccataccaaatatgttcttttcctgctacttgtttttctatgtctgcacagcgtaaagcatactccaatgcacgttccagatttccagcttgtgcaaacatgttggatagttcagagaaacggtctgactctacggtgagcctcctatctataggaggtaccatgtaataatcggggctaatggcttgggcctcctttattttccctaattgcatataacagctggatagccacatctctgagtaatagcgccgggagttagtcgtatctaatagtgctttgtcaatattgttgcttttgttgaaataggagatggcttcattatatctcttaagattgtacaattctacccctttggaaaacaattcatccgattcgacactttgtgcttgaagagatgtagtgaaacttagaaaaatgaccaaaatgataatacggtttatatgcattcctatttttgatgctacttatgagtcttatgctacataaaataggtttttataattgtacaattattggggataatgatgggcagaggtgaactgatatttctaatagcttgtttcagcctcgagtcccaacttgtcaattacatcttgtgttataatatctgccggtgcctttaaggttgtaatgacccattgtttggtcagctcattccattgctggctggagacaacttgccagctacgtgtcataatgtcttcggatggttccaacttttttctgcgcttccggtcttctttccagttcttccggtattggtctgtagcgtcgcaggtttctttcaactcgatggatagtttgtattccccagtaccgaagctgattctgtattcgtcattttcatcacggaaacccatgtaagagcgaggaacgataaaactttcgcctctgattttgtatttggcgacttcattgtcttttcgtatataacggaagaagccattgcggtcaagctggctggaatctacaggtatttctaatgaaaattgtcctaattcctggtctttttgtaactgtacgatttcattcatccaagaagaagtcaacttcattgtcatagaaaagcagaaattctttctttcttcaaatgaaaaaggaatatttaagacagagttaggcaagttagagcgggttgggcagatgataagggtgtcgagtgctaattcaaatttagagtggtttatgatacggttaatcttgttacgatcaatatgacatgaaatgtaaaagaccgtatcattcccttcttttcgcaggcatcctattccgtcaaatttcatgcctttagggtctaacgctccgtcgaacgaggtctctttataaaaatcgtttatttctgatatagtgctgatattagtggtataaacattttcagtacgtatagtttcttcccactcattttttaggcgagaattccgtgtcaataaagaacctatggcatttactcctaaatcaatgaaggatgtcacatatccggatgcaatgcctttgacagactctttactggcattgaacaaatctcccatataactgcgggtggaatttctttcttcacacaaactttgaatttcattagctaaatcatcgttcgtgtaaataaatgtttgatattctactgattgtgccaatattactatggaactaaataagaatactaaaatggataaagtctttttcatattttaaaagattacattatttgtatatatagaagtacccgttggcggaattaaagagagcgtaatcagaactctgtctctaaacaattatctttgtattatggatagaaacagtgaagagtatcagcagatgcgggacaaagcgttatctcaactgcgtagtggcgaatcgctcacaggtaaagacggagcttttggtcctttgttaaaagagtttttagaggccgctttagatggcgagatgtcctctcaccttgacgcttcagagcgtcttaacggtaataagcgtaatggtcgtggaagcaaacgagtcaaaactatggccggcgaaatagagatcgtaacacctcaggatcgtcacagtagctttagcccggagattcttaaaaaacgtgagacgattcttgcagacaacatgtcttccaagattatcagtctgtatggcatggggttgagccttagggatatttcctcccatatcgaggagatgtatgatgttgacatctcccacaacacgctaagtgaaatcattgaacgcatagttcccaaggtcaaggagtggcaaagccgcccactggaatcaatgtacacaatagtttggcttgacgcgatgcattacaaggtgaaggatggtggtcgtacagaaagtcgtgcagtctataatgtcctggcagtcaaaaaagatggacataaagaattgattggcatgtatgtgtcagaaagtgagggtgccaacttctggctgagcgtgttgaccgacctgaaagcacgtggcatgaaagatgttctgatcgcttgcatagacaatctcacgggctttgcggaagcaatcagcactatttttcctgaggtaatcatccagaattgcatcatacaccagattagaaattctttgaaatacatatcttcaaaagatcaaaaagagtttatgtcagacttgaaaacagtctaccaagcccctaataaagatttagcagagctaaaccttgataaactagaagataaatggggtaaaaaataccctgttgtcttagaatcatggcgacggaactgggataatctatcggcttattttgcgtatgacgagcatatccgaagactgatttacacaactaatgccgtcgagggcttccaccgtcaagtacgaaaagtgaccaaaaccaaaggtgtctttcccaatgacatggcattgatgaaattaatctacttggctgtaatgaacatctccaaaaaatggacgcatccgctccagaattgggcgttaactgccggacagctacgaatcaaatttggagagagaatgcctctggagatataacccatttcctctttttgacttttcaaacgcaaagaaaaggtagttcccggatgtgtgcaagggtatataaacggctcattcttcgccgcccttgcacacattcgaaaactatcttaagaagcatttggaaatccaaaaagaaaaaattatatttgttgagattttaataaaatagaaaccagacagagtttaaattacactcccgaattaaataagcgcatatttaagtctgccaataggtttgttgttaatgtggtttatatattgaaggattgtaaatgcacttattttccctagtattctggtaaacaatcctactgtatctttagcataatttctcactatcatgaactgatcgcatagttgtgagaaatccgtttcgattcttttcctggctttagcaaatgggatgaatgtaggactccagtccttttggttcagtctatatggaacttcaagtcttatatttgcagtctcaaacaaatccagttgcacattcttactaatatatcctctatctccgagaatgctgcagtcatgatattcatatttgatatttttaagataattgatatcgtgaacacttgcttttgtcaggtcaaaggaatggataactccacttaaaccgcaaatagcgtgtaatttatatccatagtaataattcttctgagatgcacaatatccgaatgatggagctttactataatcgtttctgcccattttacaacgtttccctctagctacccggcatacctctataggttttgaatcaatacagaaatattcttcaccaccatctatcttctcagctattcttttacggatagtgtcgcataaggttgatgtagttttacgcctgtcattatactggcgtcttgaaatcagattgggcattttattcttatactcagaaagtctaataaaaagattactttcactatctatacccatggcttcggatgtaaggttcaaagctataacttctatatctgaaaacttgggaacaacacctggacgaggaatatttcccttctcatttatgaggttatcgccaaattacttgcaaatcttaagaattttactgaatattgtatataagttgtgcatatattgatgatatattaaaggtttgaccatctctaatatactataaatcaataatatgcacaactttttaaacatcaatatattatctttttaattccgccaacgggttaaggtaacattcttgcatttccttgtttttatgtgttcaatgaacttgtttgcataatcacccaattcattggatgggaaattgtatgtcttgagtttctttcgctgtgcaacatacggcaagccttgaatgaacctgtctataagacttaacgcacaagaatactcttttgactttcgttgatttggagaattatcagcctttgcaatcttctcttgaaaagcaagactgaaattcaaatcgtaataatcaatattcatatcctccatgtattgggatatgtattcgatgtaacgtaaatacctgtcggtcatgtaagtggacagtctgaaactctcaaaagctcttttgcagtaaacgaagaactcattgcgtggaatggatttgtaatcgttcattgtgtatgattttttaatttcggcgatattgccatataatcaaaatgaacaatatacaataatattatcaaaagtctaattgattttcagataaataagatgtgcacttgtgataatcatctagttttgataagtggcattatcacaatctttttataatgccacgttccacatcgggaacgaggtactggacttagaggtagaaaagagcatccacaggctggaagggaaaaacagatagtctttgctgcgtaaaagaaagaaatccactcaatccgtgtctggaaaatcagaattggcctcgtcgcatagcccggtgggatttacatacagttcatccatcaatacggagtgaggcgaatcgaataccagcttcaggtagcgggcaggcacattcgctgtttccagaagaataccgtcaatccaggcatcgtgcccggcattggggaagcagggggcattgcggacagacagcaaccgataggaagtaccgtctgaggaaacatagaaatacaccttgtccggctgtgtcaccattcccgggcggtagtcgagcaggcgcaagaagagctcgtccagcctgatttcctgcccgaagtccatcgtcagctcgtgtcgtcccttgccgaaagacatccatcgggaatcgtcgggattctcgtcggcagtacgtccatccagcagcggagaggagacattaccgtttacagtggtcgaaacggggatgccgttacccaatgtcccacgatgagaagcttccagcagcctccagtagcggccaccgttcagccagtccatgtagttgcggtaggcgatgcccgaccagtagggctgtcccaattgaaagggagaatcgggcttctcgataatgccgcagaacatgaaggagatgatgcactccacaccggccacagaagcggctacctgttgtgacaataaccgttgataggcggcggggatgagggcagaggtgcggtcgttcgtcgctttctcccaggtgaaggtttcgcagttggcccaaaaggcgatgttcagacggttgtggatgtcgcgcagtttcttccagttctctttcaggcggggcatggggaagggttcgcgcacgcagcccacctcgtcctggtaggcgatgatgtctaccttcaggcgtgagaggcggcgttcgtattccggattggtgaagtcggagtccaccagcccgtagggggagatgaggatcttcttgccgggggtgagggaacgtgccttgtcggtcagtgcgttgacggcggttacggcatgttcggacaagagggggcagaggcagtcttccacaggaagataccagccgtagagggcgggatggtggccgtacagcccggcaagctcctgcatcatctcctgctggcggcggcgaatggcggggtcacgcaggttgtcgtcctggtctttggcccagccggtactcatgaataccttcatgccgaagcgtgcggcggcatccatgatggcatctaccgggcttttacgcccttcgggatagacgtggggcatcagtagggaggggtagtaggcacgaccttcattcgccactgccatgaagacgaggtactccatacccatctcgtgcagttcctgcactttctgctcccacagttcggggccggtattgtccgataccgtggggttggtatatttgtttcgcacgtcctgataggcgaggtttatccacgtgccggtaatgggtttcaccggcttgtctccgcaaaaaccgttcagcgcatagagcaggcagagcagcatggcggcaatattctttgagaaatgaatgttcatctattataaaaatgaaagaattaaagaatgaaaggattaaaggggatacgcacaaacgcttctattgttttctttcaggcacggatgacacggaacttcacggagagaattaaacaacgtctgtgtaaatccgtgtcatccgtgcctgaagattatctattcaagagtgacgattggggcacaagtacatcaagcctcaatcactgaccacgatttcgtccatgaagaggaagggagccttgccttcggcagcgtggcccacgggcaaggcgggcgaaggctgcaggctcagcttcacgtagcggacattgacggggtcgaaatcgaagtcgtgcgtatcgacgcaatgcttatggatgtcggtatccacaggagcgccctgggtgcccacagcggtgaactccttgccgtcggtggagacggatgccgtgacggaggtgggtgccataatccaggcatccatataggtcatggtgttcacgctgatgtgcttcacctcggtgggctgttgcaggtcgacgagcagctccaccgcccggtcagaggcaaagcccatccatgcaccggtggcaaagttctcgttgccctttctgccgtccaccaagagcacgggaccatcgaaggtatagttggggaacggctccaccgtgaggaaagtcaccggacagagcgtagccttgttgaaggagaaggtctcttgccacgagctgttgaagccatcgggacgtatcactgcggcacgaaactctgtagaggcagttatggagacaggctccgtatagcgggtggaagccgtggtaggctcactgccatccagggtgtaatagatgggggcatcgtctatcgcgctcagggtaataagggattgatgcttctccacatcgggctgcacagcggcatgaaggttgtagagatgcttgccgaagttgaatccatcgcggcggtagaactccatcaggtgcactacacgcttctcgaacttcttatagtccttcttgtcgggagccgtccactgcacttcggccaaggcggccagacggggcaacagcatatattccacgtgttcggtagtggcgatgtattccgtccaaaggttggcctgcgcacccaagacgtgcttggcctgctcttcggtcagtcctgccgtgggttccagttcatacaccttgcttacgggcaggcatccacctatggcaaggggttcgtccttggtgtcggcagtctgatagaagtcgaaataacagtgggtgttgggagccatgatgacatcgtgtcccatctgcgcagccttgatgccaccggcagagccttgccaggacatcaccgtggcattgggagccacgtcaccgttcagtatctcgtcccaaccgatgatgctgcgtccgcgggcgttgaggaaacgctcggcacgctgcatgcagtagctctgcaagcggtcttcggcagtgaatccgcctcctgccctcaggccttcctcggcgatgcgcttctggcacttgggacaattcttccaacggacacgcggtgcctcatcgcctccgatgtggatgtacctggagggaaatatctctatcagctcgcccagaatatcctccacgaactgcatggcctgctcgttgccgatgcagagtacgtcggggaagacaccccagtcgggacacacctcatacgggccgcccgtgcagccgaactccggataggaggcaagcacggagagggtatgaccgggcaggtctatctcaggcaacacgttaatgtagcgttctgccgcataggccaccacctctttcatctgttcttgagtgtagtagccgccgtagtcggtgttgtcatactcgccgctgcccaagtagcccaccacggtacggtggcgcacagaacctatttcattcagcttgggatatttcttgctttcgatgcgccagccctggtcgtcggtcaggtgccagtggaaggtattcatgttgtgcagagccagcaggtcgatgtatttcttcacgaactccacggggaagaagtgccggcacacgtcgaggtgcatggcgcggtaggtgaagcgcggttcatcgttcactacggcagcgggcagcagtatgctcttgctctcggccacggcaggcaacgacttacgcaaggtctgtatgccgtagaaaattccttgctcggtgcgcccttctatcctgatacttttttccgtcacggagaggcggtagccttcctcattatttatggtagagtcgagtaccagcgtgatggcatgttcgggggcttcgccttccgcctgttccctgacagggagggcgaagttcatggattgtgccacatactcggagaggaactctgcattgcgtttcagcagtgcgttgcctgtggggtagaacacggaagtcctgctgttcaggcggaagggagtgccttccgagggagtcacttcgctcggcaggggcactaccgagtaagaagccgtttccagcggctttgtacagcttgccagggcgcatagggcgacgagggctgcggatttgagaaagctggtcatgagggatatgattaataattggtcattctactgctttccccgacagttcccaacctgtgattgtcgataccatcgggatgatttccatggccatcttgcgctggccgttgtagttgggatgccatacggcaccgtagtctgcttcggtattgaagaggtccttcttcatctgcaacaggtggatgttcttatcgttcatctcgacgagggcggtctcgtaatagtcgtacaccggggcggggatggtacagcaatagatgcagaggatgggcacatcaccgtagtgctggcgcaactgcttcagtatcttggtgtacgatgccacaaactcgctcttgaagggtttcggctctacggagaagtcgttcgtgccgaggttgatgaccaccaggtcgggggtgtaggccttgaagtcccactgctccttggaaccttcgtcaaaagtctggagcatcttctcgcgcatggtcacggcagagacacgcacggtgtcgccatagttgcgcacggcaccgcgtccggagtgggccacgagcgtgtagtcggcatcgaagtagcgggagacgatggtggagaacgacaggttgcagttctcggtctctaacttgaacggctcgttgcggtctttgccctcggtgccatagccgcaggtcagcgagttgccgatgaactcgatgtgacggctgcgctcgatgtttgcttgctgcaacgcacccgactggggcagcaggaagcggtgtatggtggtcttgccaaactcgccctcggtgcgcttctgtatgcgcagggcatgggcgttgcggcttactccactcacgaagtctatcaccgtatccttaccgcaagccttcaccacgttgtgcagcttgccgtccacaaacacattgtaatagctcgtcccggtctcggagagccgcacggccaatctgccgcctgtcagacgggtttcaaggtaagtgcccacccagtcgaaggtcaccgatccatcgttgtccacctgtgtacggcccgtgtaacgcacggcggcatcgtcgccccgtacttccttgtccgtaccttttgcattcactccctgcgcaccgcacaacagggcgcccaggacgaagatagaaagttttttcatattgtattttatcattagttgttccattctaagggatgaatgacgggaacggttgaacatacagccgtttgtcatcatcctttatatatcagattatcgttatacatcaatcgccggtcactctccttatgtcctccagaaccacttgatgcgtgtgaagaacatcgtcaccagcaaggccatcgacgtgagcagcaggccttgcaggaagcctaaccacggattggtggcaaagatacccaaccatttcataattcccaagagattgaacaagggatagatgagaaggtcgcaggccacgtaggcaatcatagggttctgaccggacatgacgaggaacgacatgctgcggtggcaacagaagtagtcgcacaccacatggaaagccatcagtgccatgcagcccagtccggaggtgacgaagaggtagccgaaggtcggcccgtccttcttgatacccccctggaacggctcgaagcaaagacccaccagcagcagtgccgcacccagcaggagcaggtcatgccacaggatgccgctgtccgacaggccacgggtcagccaccagcctgcaaggatgagcagcgcggagagtatcagggtgaggaagctccaacggttgtacagccccacgaggttggccaggatgatgcctaccgagatgcacagcatggcgtaggccaccttacgggggggctttccgcaccgtcctcactcgtgggacggctcatccacttcatcaccagctcgcccgccatgctgcccggcaacacgatgaagaggtagcgcaggtattcaaacctgtacatccacggcacgggggtatagccccacaacatctgtgcccacgagccgtccgcctgcgcacttagtaccacgccggccagggcagccaacaccgccaccctcgcccaccagctgtacatggtcagcagataggttagagaaccgaacagcgccatgttggccagcagcaggatgatgatgttgctggtgaagaggttgaactccgctccgttggcatagtccgtgcagagcagcatcgccgtagccacaccgtaggcacccagcttgatggaggtatgcgcccactcgggcatcttcaacggtatgcgcatgaacatggggaacagtacggcgaagcatgccaatgccaacagccatgcccttacgtcctgcggtgcactgagcatatagggatagaaatgctgtatgaagatggcgaagaacatcagctgcacgccgcgcttcaccgccccgtaggccagttgccacatactgcagcccttctcgtacttgcggcgcagcgagaaggggaatgccgcacccatggcgaagaggaagaaggggaatacaaggtccacccaggtcagtcctgccaggtctggctggtaggcatgggttgggggcggttcctgtgcatggtacatccatgccggcaatatgccgtagaccacggtggcggatagcaccatggtcagtatggcgtagcctcgcagcgcatcgagcgagtatgcacgacgggtgggctgtttgttattatcagttgtcttgttcatagccatattatatatgtatatatcttgtcactcgtagctcgtcccttacttcagatttccaccttcacgcatacctgcctccacctctttccaaaggtctttggtgatgatatgcacgatgtcgaacaccatcaggccgtcagcgtctttcagattctctgcaatggtggcggtcagcttctccggatggtcgtagaactggtccaccaatatgccgcccatgaagggtcggccgcagaggatacggcgcaactgctggcaggaaccttccacgcagtaccagatgccctgctgtgcctggctgtcggtctcgttccagattacgttgttgctcttcttatactcctcgatggtgatgtcggtgtagtagttgccggtggcatagaggtccagaagctcgttatagccgtagttcttatactccggtgtggcccagtcgaactcctgcgaggggtcgtattcacggctggcgaagtttacccctacttcatagtaagagggataccatgcaccggtgtatgtgccgaaggaaatattggggttgacactcttcaccgcatcgcgcatgatgcccataaactccgtgatggtcttggtgcgccattcaaaccacttcttcgaccatttgcccaattcgggtttgggacgcttgccctccttgttccacgtcaatatatcctcggggaagttctctaccttctcaccgatgtatgcctcgaaggtctcacgggagaggtcggagaagtcggcactgatgccgtcataacgcacgcgatccagcatcaggccatccaatgccgggtacttgcctaccagttctttcagcacattgagtatgtgggtgcgatactcctcgttcaggggatttatcatgccgccatacttgtctttctcctccgtgataggtatcagtccacgctcagggttgtagacgatggatgcccattcgggatgtccgctgtacactaatccgcggtcgaagtagttgtgcccggcgcagaacacgttgagtgaggcgtgaatctccagtcccagctcgtgtcccttctcgatgaagtgacccagatagtcgaagtcacccgccttggcaccgttccactcttccatcttgggggcgtaggcgctttcaaacagcacttcgcccgtgatggggcgcacatctaccacggcatgggtaaagcctaatgactttattttctccagatagaagtcgatggagtctttctgattaaaccttccgaagttcgcttcggcatcaaaccacatcaaggcgggcttggtaggttctacagcggcctgctgtccgcaagaggtgaatgctgcgccactcgtggaaaccaggactgccagcaacagattttttaagttcgctttcattgtcattacgtttattttttagtttatactttatgctttatgcttcttccttttatggaagttattcgaaagttttcacttcactccttccgttcagggagttaaaagccgatggctctcttaaatgaaatcagtcactctctccctttatatttaccgcccgcgcaaacgggttgcaaagttcgtccgccaatacggcaaactccttgcggagtatcggacgttgggtgtcgcagtcgctccaggcatacttatggactatcgcctccacttgttcccacacggttcccatttcttttcctgtgacgatatgcaccgcttcggcgatgctgaccgtccgttccggcaaagccttgtcatcaggagcattcattccgtattccgccaggcaatgcaggtcggaggcacgcagcaggaagtcggcatgaatccacgtctcgttgctccagtccacgttgcgcccctcccatctcaggatgcctgtcgagcctatgcgctgcaagggtttgaagtacggggaatctttcggcacgtcgagataaggcagcaagtaaccgcctgcatccagcacggcacgttgcacctcgcgcacctgcacctcgtccaccgtacagccctgcttcactgccaaggcagccaatgcccctgccgcctggcctatctgcagcaccaccggttgcaggcgtgtggagccgttcatgatgttggacactgaaatggatttctcggccacaatcagcccttgcctgtccgcaggtatcaacgcaccgagaggcacgccatacgagggcacagggtggaaatggagatcgggcaacgagtcggctccggtatagcgggtatggtgatggtctacgggatagtcgcccacggcaatgcaggtgcgatagagcggttcgggctgttcgtagggatgcatggcgtggttcagattgaagcgcaccttgccatgtatgcggcgcgattcccggtgatagggaatcagcggtaggcggtcttcggtgggaaaggtttcgtcatccagccccagggtagtcagccccagctcgttctgtaggaagtagaggtagcagagcgttctgtgcttcgccttggcgatttccgcttcgcgttcctcgcggctcaggtctatcatgttggtatagtagtcgttcccctcgatgggccagtttatcatgattttccctccgggcagccgtccgtagctcatcatcatctctttcgaccatacacggttcggttcgcgcggattggtacacagcgggttggcacagcagcaggcaaagagtgcggggtcatagtcttcgggacgggctatccgtacatcgtgcccgtagtccttcaggatggccacataggtcaagtcctgcacaatgccgttggccgtttcgggggcaatgtcttcgtcggtcgcctcgcgactctccatgccgatgtcgtagggcacaccgagtgcacgagccacgtcgccctgttcggtggcatctatcagtacccgagcttccacggtctccgtcttgcctgcgtgctccgtgcggactatccaacggcctttctcgcggcgggcatccacaaaggcagtgccgtgcttcacggtgagtagcggttcggcggcagccatccggtggaagaggtcgttgcccacagctggttcaaacagcacgttgctcacccagcccgtcttgaggctgtccgatccgccgtagtgcatgactaagctgtcgagaaactcgccccatatcccggcacgcaggcggtagttaccgtccacggcactgactcctgcggcggtcagcatgccgcccagccagtcggtctcttctataataaaggtacgcgcccccatccgtgccgattgcagcccggcagccacgccgctcgtgccgccccccaccaccaggacatccaccttctcggcggtgcggagggaacaaccggccagcacaactgcggctgccagcatcacaacggctctgtggaaacaccttctgctcatttcacttcttgggtatatacgttgccaaaacggtcggtcaccttgacttccaactttgcttttgggttcttgggcgtggcgcggaacatgtgacgggtgtggatggggtttatccagtcgtattccacaatgctcttgtcggcacatatcttggctgccagcgggtcgtagccggtgtagtgggtcattttgcccattaccttgccgtcttccatccattccactctccacaactcatcccagttccatacgttggcaaggatgtctgcgggatattcgtcgctgcttccggcaggataggcgcggaactggtagccgtccggctgtccggcactcttgtacagccatttcacccggttgccgtccacctcgtacacgccatatccggcaggcgtgccgtccatgctcagttccgacttccaccagatgccgcaggcagccgtggtgttgtgctccatcatcctgtcggtgaagcatacgttgtggttgaagtgggagtgtcccgtcaggaaatgcacctcccttccctccagcaggtcgaacagggcacgggcattgctcgtctcgtcctggtgcagggtgttccattccagttccttctccgtgctgatttggatatgggctatgacaaacaccaagtggtcggcaggcacatacttcagatcctgctccatccatgccaggatgctctcgtccacatagcctatgtactggtagtcgcggttcacatagaagttgttgttgatgacgatgtagtgtgccttgcccttgttgaacgagtagttcgaggggccgaaatactcctcgaacgtcttgaaggagtattgccaggaacgtccaccgtaggtcatatcgtggttgcctatggcgcggtagacgggcatgccgagcttcgccaccgtgtctatgtaggcggggaagagctggggggagtcgcccacaatgtcgccgcagtctatggagaaaaggtcggtcttgccacgatactgcttcaggtaggcgttcatgtcatccaagtatttgccgtagagggctatctccttctcgctggtcacttgcgggtcggcctgcacggtgaagagatgcttcttgtcgtctatccggttcttggccagctcgaagttgtagacttcgtttgccgggtctatctttcgataaaactgcccgatggtcttgttcttgcaggccacttgatagcctgccggggtggagaggtagataaagcgggcaccgcggttacgctccaaagtataggcaccgtccttgccggtggtcacacagtctatgccgtcggtcacgattacgccgggcacgcccttgccgttgcaggtcactttgccgccatacggattggcggcactcaatgaagcgagtatgccaagggtcatcagggtacagataaaaagtcttttcattattttaagtttttaagtttattagttcgttaatttttagctacaagttacaagccacaagatagcacagcccattaatcattaaccattagccattttttcagcttaactcctgcatatagtggatgaaatcagaaatcagaaatcttctccgcctcttctcctatcacattatatgcgcgtacttcgtagtgtccgtttcctttgccggtcaggtcgaaggtggcggtggcagtatccggtgtggcggttgcggtccaatgattgctttgcacgtcacctatcaggatgccatccttatatatatggtgtcccaggagggttggctcttgggggttgaatgtccatttcagtagggttttctctccgtccttttcgatggagaggctgttcacttgggccgggcgtgctgcggcaggcagttcactgctctttgcccattggcaataggcccggtgcaacgccggacgaatccgctccggcgaatagtaatggctgtaagcgaaggtaatcatgtcgctcacgtagggagccacgttgtccgcctgcatcttgatgcggttcagcggtgcggtagtccagaaccgttggtcgaacgattcgatgtttgcccagaagttgattttaggcgaggcggggatgacggcggccagtgctttgaaccattgtgccgtctcttccggtttcaggaatcccgaccctacgcagtcctgcggtgccagtatgtcgccgtccttgaggtgggcgttgcggagtatgccgccccacaccttggcgtgggcttcggcagtgcaccgttggctgttcataaagggggagagtatcaccgacaggtcgggtgtcagccgggtcaggcagtccagattgatgttgagggcgttcaccagcaggtcgcccagttcgggagagttcacaatgaaagaggcttcaatctcccatacccagtaccatcccttcagcgtgccgggatagcgtgagcggtagttctccgtgatttcttgggccacacggttgcccagcatcatctgttccgttatccattcgggagtccatttgctcgtgttccaccaccgttcgtcgaagttcagccccacgatgacctcgaaccccgccttttgtgcattgcgcaggcagccgtccagcaggtcgtttgtgccgggggcgataccctctatccgggtgggataaacggcctgtgcctttccctccttgtccgtgtgtacggtgtgcatgaagatcagtcggtgtatgcctgcttcggacagcatggcgtactcctgttgccagcgggcatcgtcccagtcggccacaagccagggttggataaaacttccgctgatggcggcagccgtcggtgctaccgccatcagcggaagaaccagagtccacaagattcttaacagatgattcattggaattatgaattttgaattatgaattgggtaaggattcccttacgatgcaattataatttaggcacggattacacggattccgcggaactcacgcaatccgcgcctaaatcactttgatttactttactgttttcagataattgtctatcccctgcttgcaggcatcccaatagttgtgcatgcggatgtggcagaggtcgaagaggaacatgccgccgtcgcaggcgttgatgcaggcattgatggacttgggcacctggttggcttgtcctccgttctcccagcccgagccgttgcctatgtccggtccgccggcaaaaggcacgtcgcccatcagcttggcaccgcccagtttgcagaagccctgcacagtccattccgtagaaccatagattttatcgacagccgcgtaggcaccaaggaagatgaagtccaggtggtcggcataaccatagtccttatagtcgctgtccgcccatcgggagtaagaaccatctgctgcgggattgtacttggggcttgcccaatttacaccgctagtgtagtaggtggagtaccatgctcccacgtatgttccgaagcgagtgtcagggctgacggcttttacctcatcgtgcgcctttatgatgaagtcgtgtatcgttttggcacggaacgcattccaacgtttataccattttccggggatatccgttccgggtttcatgatgtcggcagggaagttttccactgattcacctataaataattcaaactccgttcgactctccggcgagaagtcgctcattaggccatagtcgtcgtagcggcaacggtccagtattatgccgtcaggcttgtacttggccagatcggagagcaaggatagcagatactcctgcacctcattgttggcggggttgagaaatttcactccccagtctgtttcgtagttttgcaggtccatggtgttcacttgtctgcctgtggcattgattaccgtggcccacttctttttcgaggcatcgcgataaagcataccttcatagcctaatccgtagggacagagatagccacctacaaaggtgttgatacaggcattcactttcagacccagcttgtgcccttcgtccaagaaagtctgtagataatcccatgtggcagtccgctccgcccatacgtagcccgcattgctccagatgtcgattctcttcagcggttcggccacggatgacttgaagagcacgtcacccgtcgtggggcgcacgtccaccacaatgtcggtgaatccggtctctttcacttttcgcaggtcttccttgatgttgtctatgctgttggcatagcgctcgaaattgccggcagcatctatccagacataccgcggcttctctttcgcctccggcttgtctgtgcctccttcctcttcttcttcgccccagttccagtcaggcactttgttgtcatcgcccccacaggaggcaaagaggcataggcagaagaacgaggctatccataatttttttttcattctggtatcaatatttttaggagccatacataccgctccaagtaagtatagtttgtaggatttattggttctttttcttatccgggatgcttcatactataagcgaattgcccgttacacctataattataggatggtagtgaatttatttgcactaattccagtctatatccgcataaggtattcttctaatggaaggaataataccttgccaagctacggaaaagagaagcatccgtaagagaaacgacaggagaggtaaaacacctattgaaaacttactctttactttatgcctcctccatgcttcctttggacgcttgttacggaaaacagagggtatttccccctctacctaataaggtagagggggaagacgccatctgaaaacttaaaccaggtcaatcggcaatacagtcagtggcataaccaccgattacaccactgttgtggtcgtaataataaacatacatcttgaaaccattggctgagggagctatcaccacgtcacctgaagcaatgcctgcatcagctgtctgataccagtcgatagcattatttttcatggccaatgctggagaatcccatacgttgtcgcccgaaatggcagccgggtcgtcggcattgaatacgtacagttccggtcccatgccccaatgcgggaagtggctgacaacgaacaatgctgcgtaagtagcgttgttgaaccgtttcgtgtcgatacagttcggattcttgccccagccgctggagtcggagccaagttcaacaccaatgctgccatcgctcttaatccaatggaaattgctcgggtcgtacatagattcgaatacacctgctgtcgggtcaatgcctgcggctgcaataccggctgtgttgacgggtgcaccgccccaagcaacacctgtcgatgcgatattcatagcctgtacaccggccacagcaccgccacgaaccaagattacagtaaattcactgctacttgatactccggcaataccttcgttcggtacaatgatgatggcatccccgtcgatgttaccgattacctttatcttggcacccatcgggaacgttgaagaattggtgaacgagtggaacagcgtgggcgcatccttcacggaagccgtgcggtagatgttcaccgtttcgccaccgttggcgtggtttacaatcagtaagttctctgcctcgtcgttcgtcacgctaccggcctgggcactgcccaagttgatttcacccatcttggaaccgttcaagccgttcaggtaaaccggcgtagagccgtcgccgtagcaaactaccaggcggccgcccaaagcagccagtgtaggacctactcccacggcatagttaggcgcaccgaagttggaaaccgggtcgaagttgaagagcagttccgtatggttggcattgaatcccttggctatcttttcgggaatctccttcatcacggtataaacggctttgtctaccccgttgtctgccgttacggtgaactctaccggttcgttgtagttgatggcggctgccgacgggtcgggcgagatggtggcatggggagatacctgtgcctcggccaggcaggcggacaaatcgtccggcgtaatcaaggcaaccttcttggcacctttgttcaccacaccggccacgaccggttcgttgatgctgaaagccagcaactcacacttgttcgacttcacccgttcgcccgtgatacagattttgcgctgcacgccctgggcattggtgtaggtaaagtagttctcctgagtcaggtcaaggatacccagtcccggctcaatgttacagttgggctgcaactctgcacgcacacgcaccttgctcatgtattgtgcagtctcgtcgtccgatgtctcgggatagtaccagggcacctggatgacatatcggtcactcgtttcgtcttctgagatgctgagcttggccatctcctggtctacaaacggaccggaagtgaagatggcagtcaggctggaaagaccttgacggtctgcggtaggcagcacatactcaggttcatggcaagcggaaagcaatgccaaggctcctactaataaagtatatatcttcttcataattgcatacttgtctatagtttatttccattcggggtactgagagactgcggcattgctgctcaactcgccagacggcaacggaaagcggtacatccgttcggggaagttacggtctttgtcatccacagatacatagttgtacacaaagtcgccgttcggctgttgctcgatacgcaagccgtgcacctgatagccgttcaagcctgtagggtattgctcgtgtgccactttccagcggcggagatcccaataccactgtccctcgtaagccagttccaccttgcgttcctgacggatggctttccacaagttttcgcctgccttgtcctgataaggcagtcctacacggtcgcggatagccttcacggcagcattggcaccggcagcatcgttcagacggtagcaagcttctgccttgttcagcaacacctcgcctaagcggatgatagtgacaggttgtacacttccgttttcgttgatgacgtcgtggctctcgtctacgcgcttgcgcagatagtagcccgtcgtggtgcggccttggggctccggttccttgttccatacacagaaaccgtcactgcctcctacaaacgattcgatggtacggtctttccaggatgctccgttgtagaggatggaagcttggaaacggggttccaactcttcgtagggtggagtgtccgttacgccttcggcatgccatgcgctccagtccgggaaaccaccttcttcggcatattcgtaagattctaccatctcctgtgtaggcgtgccgtaaccgccgccggtctgtccgttcagtttatagtctccgcccggagtatagtagaagtcgaagccgtaagtgatatccagcttgcggtcgaagcagtattgcagaatggcttctttgtttccttcggttattggcttcatatagctgtccgcatagtccgcttccagagcgtagtccagcttttccacctcttcggctgctttcttggcggcttcccaacgctcggcataaagcatggcacgcgacatgaaagcccatgcctgtcccttgttggcacggcccttggcatccttagcctcgggcaggttggctgccgcgtattccaaatcctgctggatgaagtcccagccctctttttcggtattgagtgccttgttttcggtgatggcagtcaggtcttcatcgtaaatgatgacctctttgtagcgcttcatcaggtcgaaatagaggtaagcacgtacaaagcgcatctcggcttccagccgcacggcatccgattctgccaaggtcccgtacttcttcagggaagaaatttcctgattggttctgcgtacagcactgtaccaactaccccaataacccaaataggcatctacgtaggtcgctgtcaggttgcttccgccgtaggctatctcactgggaatgaagcaaagcgaattgtagttataggaaccgtatttcaattggtcggtcaaggcttccgtctctcccgccacgcactgacttgctaccacatcataaatgtaactatatagatagtttacagaatattcagctgtgctgacattggtccatacccccttgtcggaaatcttgtcggtaggggtcatatccagaaagtcgttacaggaggtcagccccagcgtagctcccataagacacaatcctgctataatctttttcatatttatcagttttttagaaagttaatgtaagaccacccatcacagtgcgctgttgcggatagtaaccgttgttcacgcccggcgattcggggtcgatgccttcgggcagcccgtcgatggtaaagaggttgctgccttccacgaagatgcgtaggttctcgatgttcagcttgctcatccaggccttggggaaggtgtaaccgatttgtgccgacttcagtcgcacatatttaccgtctctccaccagaaggaagaactcagaccgttgtcgccgccgtggccgggagcacccagtgtgatgcgcgggaaagagccgttcgggttgtcgatgctataagcattctccaccaagaagagtggggaattggctgcttctttgaaagtttgtgtccagatggtgttgtcatcgtagccgttatagtaagtaccggtcatggaaacgtcgaagagggcaccgccggtgaactgggcgttgaagtcgaatcccttccaagaggcaccaagattcaagccgaaagtcagttgtgggcggttggaacgcccaaaagcaccacggtcctgactgtcaatcttaccatcaccattcatatccacatacttgatgtcgcccacacagggacggcttccataccaggcagagttgtctatctcttcttccgtgcggaacagcccgtcggctttccaaccgtagatggtgccataggcggtgcccactaccttctgccattccacggtgttgggctcgtccagatacttcagccagcgtgtcttggagtaagtcaagttaccgctgacggtgtattgcagcggacttcctgccacatggaatttattgcggtgagtcagcaaaatgtcgataccttttgaatcaagtgcattgttgttgccatacgtggtataataaccacccatggaagagggtttgttgccacccattcctgtcaacacatcgtatgtgtagttatagaaagcatccagttcaatgcctaacaatccattccaaagggtggcatcaaaaccggcattccaagagagagttttctcccaagtcagtgcggggttagggattccactggtataaatgcccggtgctttcactgcagaacccgaaggataaatcacgccggtggaccatggactgtaagtgccgaggaatgcatattcggaaacggcatcgttacccagcaagccgacagaggcacgtactttcaggtcgttgacaaattcgaggctctccatgaagttctcttttgagattctccatcccaatgaagccgaggggaagaaaccccaacgtttgcccatgccgtagaatttgtaggatccatcgtaacgaccggtgaattctgccatgtatttgctgtcataatcatacttcagacggaatacatagccggctgtgcgtgaagctgcgctccatccgccaatcggggagtcggtaggcacgccaccgccatcagaaccgagttccggcaactggatgaaaggaagattcttggcgtaggctgacaaaccgtggcttttattgtcacgtgcctccaccagtgccagcacttccacattgtgcaggccgaagctgttggcataattgatgcttgcctggcctaccatctgttcgtaattagtctgtccttcgcccaattccgtaccgttggctgtaccgcgcggatcttcgtactggctccaagtaccattgttataacccatgacggagtatagcgtatttaggttcttgttgtgtgaagtggaatagttgtaagaaccattggccttcaatgccaatcctttcacccaaggcacattgtaggtcaattccaggttgacgttgccctcgaaactgcgtgttttcttgtagccggattcataaatggctgccagcgggctgttgggcaaagatgtgtttttctgtatagctgccgtgtacatatcgttatagcgttcgggcagataagggtgcatctggatggtctggcgtgcaatggaaaggaaacccacttcttcgtagccgtcatcaccaccaccggagttgaatgcaggtgtactgcggcggcctactacgcccgatacaccaagcttgaagttgaaatgcttggcaaattcgctttcgatgttggcacgcaggttgtagcggcggtatgtgaagttgtcgatgttaccgttctgtcctaagtagccgagcgaagtgaagtaacgcatcttttcgttgccgccctgcacggtcacactgtgcttctggttggtacccgtgccgaataccttatctatatagtccacgttgtcccatccgtccgtggggtcgccgttggtcatggcggcaatgttctcctgcgtatagtagggtgtgtattcgctgcgatccttgatggccccgcttgccagctggtccatcatctgcgccatgttgtagtagtgtgcgtattgcgggccattcatgaatttcgggaaattggcattcatggagacaccgtaggaggcatcgtaagtcaccttggtcttgccggcctcaccgcgcttggtagtgacgatgatgacaccaccggcacctgccaaaccgtaaacggcagccgaggcaccgtccttcagtacagatacgctctcgatgtcgttcggatccaggtcgttgatattgctcacggggaaaccgtccacgatatacgatacgctgtatacagaaccacgaatcttcagcgaagcctggtccaagcccggttcaccggattcctgcaaggaagagatacccggcaagcggccaccgagcaactgcgatacgttggtggcgggggctttcagcagttcgtcacccttcacggcagatacggcactggtcagtgatgactttttggaagtaccgtaacctaccaccaccacttcgtccagcaactccgtgtcgttcgtcatggtaacatctatcaccttgcggccattgacagtcacttcctgtgacttcatacctacgaaagagaataccaacgtggcgttctttgctacattcagcgagtattttccgtccacatcggtcaccgtaccgttagtggtacccttgatggcaacactgacaccgggcaacgtgcccatggcatcagataccttacccgtaacggttatgttctgggcataaccactcacggagcatagcaacagcgcgaagaacgaaagcagcacggctttcatccatcgggtgtttttcttagcatgagtttcttttctcattttgttttggttttgagttaataaaattcttatgaaatggaaagtggaaaatggaaaataattttcaattttcaactttccattttccgttatttactgagttcttccagcacctgccagcattggtagaggcctctggggaggtggaaacagcctttccacttaccgcccttcagcgggagaagcacttcgccgcggcggttgaggtagccgaaccattcgggatgctcggtgtccttgaagtggctccaggtgtagtcgtggatgcgctcgaaccactccaggcacttcgggtcgccggtcaggcggtagccctttatcgtggagatgagggtctcgatgtgtacccaccacagcttctggtcccactccagctcctggggcggacagccgttgcgatccatgaagtagaagatgcctccatactctttgtcccagccgtattccagcatcttcagtgccgtgtccttggctttcaccaccagttcggggcggttgaggcgcttgcccaggtccatgatgaaccacatggcctcgatggcgtggccgggattcatgtggcggccttcgaagcagtccaccaacgtgttgtccgcgttcagggtctcgacgatgagtccgcccagctcgggacggaggaacacgtccatcacctcgtggatgcaggtatccatggtcttcaccatgaagtcctcgtccagcaggtgctctatctccagtgccaggttgcagagaatcatgggcagggcgaagcccttcaggttgcgcgtgccgggatgcagcttgttccacttgcctttggggttgtctaccttggagaggacgatgtcgaacgtcttcttggcaatctcggcatactcccggttgccggtggcgaggctgagctggccgaacgccatggtggcaaaggtgtaggagaagatgttgtagggttccaccagggggttgccccggcggtcgagggagaagtaccagttatagttgccgtcgtggccgtacttcttcaggaactcaccgccccggatggcacagtcgagccactcccggcgtttctccaccttgttgtagagcatggagaacagccacacctcgcggccttgcagccagatgaacttgtccgtgtcgaacacgtgtccgtcgcggtccaggcaggtgtagtagcctccgcattcgcggtcttgagaatgttgcagccagaaaggaagcacattgtcaaacaactcgcttttgtactgttctgctaattttttaaaatccatagtttatgtatttagttgagtattccttatatatagtgtcaggtcgattttatcttttcttcatccagtagcgttctatctcctccagcgacttgccggtggtttcgggaatcagcttccagactatgagcatatagggcacgcacatgagggcgaacagcaggaatgttccggtgggggtaaggttctggagcatccagggggtgagctggcccacaaggtaggtgcctatccacagggcaaagccggcgatggacatggccatgccgcggatgcgcgtggggtacatctcggacagcagcacgaagatgaccgcgctgatggagatggcacaacagaagacatagaaaaggaagaagaacagcaggaaagagttgggtaggcccatgctttcgctgaagtggaagtagaagccgatgagcagcagggagagcaccatgccggacacaccgtagtagaccagcttcttgcggcctaccttgtcgatgatgaacacggcgatgacggtagtcaccacgttgacaatgcccactagcacctggctgaacagggcatcaccgcccgacaggccggcctcctcgaagatggtgggaccgtagtagagcacggcattcacgcccatgaactggcccaggatggctatggcagcccctatcagcacggccttgaagatgcccggctgaagcaggaacttccagtcggacttggtctcggactgcaccacggacttggtgtcttgcagctgcgtgtccacctccacctcggagaggtagattttacggaagatgcccactgcccgttcgtcgcgccccttcaggatgagccagcggggactctcggggatgaagaagatgatgcagaagaagaggatggcagggaggctgcagaagccgagcatgccgcgccacacttcggagacgaacaccaggttcatccatccggtattgagcaccgcgccgctctgcgagaagtgaagcaactggaaattggtgaggtaggctcccagaaagccgatggtgacggctagctggtagagcgaaaccaggcgtccgcggtattgcgcgatggagacctcggaaatgtagagcggcgagacgatggagaccacgccgatgccgatgccgcccaggatgcgtgccaccaccagctgctcgaacgagccgacaaacgcgcaggctataccggacacggagaagaagacggctgccacgagcatcgtcaccttacgtccccagcggtcgctcagcttgcctgccatcagcacgccgatgatggagcctattagggcgcaccccacgaaccagcccacctgtatctcgtccagcgagaagcgggccgtcacctgcgagatggtgccggagatgaccgccgcgtcgtagccgaagaggaatccacccaaagcggccaccacggagaggaagatcagataagagaaattgactttagatttcatggatgatttgagtttttgagttcttgatttgacgggttgacaagtactttgaaatttgaaatcagaaatcttaaattccaaaatactccttgtagcggtcgtacaggtggcctgcctgcaggtaggcggactgcggactcatgaagtgggagaactcgaaggtgatggccttgtcgtagcccgcacgcccggctgcctccagcttcatgcgcagcttgtcccacttgatggggaagaacttgatgggcatgtcgcggtcgaagctctcggcgttggtccagcactgcatgccatatttgtccgccagcttcttgttcactgtgaagaaggcatccagctcgtcgtagtcgatgtgcccgtcctggaaggcgcaggcatccaccacgtcgtgtatgccgtcgaatatctcgttccactcgcgctcgtgctcgtccaccgagacggcatcggccttggtcagcttgctgccgcttgccatgacggccttcttgccgtcaatccacggcgagatgaacgtgggcagtccgtcggaaacgtccttgcactgcttgcccatggcatggaaggcatcgatggcacccttggtggcacggcttatctcgccactgatataccacccgccgaagctcttgtgcttgctgccatactgctgccacacctcgtctatcacgtacttgttgtcctcaatctcccaggagaggtcgcccgtgtcccagtagcgtcccgagtcgtagaggccgaagtagaacttcatgccgtgcttgtccgccaggcggaggaacatgtccagtaggtcggtggaaggacggtagcaacccttgcccagcagatacttggagggataggtgatgaacttgcggtagccggaccggatcatgatgaccgtatcgatgccgatggcacgcatgtggcggaagtcccggtcccactccttctcgccccagttctggtgggggatgtcgtgggaaatctcgtccaggaaggtgccgctgatgcggagtgcattgcccgctgccggtgcgggggcaatttcttcctgcccgggaacgaagaacgaaccctcctcccggcctccggctatcagcgaaggcgcagccaccatggaagcaccgaacaacgctgtttttttcagaaaatctctgcgagtactcatatttaataaatttaaaaataagcttatcaggtattgtttctctttacggagcggagaatagttgtgtttttcactcgaagtatagattttaaattaacttactatgataaatgtttaattgtcaccttgcaaatataaatatatttattatatttgcatcatcttataagatttttcattaataattgtttaataattaacaattattaatcatgtatttctaaatatattatggatatacggttgtatataccaaaatatcgactgaatagagttcgaaaaaatatggaatttagtatgtaagggataatatggaaaaacaataagcatatggcacataatttactaaatgaaatagaaatcgggagcaagaacgggctcctcaagaagcggatcataacccactacatgcacaacggtagctccacaattcccgaccttgccagggagctcaacttgagcgtacccaccgtcaccaagttcatcaacgagatgtgtgacgacggctacatcaacgactacggcaagctggagaccgtcagcggccgccatccgagcctctacggcctgaacccggaatcgggctacttcatcggagtggacatcaagaagttcaccctgaacatcgggctgatgaacttcaagggagacatggtggatctgaagatgaatatcccctataagttcaagaatacggcggaggggctggaagagctgtgtgtcctcgtccgggagttcatccgcgaaacgggcatcgaaaccgggaagatactcaatgtcaacctcaacatctccgggcgggtgaaccccgagtcgggctacagcttcagtaccttcaacttctccgagcggccgctggcggaagtcttgcgcgagaagataggatgcaacgtatgcatagacaacgacacacgcgccatgacctacggcgagctggtgcagggctgcgtgaagggggagaaggacatcctctttgtcaacatcagctgggggctgggcatcggcatcatcatcgacgggaagatatacaccggcaagtcgggcttctcgggcgagttcggccacgtcaacgccttcgacaacgagatactgtgccactgcggcaagaaggggtgtctggagacggaggcttccggttcggccctgcaccgcaccctgctggaacggatagcgcggggcgaaagttccatcctctccgaacgggcggcggaggccgaaaacccgatcacgatggacgaaattatcgaggcggtggagaaggaggacctgctctgcatcgagattgtggaagagatagggcagaagctgggccgtcagatagctgggctcatcagcatcttcaacccggaactggtcatcatcgggggaacgctctcactgacgggcgactacatcatccagcccatccgcaccgccgtgaggaaatactcgctgaaccttgtgaaccgcgatgccgtcatcatccagtccggcttgaaggccaaggcgggcgtggtgggcgcctgcatgctggcacggagcagggtgttcgaatcatgaagctccacccattctaacgtgaattcgatataaaatgcttgactcatattgctgatagtaatgaggctgattgattgagatagtccgtatatcacatttaactcataactgctcagatgtgagtcaatctcttatatcgaactcacgtaattctatttcgggcatggagaaagaaatgcctcaagaccggccggggaggaatctttcagcagtacgcgcttatccttgtccagcaggtagatgaccggcatggcgggcagggagtatagctcgcgctccacgatgcggctgttgtcgatgcccaccgtccattcctgcggcagggcggctttcgtctcgtcccacaggcggcggtcgccttcggtataggcggcaagcacggccagttctccggcggctatcagccgggtgagagccgggctttcctgcaaggcatccagtatctccgcgcaatgggaacaggcagggtcgtagaagagcagcaggagccggggggctggcgtgccgtgcagggtctgcctctttccccggtggtcggtgtaggcaaagtcggcggcaatggtgccgggacggttcttccgggtggtctccagccggtaggcagggcgtatgcgttccgcttcaggcaagccgggcaggctgagcagggcttcgagaaagaggatgtagtgctcctcgttgcgcatgggggaattggggtcgtccaaataatgctccgccaggctattgaccaagcggaaggcgacggaatccactgccgcccgttgcagcagcctgcctacgggggaaggcagcgactggggcagcgcatgggggaagagggagaggaagttcacgaagcattgctccatgaacaggcggtcgcggctgcggagggtatcacggaaatccatcccgtcccagaagtgttccagcacgtaggccgcccgttcttcgggggcggtgagcaaagccggaacttccggcaggggcaactcacggggagagccttgcagggtatcggcagaggagttgtcccctccatgagtggcccgttgccgtccgtggaaactgttgcaaccgctgcaaacgacacaaacgatgcaaacaatgcaaacgatggcaattgccgccaccggaatcccaagtaatagttctttccgtttcatttatggtcgcgcacgcatcttacggagccggctactgacttgacataatacatttgaaagtcagtttcgaatattttaaaaagactgacatccctatgaatatgcaagatattcacccgattatttaaatcggtggtggcgttatgatagttcccacaataacttgacctcaaaaacattccactaggcacacgtaacccctgagtaggaaagaatgattgcatacccattggcggaattaaattagtgcgtatttaattctcccaataggttttccgttaataaagttgatatattgcaatacggtcatcgcactaatcttgccaataattctggcaaatagaccgtttgttattttagcatagtttctgatggtcataaactgattcgtcagttgtgagaagagcgtttctattctcttgcgggcctttgcataaggaatgaaagtgggcttccagtctttttggttgatacgatagggacattcaagccttatatgcgctgtttcaaacaaatcaagttgtatgtccgctccgatatatcctttgtccccatacatgttgcagtcgtgataaatgagcttgacatccttcatgaacttacggtcatccatacttgcctttgaaaggtcataagaatgtatgacaccgcttaatccacagacagcatggagtttgtagccaaaataataagtattctgtgccgcacagaatccgaaatccggtgcttgcgagaactctcctgtacgtcccattttacaccgtttccctcttgcaacacggcatacctctataggtttggaatccacaaaaaagaggttttctccgccgtctataatctccgccattcgcttacggatttgcttacacaatcccgcggtgtgtttccgccggtcattgaattgcctgcgtgatatgagattgggtatcttgtcttggtattcattgagctttgattcgaagagccagttctcgctgtctatactttcagattcagctgcaagagataatgcaacaacttccaaatccgaaaatttagaaattggaccacgacgaggaatgtttcctttttcattcacaagtttatcagaaagctgcttgcatatctcaagaattttggcgaattttgtatataagttgtgcatacggggatttgtatttaatagtttggccactactaaattaccaaaaatcaacgatatgcgcaactttttagacataagtattctttgaatttaattccgccaacgggtatagaagtataacatgttttacaaatttatgaaaatgtgtgtagccctacaaggctgttttagacgctaatgtactatttgtgacattttgtgattatgtggtcgtaatatatgattaagtgggtgaacattcttttcttgtttagaacggtaaccgttttattctaaactttattcatttgaatatttatggctgaatgtcattgataatgaatggaaattttttaaattggttatttgttcttaactttgtcaagcaaaaagcaattaaaaagagaaaagatgaatgtaagaggaacatttatgtgcttgctatgtgtcggagcactgtttgtggcttgtggtagcaagagtagaaagactgcggaagttgttggacaagccgatacggtacatgtcgttggtgatgataaggataagcatggctgcattgcatctgccggatatacctggagtgagactcagaaagactgtatccgtctgtgggaaaaaggagtccgtatgaacgctgtggatgatgcggagaagatgttgtttctggtgttcagtcccgattctacccaagtggaactgttcttttcggaagagggaatgccgaatgagattctggagcgccgtggccttcctgcggggggatatgtttggaatgtggaagatgatgatacaaagaatgtgcgtttggaagatggaagatggacggtcagccagcgtggtcggcttatttaccggcaggcagaaggggctgcggggaactaatatgtagagagatggaagatttgaagatattgacagagtctgtctgctgcatagcccgcgaagccggatatttcttgaaagaagagcggaaaaacttcagccgggaagcggtacggaagaaacaacctcatgattatgtctcttatgtagacaaggaatcggagaagcgggtggtggctgcgcttcgggaacttcttcccgaggctggatttatagccgaggaaggttctgctgtctatcacgatgaaccctactgttgggtagtggacccgttggatgggacaacgaattatatttatgataatgctccctattgtgtcagcatcgctttgcgcgacaaggattctctgttgctgggagttgtttatgacccttgccgggatgaatgtttttatgcctggcagggaggtggcgcttatgtgaatggagaacggatggaggtctcgtctgtccagcaggtggaggacgcctttgtagtgacggaactcccttataattccgaccggtatgcacgtaccggtgagcatttgattcatgaactttacgggcgtgtggcaggtatccgcatgaccggttctgctgcgcttgccatctgctatgtggctgccggacgttttgatgcctggcttgaggcgtttatcggcaaatgggacttttctgcggctgcgctgatggtgctggaggctggtggaagaatcactgacttttgcggtagtgacgcctttttggacggacatcatatcattgccactaacggaccgctgcatccgttgttcttgaagctggcaggtgaggtctcgccattatagcaaacaaggcgatggagtgtattgctctgttgccgtttttttaatactatacgatgaaaaacatagttaaaacctggttcttttcttttgtccatctcttcttcccgcgtcagtgtgccgtgtgtggtgctatcttgcaagagggtgaagagggcatctgcatgaagtgcaatatggatatgccccggacaaactatcatcttcgtaaggacaatccggtggaacgtatgttttgggggaagatacctctggaacatgctacatcttgtttcttttaccataaagggagtgatttccgccgcattctccatcagttgaaatatggagggaggaaagaccttggcgaagtgatggggcggtttatggcggcggagttgtcggctaccggtttcttcagtgatgtggatgtcattgtccccgttcctctgcatccgcgtaagcggaaaatgcgtgggtacaatcagagcgaatgtatagcccgcggcgtttccgctgtcaccggtattcccatggatactgcttccgttgcccgtatgaggcatacggaaacgcagacccgtaaatcctcttatgaacggtgggagaatgtggacggtatcttctgtctgcgtcgtgctgacgcttttgcaaggaagcatgtactgattatagatgacgtattgactaccggtgccaccactacggcttgtgccgatgcgctcaaggaagtggagggtgtgcgcatcagtgtattgacactggcggtagcgacctcataagtcagaaacgataacggccgcctgctacgattgttccggtatatcctactccgaattctgtgaagaaggcaaaccggcttccgtattcgatgcctagaaaactgaattgataagcgaatcttgtcttgtgaaagacttctcctccaaaactgttccgaaggaaataggcaccgagccctgctgaggtatacagagagaatttggggcgggtaaaccagtgccaccggaaggtgggaagaacatacagataccttcggttgtctttggtgttttcatccaaagcttcgtaaaggctgctggctgtccctttgttgccggttattcctccggttactcccaggctgattttgcggttgaatctataaatgtagctgatattcagggcaccgtagtagtttgtcttttcgcgtgtataaactccgaaactcagtaccggagcgaagcactcctcggccatgctgttggcatcggtaatgggcaggaaaccatagctgacggaaaattcatggtgccggaacttttcttggggcagaacgggtatgtcttgtgctttgcaaaatgtacatacagtcaatccgatgattaaaaaaagttgggctgttctcatcatagttgtatttttgaattaaatttcatggttctgcaaataaagacagaaggtcgggataaattccctataaatattccacaaatatatgttaatttcatgaaagatgaaagatttccgtttgtttgttaagtgcggctgatggagaaaacaaaaaaggttcgcctaattgacgaacctttttgctcttcctcttggacttgaaccaaggaccctctgattaacagtcagatgctctaaccgactgagctaaggaagaatatgcattcaatttttttcgctcttcctcttggacttgaaccaaggaccctctgattaacagtcagatgctctaaccgactgagctaaggaagaatgttgttttttctcaaatgcgctgcaaaagtaataggatattttgaaatatgcaatatctttgcaaaaaaaatatcgaagatggataaaataattgggttgggcaatgctttggttgatgcactggcaatcattgaggatgataatattttgacggagatgcagctcccgaaaggaagtatgactctgattgatgaagataagttcttgaaaattagtgagtatttcagccggatggagacgcatctggctaacggaggttctgccggaaacgcaattcgggcaatggcatgccttggtgcgggtacgggattcatcggaaaagtaagcaatgacttttatggtaactttttccgggatagtctgctggagcatgggacagaggcggatttattgctttccactacccttccgtccggtgtagcctctactttcatttctcctgatggagagcgtactttcggcacttatttgggggcggcttctacattgaaggcggaagatctttcgctggatatgttcaaaggatatgcttatttgtttatagaggggtatctggtgcaagaccatgatatgattctccgtgccattgagctggctaaagaggccggtttacaagtatgtttggacatggcgagctacaatatagtagaaggagaccttgaatttttctctctgttggttaacaaatatgtggatattgtttttgccaatgaagaagaggtaaaggcctttacaggtaaggaaccggaggaagcattggacatcattgccaaaatgtgtagcatagccattgtaaaggtgggtgcccgtggttctctgattcgtaaaggtacagagatggtgcaggtacaagcggctccggtagagaaagtggtggacactacaggagcgggtgactattttgcggcgggtttcttgtatggactgacgtgtggttactcgctggagaaatgtggcaagataggctcccttctctccaaagatgtgatacaagtggtgggtacggagcttcaggtagcacaatgggaaaaaattaaggaagaaattttattaattaattagcatattatcacatagacatattatgagaagaattttaaagatacgctggatggttgccttgctgattgtagcgggagccgtttgtttttgggggtttaagagtggtgatagccgtagtttccaaatagcaaagaatctggatatattcaattccattgtgaaagagttggatatgttttacgtggatacgattgatccgaacaagactatccgtgaaggtattgatgccatgctctactcgctggacccctacacggagtattatccggaagatgaccaaagcgaactggagcagatgctgaagaattcctatggtggtataggttctgtgattacttggaacccgaaactgaaacgttccatgatatctgagccatatgagaatatgcccgctgccgatgtaggcctgaaagccggagatattttgatggagattgacggaaaagaccttgccggaaagaataaccaggaagtcagcgagatgctccgcggacaagtgggtaccagcttcaagctgaaagtgcagcgtcccggtacagagaaaccgttggatttcgacattgtgcgccgttccatccaattgccgttcataccttattatacggtgctggataataatataggttatatcaatctcagcaccttctcggggaatccttccaaggagttcaagcaggcttttctggacttgaagaagcgggggatgacttcgttggtgattgacctgcggaataatggaggcggcttgctggatgagtccatagagatagccaatttctttctgcctcgcggaaaaacacttgtgacgacaaagggtaagattaagcaagccagcaatacctacaagacgttgcgtgaaccgttggatttggaaattcctttggctgttctggtcaatggcggaacggcttcttcgtcagaaatccttgcaggctctttgcaggaccttgaccgtgcggtcattatcggtaaccgtactttcggtaagggattggtgcagaccacccgtccgttgccatacggtggtaccatgaagctgacgacttccaaatattatattcccagcggccgttgtgtgcaggctatcgactacaagcaccggaatgaggacggcagtgtgggacgtattccggacagccttactaccgtgttccatacggctgccggacgtgaagtgcgtgatggtggaggcgtgactccggacattgcggtgaagcaggagaagctgcccaacattctgttctatcttgtcaatgacaatcttattttcaattatgctacggactattgcttgaaacatcctaccattccttcagcagagaagtttgaaattacagatgccgattacgcggacttcaaggcgatggtgaaaaaggcggacttcaaatacgaccagcagacagagaagatgctgaagaacctgaaggagatggccgaatttgagggctatctgactgatgcttcgaaagagtttgaagcgctggagaaaaaattgtcgcataatctggaccgtgaccttgaccatttctccaaggacatcaagagcatgattgcggtagaaatcatcaagcgttattatttccagcgtggaagcattatccagcagttgaaagatgatgatgatttgaaagaggctgtaaagatactcactgctccggaaaaatataaggaaatgttgagtgctccggcagtgacgtcaatgtctctgcaacaaagaaaggagacagccccggtttttctgagtaccgctacgagagcaaatgaacatgtttatgatgaaatagtataaggacactcttaagaggattcttttatttgctccttaatttataccggatagtctctgtataagccttttatgagcgactatccggttaagttgtttgtaaggtattaacttgttttatatttttgcaggtgaaaatgaaaacattgacaaggttatgaaacaattgaattctctgaaagtatggctgtctgtggtattgttgctttgcttctctctttccggacaagcccagttcctgcgcacttcctactttatggaaggaagtaaccagcgtatgcagctcaatccggccttgatgccgggacgcggttatctgaatattcccgtgataggttcgttgaatgctaccgtcaactccagttccctggggtatagggatattatggacattattgagaacagtgatgatagcgactatttcatgagcaatgactttatgaaccgactggatgctaccaataacttgaatgtgaatttgagtaccgacattctgtctgccgggtggtataaaggaaagaacttctggtcagtcaatgtggggttacgtaatgatatcggtgctgccataccgaaaaccatgttccagtttatgaataacatgagcagccgggagtttggtgacaatatttctgactatttgggtattaacgaaaccattaatggacagaagcttgagataaattcctatgcggaagtcggccttggttttgcaaggaatataacagaccggctggctgtaggcggtaaggtgaagatgctgttgggtattggtaacttaaagctgaacatcaaccggattcatgtggaaactccttctgtcggttcttcaggaatgacgagtaaagcttccattcaagtggatgcaactttggagaactcgtcaaagctgttagaacttcccgagaatgagagtggcgattatatcgatgaaatcgattttggcagtttcggttttgccggatatggtggggctattgatttgggagtatcttacaagttactggataaattgacactttctgcttcagttcttgatttgggctttatcaaatggtctaaatcgaataccagtatagcgcgagccaatgcagagcagacttatgatcttcttgacccggcctcgcagcaggagttcatgaatattgtgaacagcggcgagattcttaactatgacatgttgaagctcaagacggaggaggcttctgagaagagccgtacccgtggattgacttctacaatggttcttggcgctgaatatgccttattgaatgattggctggtagtgggtgccttgtataccggtcgttttgccaaaccgaaaactttgaatgagttgactttctctgcctgcatccgtccgacgaatgctttcaatgtagctgccagctattccgtacttcaaggagccggtaaaaccttcggtctggcactgaaactgggtcctttctttgcgggaacagactatatgttctttggcaagaatacgaagaatgtcaatgcttacttgggggtttctattcctttgggaaaacagaaaacggctgaaaattaataaagtgagttatcagttgtcgcgggttatctttctataaaagaggataatctgcgattttgtttttacgaaaacgcaaaaagctttatctttgctggtaaatacctataaacagtactcatgagaattgcaataacgtttctcttgtctttggttttcagtagtttgctgcaagcttcacccatacctttttctcctatagtgaggagctattcggtgtcggattataatgccggtattcagaattggtctattgcacaagatgaaagaggggtgatgtattttggcaataataatggactgctggaatttgatggaagtgcttggcggttgtatgaattaccgacaaaaggaattgtgcgtgctatatatatcagtaaagatggaagaatttatgtaggctcttacgaagaattcggttattttgtccgtactccttataatacccttgaatatcattcgctaaaagatgaggtgaaggattttacttttcataacgatgaaatctggaacattgtttgcgttcaaggagaaattgtttttcaatcgtttggttctctctttttttataatggaaattcggtggaaggtactcggatgaagagtcttcctctgaacttatttcaggttggaaatactttttattctcaaagaataaatggtggactttgtgtcttttctggcaggaaaatggaagaacttattcccagaaaggcatttgggaatagcgatgtcctggccgggcttccttatgatgatgcggttttaatgcttacccgtaatcagggaggttttctctatcgagatgggagggtggaaaaatgggaaaccgaatgtgatgatgtattcaggaagcataccattaatcgtgcggtgatgaccaaagacagttgctacgttgttggcacaatatccgatggcatatatgcgttggataaaaaaggaaagctgatttggaaggtcaatacggataataaactacagaacaatactgttttgaagttgtattgtgatgatgacaataatatatggacagctttggatgaaggtattgcctatatacacaataattctctaatctattattatgaacctccgtttcgtaaaataggtatggtatatgatgttctagtaagggaaaatgaagcttatattgcttctaatcaaggactttattggcttaaggatggaaaggctgaattggttccgggcttggaagaacaagcgtggttcgtcgatgaatggggaaaacagattttttgcggacacaacaagggtactttccttatatcgggattgaagtcaaagcaggtggctgacgcaaagggagggatgtgtatggaaaagattgaattgaaggaacagtcttttttattggaggggacttatgcgcttttgaatttatatacggaaactgcttcgggagagtattattttactcggtccttacgtgggttcagtcacatgattcgccatatagaagtggaccatcaggggaatatctgggcgaaacacttaaggaatggtttgtatcgctttcggattgatccggatatgaagctggtaaaggatgtgcggaagtatgagagtttgggagaagtagagggtggaagtttcacgctttttaaaatcaatggtcgggtggttttttctaatggagaatacttttatacttatgaagatatgaccgactcgattgttccttatgaaacgatgaatgaacaattggcggaattgagggaaatcaagactgtgagtcgtgcaagtggagatcgttattggtttgtaggggacagaacggtgtatttggtgaaatgtgcgataaatactttcgatatagaactccggattccatattctttgtttgacggtctggcagtggaagagcgtggaagcgtggcttatgacaagagaaataatcattcctatctttgcctgaacaatgccattgcccgtattgagacggatagttcttcgttgtataaatcccgagtcaaacgttctttatggatttcgggaatgcgggctattgatgaattcagtggtgagcggaaaacattggtggcgcagccgggagtccgggtggagtccgaatttaatacagtgagttttaccttgtgttatccggtttatagtgattatacttataaggtaagatataagttggatggctattccgaacaatgggtgcccagtggacgcagtttgcagaaaatgtatgcccgtcttccttatggaaattatattttccaagctgagatatataatactgatagggttttggcatcggtagagcttccttttgagatattatctccgtggtacttgtcttattgggctgtgggaagttatatcttggcaggattgtgtctgttggctttgttgcaatatctggtctaccgtttcgtgaagaaaaagaaagaccgtgtgattgaacggcagcgcgtagcccatcaggcagaactcgagcggcaagagaagaagattgttgagttggaaaaggagcagcttgaggccgatttgcgttttaaaagcaaggagttgtccagtgtggtaatgacaaatatcgcccatcaggaatttctgaattccttgaaagaagagatacagcggcaaaagttgtcggggcagtatggccgtaagaacttggataagctgctcactttagttaatagcaatatagtgtccgataaagagaattggactatgtttcaggctaattttgaccgtatacacgaaaacttcttccgtaatctgaaacttcaatatacagatttgacttcaggagatttgcgcttttgtgcattgcttcgcttgaatatgccgacaaaggagatatcgaagttgctcaatatttccacgcgtggggttgatgctgcaagataccggttgcgcaagaaattcaatctgcttccggaagaaagtctaactgatttccttataaattttaaataactgttttacagtaaaatattaatgggggaagtactaatattgtacttcctattttgttttttagtgatggatgtacttttattgtagtgcgggatgtggaggttgtcgcatgcttttcttttatttgcagcaaaataatatttctataaattaaaagcatgaaagacatgaagcatttacttttcaagttacaatcatttttagccttgttgatgtttactgccgttagtgcgtatgcgcagaaatctccggtcgatatgaatcgtttcattgacgatttaatgaagaagatgaccctggaagagaaaataggtcagttgaatctgccggttaccggtgagattacgaccggtcaggctaaaagtagtaatgtggccaaacgtattcgtgccggtgaagtgggcgggcttttcaatctgaaaggtgtggaacgtatccgcgatgtacagaagcaggcggttgaagaaagtcgtttgggtattcctctcttattcggtatggatgttattcatggatatgaaacggtgtttcccattcctttgggattgtcgtgtacatgggatatgaaggcggttgaagaatcggcgcgtattgcggctattgagtccagtgccgacggtatttgctggacattcagtccgatggtggatatttgccgtgatgcccgttgggggcgtgtgtccgagggcaacggtgaagacccgtttctgggagcagccattgcgcaggccatggtacgtggttatcagggaaaggatatgagccgtaatgatgagattatggcttgtgtaaagcattttgccttgtatggtgccggtgaggcaggacgtgactataatacagtagatatgagccatcagcgcatgttcaatgaatacatgttgccctatcaggcggcggttgatgccggtgtgggcagtgcgatggcctctttcaatgaggtcgatggcattcctgccactggaaacaagtggttgatgacggatgtattgcgtaagcagtgggggtttgacggttttgtagtgacagattataccggaattacagaaatgaccgaccatgggatgggcgatacgcagactgttgccgcgttggcgctgaatgctggtgtagatatggatatggtgagcgatgcatttgttggtacgctcaagaagtcattgacagaaggaaaagtgacagaagaagcaattaatgtggcttgtcgccgtattttggaagctaagtacaagttgggcttgttcgataatccttataaatactgtgatgtgaagcgtgccaagaagcaaatctttaccaaagagcatcgtgccgttgcgcgtaagattgcttcggagagcttggtgttgctgaagaacgagggtaatgtgcttccgctggccaagaagggcactattgctgtggtaggtccgttggcagacagccgcagtaatatgccgggtacttggagtgtggctgccgtattgaagaatgctacttctttggctgaaggtttgaaggcggtagcaggcggtaaagccgaaatactgactgcgaaaggctgtaatttgatgagtgatgccgaatatgagaaacgtgccactatgttcggacgttctttacaccgtgacaatcgttcggacaaggagttgctggacgaggctcttgccgtggctgccaaatcggatgttattgtggctgcgctcggtgagtcttcggaaatgagtggagagagcagttgccgcacgaatcttgaaatgacggacacccaacgcatactgttacaggaattattgaaaacgggaaaaccggtggtactggtgctgtttaccggtcgtccgctggtactgaactgggagcaggcaaacgtgccggccattctgaatgtatggtttgcgggcagtgaggcaggttttgccatcggtgatgtattgtttggtgatgtgaatccgagtgggaagctgactacgactttcccgaagagcgtgggacagattcctttgttctacaaccacaagaacacgggccgccctcttgccgacggtgcatggttccagaaattccgcagcaactatatagacatagacaatgaaccgctttatccctttggtttcggcttgagctatacaacattctcttatagcgacgtggctttggacaagactagcatgacggataagggcgaactgactgctaccgtgactgtgaccaataccggcaagagagacggtgcagaagtggttcaactttatattcgtgaccttgtgggaagtgtaacccgtccggtgaaagagttgaaaggctttgaaaagattttcctgaaagccggcgaatctaaaaaagtatctttcaagattacccccgaattgctgaagttctacaactacaatcttgattttgtatgcgagtccggtaactttgaggtgatgattggcagaaatagccgggacgtaaagaaagcaacgttcacgttactctaactgattcccgaggcggcaatatgcagcattcgagacactgcgttgagatggcattgttgctgcatattgtctgcattttcactgcaaactatatgcagcattcttgcagtatttgcctgacttgtgtggaataatataatctattgaaaaacatgaagaaaatatttttattaatattgtgtctgtccaccatgtacccggttgtcaatgccgggcgggtggttcagagtttcaatgacggctggtattatgttgcgtataatgacaatcggttccagaaagtgcgatgtcatgaggaaggttgggaacaggtacatctgccacatacctggaatacggatgcctattctacccgtaactaccgcagggcttcttcctggtataagaaagagttccgtacggatgccgcgcagatgcgggataagcagctttacctgaaatttgatgctgtcaattctctggcagatgtgtacctcaacggcgagctgctcactacccacaaaggaggttactctgcctttaccgtagacattacggataaagtaaggactgatgccccgaatctgctgatggtgcacgtcaataatcagaacgaccggatacctcctttgtccggcgacttcaccatctttggcggcatctaccgcaatgtgtggctcatcagtgctgcaaagcagcacatcagccttaccgactatgcctctacgggcatttatgtcgatttgccttccgtgagtgaggatagggcggaaatcagtgtgcgtgggactttggtgaaccgtgatgtgcggcgtgcggtgttgaagttggacgtcgaggtgctggataccgatgggaagaccgtagcccaatctttgcgcagcgtccggatagatgccgacggggcgttcgccttcgaggagcggttacagttggaaaagccacagttgtggtcgcccgattccccttatctgtacagcgtgaaagtttctttgaaagatgtgcgtggcaaggtgttgaaagatgagacacgtgtccctttgggggtccgctggttcagcgtggatgcgcaggaaggcttcaagttgaatggggaacccctgaaacttatgggagcttgccgtcatcaggaccagatgccgatgggcatagcgctttcggatgagatgcaccgcagggatatgcagttgctgaaagacatgggtgtgaactttgtccgtctggcacattacccgcaggacgatgccgtgttgcgtgcttgcgacgaactcggcatgctggtatgggaggagattccggtagtagatttgatagctttgggtgacgagttccgcgcgaatgccacaagcgccttgcgcgaaatgattcgccagcattacaaccatccgtccgtcattatgtgggggtatatgaacgaggctgtcatccagctgcagtatcgggtgaagaaacaacggctcaacggtttctacgagaataccttggcgcttgcccggcatctggaggaaactctgaagagggaagacccctaccgtctgagtacgatggcctaccacggcaatcagatttacaataaaatcggtctcagcaatatcaccgacatttccggttggaacctttatcagggctggtatgagaacgacttcaagtctttcgaccgctttgtggacgaagagcatcgtaaatacccgcaccgtccgttaataatcagtgagttcggtgccggttccgacccgcgcttgcagtcgctcgagccgcagatattcgatttctccatgcaatggcagcagttgtacctcgaatactatctgcccgctatcatgaggcggccgttcatagtcggcgccacagagtggaatttcattgatttcagttctgccaatcgccaggaggctacgccacacattaataataaagggctgatgtacaatgatcgccggcctaaagatgtgttttattattttcaggcatttttgcgtaaggatattccggtgctgcacattgctgtggatgactggaagcatcggactgtggtttcggacggcgaagcagtggaacatccggtgaaagtgtattccaatctggataaggtagagctgtctgtcaatgggaaaaaactctctgtacaagacattgagaattgccatgctgggtggcgggtacctcttgttgtgggaagaaacacgcttgtagcatccggcatctatcaagggaagaaggtggagcaggtttcggacatttttgtgaagatgcagcctcgctatatcgcggcagccggctccggacagctggaacttgcagtgaacgtgggcagcaactgtttctttacggatgacaagagtgatctttgctggcttcccgaccaagcttatactcctgggagttggggctacataggtggagagattttccgccgttctccgggacgtatcggaaccactgccgaagtgaaagacacccgtaacgttcctttgctccagaccaaacgcaagggcatcaaagcctatcgcttcgacttgcccgacggcgactatgaagtggaacttctttttgctgacctgaacgcacgttccgaacgggtgacttacgatttgggagctgtcgctaccctagacaatgccgatttccgcggcagtgtcttcaatgtttctgtcaacggtcggccttggttgagccatttctctccggcgatagaagtaggcgggaaccgttgcatatccaagaaattgcgtattgccgtaaccggtggaaaccttacagtggactttgaggcggtgaagggaatgacgttcttgaatgggataaagatattcaggattcattgaccttctatttgcaaggatgttgtattaaccgataaattgagtgaaacatgaaacacaaacttctcaccgggtccctctccttcacagtagggatgggattcagcgctttgcctgccgtcgcgcagcaatctccggcttccactgaggtcaagcccaatgtaatcattatcaacgttgatgacttgggctatggcgacattggttgttacggtgccaccaaggtcaagactcccaatatagaccgtctggcatcgcagggccgtagctttacggacgctcattcatcctcggctgtttccacgccttcacgttatggactaatgactggtcaatatccttgccgtgaggatatttggggggcaatcttcctgaatcagactctgcaaattgatacggcacgcaccacaattgcggatgtgatgaaacgttccggctattccactgccatcgtggggaagtggcatcttggattccgtacggacgaaaagatggactggaacaaggaactggctcccggaccacttgaattgggattcgattattacttcggtgtgcctattctcaacagtcatccaccttttgtttatgtggagaaccatcatgtggtgggttatgattccaacgacccgtttgtaagaggcaagagggcagaaacggaggagttcgatgaaaaattcggtatcaactctattggtggagccacggctgcgcaccgtttgtacaaagaccgggctgtagccactactttgaaagaccgggccgtgcagtggataaaggaacataaggattcacctttcttcttgtattatgctaccaccaacatccatcatccttttacaccggccgaacgctttgtaggtaccagtgaggcaggaccttacggtgattcaatccatgaattggactgggtggtaggcgagattatgcgtaccctcgatgaggaagggctggcgggaaatactctgctcatcttcaccagtgacaacgggggaatgctgaatcatggagggcagagagcttggaaggcaggacaccatatcaacggcaagcttcttggtttcaagttcggagcttgggaaggcgggcatcgcattcctatgattgtccgctggccgggcaggattcctgcgggcagcgtatccaaccagttgatgtccaatgttgacatgcttgccactttggctgccctcacaggatatgaattgcaggagcaggacgggccggacagtttcaacatgcttcctgcccttatcggaaatcccgggaaaatgattcgggaccatattataatctgtccttcccaaaagagccatctttccattcgcaaagggaagtgggtctatattccggcgcaaaacagcggcggatttaccggaaagaatgtcggtgaccatgacttgggcggggcatctgctttccagctcacccatcgggtgaacagcgatatagaaaatgcccggataaagccggatgcaccctctgtgcagctttataatttggaggaagacccataccagaccacaaatgtgtatgaacggcatcccagagtggcacgcaggctggcgcggatactggaggagaagataaggaagtcggatgccacaagaaagtgacaaccgatagattgatgaaaaacataatttgaaaaatgaagaataccatgatgaaaaagttttttgtaggtttattctcccttttgatgggagtaggcagcgcttttgcgcagaccaatatgtccagtgaaatgtatgaccttgccaagatgaaggaaggcttgcgcaaccgccgtgtcagcagttatgaccgtacgggcaacaaccgtgaccacctgaaggccatcaagccgggcgaaacggctgtcttggccgacatcaagggggcaggcgtaatcaaccatatctggataacgatgtctccgggaccgcgccagctttcccgtaacgacatcatccttcggatgtactgggacggcagcgacgaaccttctgtcgtgtcccccatcggtccctttttcggccagggatggaacgaacagtataactatgcttcttttgccctttcttccggtcccaacggtggtacgggtttgtgcagctatttcgccatgccttttgccaaaggtgcgcgcattgagatagagaatcagacggatgtcaacatcggcgccttctactactacatagactatgtggagatgaaggaactgcccaaggacatggggcgcttccatgcgtggttcaaccgtgagattaccgaagcgcttcccgagggggagaccgagtggggttccgtgggtaagcagacggagaataaggacggagccgacaattatgtgtttgccgatatcaagggaaagggccattttgtgggattgaactattatgtacagtgccctacccccatgtggtatggtgaaggcgatgacatgtggttcatcgacggtgaaaaacagtcttccttgataggaaccggtacggaagatttgttcaacaccgcctggtgcccgaaagagccctaccagcatatctacttcggctatccacgtgtgaataatgatgtcggattcttggggcgtacacatgtctatcggttctttattcaagatcccgtcttctttgagaaagggctgaaagtcaccattgagcatgggcacaacaattgcctgaccctcgacctggccaccgttgcctactggtatcaggacaaggcgacggctgttcccaccatacccgacaaggcgggccgtaagctgaagccgatggtaaacaatgtgatgatgcacaaatggcgtcatgagtggagaaagaataaagggaataaggctgacctttggggaaatgaataaattgctggaggatatgaaatgaagacattattagttatatctgttttattagcatttactcttttggggcatgcccaaatatggaaagtgcctgaaggtcatgaaacgcggtggacaagttttgaaaatcctaccggtgccaagggaacggcagctcaagtcaataaaggtgcaaaaggaagtgctttcggcagaatcatggcgggagacagctgtgttttgttgtctcagcaaggacccgggatcattaaccgtatttggctgacagtcagcaaacgtaaccctaagatgcttcgtgcgttgcgtatcaagttttattgggataattctgttgttccggcagtggatgtcccattgggagatttttttgggaatccgctgtcacgtacatctcgttttgagaactgtttcttttctaatccggagaagcgttcttttaactgttctattccgatgccttaccgcaccggtgccaaagtggtgtttgtgaatacctcggatgaggacctgacacacttgttttatgatatcaactttactaaattgccggaatgggattcggagatgagctattttcatgctgtctggcgtgaagacaaatccaccaagttgggagtggattatactgttcttccccaactatcgggcaaggggcgctttttgggggtaagcttgggtatctttgccaataaggcgtatgaaactacttggtggggagaaggtgaaatcaagttctacattgacggagataaggaatttcccacattgagtggtacgggagttgaagactatattggtacggcttgggggcagggcgagtattcccaccgttatcaaggttgtccgattgcaaatgcggacagttgttggtggagtatgtatcgtttccacgtgcaggacccgatttattttcatcatgatataagagttacattgcagcagattggaggtgctccatatcaaaaggtactcgaactgtacaaggcgaaggttcctcttgtaccggttactatagatagaagcggtaaactgaaattctatcgtttattagatgaagattcagacctacatatcacggataaagactttccgccaggatttgttaatttctaccgccaagatcatgtaacttcaacagcatatttctatttggataggcctgcagtctgaataatctttaaataacttcctagtgtatgttgttgggaattagtgttttatacaatgctgtagtagttacgttgtagtgcttgagcaggttgtggtaatcttgtggtagtttgttttttgacatacatcaattgctcctatacttttgcaaaagaattttaaatcaatacaaaatgaagaaaaatttattaattacatgtgtgatgttgttgtttgccgttgtttcgatggcgcagaacaaaattacggtttcgggtgtcgtttccgacaagacgggaatgactgttattggtgctacagtttcggtaaagggggctcctcaacaaggagtcgttactggacttgatggtgattataagattaccaatgttcccagtaacgctgtcttgctttatagctatattggtatgaaagaccaagaaatagcagtgaatggtcgtactactattaatgtagtaatgcaagaagacaatatgttgattgatgaagttgtagttgtaggctatggtgtacagcgtaaatcagacttgaccggtgctgttggttctatcaagagcgatgatttgaaaaagatttctacacctaatgtggctaacgcattgcaaggtcgtgtgtccggtgtatttatctctgcaagcggtgctccgggtagctctcctgaagtgcgcattcgtggtatcggtactactaataatagcaatccgctctatgtggttgatggaatgtttatggacgatatatcattcctgagtaaccatgatattgagtccatggaggtattgaaggatgcttctgctactgccatgtatggttctcgcggtgctaacggtgtaatcattgttaccaccaagcaaggtgctgaaggtaaagcacaggtgaacattactgccagtgaaggatttcagttccaaaatagcggtaagtttgagatgtgtacggcttctgaatatgctatgctgcaaaatgaagctaacttgaatattaatccagatggcggtcttgtttatgatgacccggcttctttcggaaaagggaccaattggttcgatgagattttccgagtagcgtctgtccgtgattatcaagttgctgttagtggcggaacagaaaaggtacgttataatttgagtgccggatatttccaacaggatggtatcataaaggaaaattcttatgaccgttttactttgcgtgccaataattcatataaaataaacaaacatttgactatcgggcataacttatcggcttctttcagtcatacaaaaaatgaaaataagggagttgtaaaatctgcttataaactgagtcctatcattactccttatgatgagaatggtaatttctccgatcctcaggtggcatctactgctaatccgcttgctaccctccattatatgaatagtgataattggaaagatagaattgtgggtagtgcattcttgaattgggaagttattaaagggttgaattttaagaccagcttgggcattgattatattaatggtagaagtcgtaattttactcctaagtattatatctcggagtatcaaaaggtagatgagaacagcttgtctaaaacatggactagagattttacttggctgtgggagaatatcttgacttatgattggcaaatcaatgataaaaatcgtctgaatcttttgggtggtattactgctcaaaaatacactaatgaaaagttaggcgggtcaggacgtaatttcttctcagaagtggaagactattggtatttggatcagtcttcaagcgatacacgtggacttgagaataatggaaaacatgaagccatgatgtcttacttgttccgtgccaactatgctttaatggacagatatttgttgacggcttctatacgtgccgatggctcttcgaagtttggaccggataaccgttggggatattttccgtcagtagctgccggatggaggatttctgaagaagcttttattaaagataatgttgaatggttgagtaacttgaagattagaggtagctgggggcaaattggtaatgataagattggtaatgacaaatattatgcattggctaatgtagcccctacttatgatgctgtatttggtggtgattattattctggtggtactgtaacttctctttataatacacaaatccattgggaacgttcagagcagttggatcttggttttgatttaggcttgttcaataatcgcttttctttagagtttgactattacagaagagatacaaaagaaatgttggtaaatgtggatgttcctgcttctgtaggacttgcctctgtagaaacaaacgtgggctcagtacgtaactctggacttgattttacggtgaaatgggaagactcgtttaaggattttcgttatggcatccgcttgactggaactacaattaagaatgaggtgactaatttgggaggtaaacgtatcaccagtggggatataggttccggaaaaagtgttcatatgacagaagaaggaatgccaatcaagtatttttatggttacaagactattggtattttccaaagtaatgaggagattgagcagtataatgcgatggctgcggctgcttccggtgatgcgaagaagaagtatcaggcaaatgtagctccgggtgatctgatttatgcagatacggatggcaatggatatataactgctgaagaccgtacggatttaggctctcctactccgaagtttatcggtggtttgggtataactgccgcttggaaaggctttgatttgtcaattgatttgcagggtaattttggtaataagatttataatgccaaacaagctgaaagaaatgctggtgttgataactgggatcgttcgttcttggatagatggactgaaaacaataggaatacttccattccgcgcatgacatttgagggtaacaattattttgtttccgaccgttatgttgagagtggcaactatgtgaagttacagactgtggaattaggatatacattcccaaaaaacttgatgcaaaaagtgcatatccagaatttgagattgtacttctcaggtaataacctgctttattttacgaattataacggatttactcccgaaatcttaggggggcttgaccgtgatatttatccgattaccgctacttgtcgttttggcttgaatcttacattctaatggaaaataaaaataggaaatgattatgaaaaagatatattcacttttattagcttcagcattagtttttacctcttgttctgattttttggatacaaagccgcaaggaaaattgacgcaagatattttcttcggggaagaagaaggtgctttgatgggaattaatgctatatattctcaaatgaaaagttgggacttgatcggcttttcttggtttggcattatggaagtgccgagtgacaattctgatacaggaagttcaccggcagatggtagttatgctcgcgtgaattcattgaatgattttacttatgatgtttatacaacagaattgaacggctggtggaccggaaattataaaggaattggattctgtaacgtagcattggataacttggatgtgttgaaagatgagcagttaaagattagaagcattgcacaggcacgttttttccgtggtttcttttactttaacttagtgagaacttacggtggtgtacctttggttactaaagttcagaatcccgatgaatatgatcagccatgcgcttctgaagaagctatttatcagcagattattgatgacttatcctatgcggcaatgaatttgccaacccgtgatgaatgggggattgctgagagaggaagagttacgaaaggaactgcagaaggcttgttggctaaagtttatttgttccgtcaagattatgcaagtgtaaaacaatatgcagggcaggtaataagtaggggagaatataacctgcatcacaattaccgtgatttgtttagcccggattcttattattctgatgaagtgatgctggccgaccagtatttgtggggatcagacaagacgagagataaggcttccgaatatgtgaagtggcaaggtgtcagaggtttcaaaggttggggattctgttctccgtcagaatctttggataaggcttatgaatcaggtgatccgagacgggaggctactatcatttacgatggcgaaaatatggaaggagttggggttataaacttcaaggacgaaccgggagtacaaccgcgtgccaataaaaagacaatgtggcctacaacttattggaatgccaataattttgctaaacaaaattgccacttgtattttctgcgttatgcggatgtactgttaatgtatgctgaggcctgcaatgagttggcaaatggtgaaagcgacccattagtagatgacgccctggctaaattggaattggtcagagaccgtgctcgtaagtccggtgatgatcccactgtattacctaaaataacagagagggataaggcaaagttgcgtgaaatcatatggaatgagcgccgcattgaattagcaatggaaggacaccgtttctttgatttgattcgggctgataaagttgttcccggatatgcagaaaagatgctgaaggcccatggaaagacaaacttcaatatgagccagcattccacattctacattccacagaagcagattgatatttctcaaggaatattgaagcaaaataaataaggtgtgtgaggagtagcctaaggctactcctacttcttatgtgattaaaatgtttaaaataggtattatgaaaaatatatttctttttttcttgtttttgggggtttgttcgtgctcggtaaatgccataaatccaccatctggtgtgacagaaaagcaactctccgatgatgaactcatgacccttgtccagaagcaaactttccgttacttttgggattttgcccatcccgaatcaggattggcgcatgaacggagcaacggaggtgccgagacagctaccatcggtggctcgggtttcggagtgatggctatcattgtcggtatagagcgtggttttgtcactcgcgaacagggcgctgaacgtatgttgaagatagtccgctttctgagcgacaagaataccgacagctatcacggcatgtgggcacattggatgaacggtaaaaccggcaagaccattcctttcagtcgtaaggacgatggagcggatattgtagaatccgctttcatgttcgaaggcttgttggctgcccatcagtattttacaaaggataatccaacggaaaaccgtatccgcgggataatcaataatctgtggcgtcaagcagaatggaacttttttactcagggacaagatgtgatgtattggcattggtcgccaaacaacggatgggcgatgaatcatcagattaaaggtcataacgagtgtcacattgtttacattttgggcgcgtcttcccctacttatccgattgccgagagcgtttatcataaaggctgggccaatgcgaatacttttctgaacggtcgggagtattacggtatcaagcttcctcttggaaacaaccacggaaagggaggtcctctcttcttcactcattattcttacatggggcttgacccacgtggcttgaaagatcgttatgccgattacgaggaacagatgaaggctcataccttgattaaccgtgcctactgcattgacaatccgaagggttacaagggttacggcgaaaaatgttggggattgactgccagtgacggtgacaaaggttattctgcccatagtcccggtaatgaccgtggtgtgattacgcctaccgctgctctttcctctattccatatgcacctgaatattctttggaagccatgcgttatttctatgaagagttgggtgaccgtctttggggtgaatatggtttcaaggatgcgttcaatttgacggagaattggtttgcaccttcgtatcttgccattgaccaagggccgattattgtgatgatagagaactatcgtaccggtttgatttggaaacttttcatgagtcatcccgatgtgcagaagggtttgaggagattaggctttacttctccttatttgaacaaggtcgattaggttgtttgataggattctttgattctgattaggttttacatagattaaaaaggtttgtaaccatgaaaaacgtatttatcaatagtgtattggttgttttcgcattgcttgtcgcctcgtgcggcaggcaaccggaagccaaagtagaggtgatgtcgttcaacatccgtctggatcatgtggcggacagtatgaacaattggaaataccgcaaggaccatgcggcacaaatgattgcttattatgctccggacattataggcatgcaagaggtggtgaagaaccaactcgatgacttgaaggagcgtcttccgcaatataccgctctcggtgtaggtcgtgcagatggaaaagagaaaggtgagtattgctctcttttctgtaagacagaccgtttcgaactattgaagagtggaaattttgggctgagtgaaactcctgattccatcggaaagaaaggctgggatgcggcttgcgagcgtattgtgacttgggctgtactgaaagacaaggtgagtggtagggaaatagcagctttcaatactcatttcgatcatgtaggtaaagtggcacgtcgcgaaagtgccgtgctgatacttgagaagataaaacaaatggcgggtgaccttccggtaattgttaccggagactttaatggaacggtagattccgagccggtcactgtattgacggaaggtggaatgaagaatgcttgcgttacggcgaaagtcgcttacggaccgacgtggagtttccatgacttcgggcgcatcccggtagagaaacgtaggttgatagattttatttttataaaaggtgctgtagaggtggagcgttaccgaaccattgatgataagccggacaacggctatctctccgatcatgctcccgtaatggctatcttaaaactataaaagcatttactatgaaaaagaaattattgattggagctgccctgatactttctgtgggtatggcatgtacttcaggagccggtgattggcagagttacagcggtgacaaacggatagaagagcgtgtcgattctgtacttgccttgatgacacttgaagagaaaataggtcagatgacccaatattctgccaagagcgatattgtgaccggtccgcaagtaaatacggacattgaacctctattgaagaaaggatacataggcagtcttttccatgccacttcttctgccgccatccgcaagacacaagagacggcactagcggaatcccggttgaagattccagtgctctttgctttcgatgtgatacacggttttaaaacgatattccctattcctttggccgagtcgtgtgcctgggacgccgaactggcagaaagaagtgcgtccattgccgctgccgaagcttcggcagtgggtgttaactggacttttgcccccatggtggacatttcacgtgatgcacgttggggacgggtaatggaaggctctggtgaggatccttatctgggttcattgctctctgccgcacgtgtacgcggtttccagggtgagaagcccgaagacttgatgcggctggacaagatgctggcttgcgccaaacacttctgtgcatatggtgctgctgaagctggtcgtgattataatacgactgatgtgtctgagcgctctttgcgcgatatttatttcccgcctttcaaggctgccaaagatgcgggtgtggctactttcatgactgccttcaatgagatttccggtgtgccttgcacttccagtaaattcctttatcaggatgtgcttcgtgatgagtgggggttcaacggttttgtagtgacggattatacggctatcaatgagcttgttccccatggcgtggcacgcgacgaggctcatgccgccgagttggctgccaatgcgggcatcgagatggatatgaccggaggtgtgtttcatgcacatctgctgcaagccgtgaaagagggcaaggtgaacgaagaaaccattgataatgccgtacgccgcattctggagatgaaattccttttaggcattatggacgatccttaccgctatctgaatgaggagcgtgagaaggctactatcatgaaacccgagttcttggaagcagcgcgcgatgctgctcgtaagtcggtagtattgttgaagaatgagaataactttttcccgatacaaccctccgaacgtaagactgtagctttgataggccctatggtgaaagaacgtaacagtgtgaacggtggttggggtggacggggagaccgtcaacggagtgtcactctttttgaagggttggaaaaaaagtacggaaactcgaacgtacgttttctttatgccgaaggctgcgatcttcgcaagcctggaactgcaggatttgcacaagctgtgtccgtggctcgtcaggcagatgtcattctggttgctaccggtgaagaccagaactggagtgccgaggctgcttgccgcacggacatcaccctgcctgcttcgcagcgcgacttgctgaaggaacttaagaaaacgggtaagcccatcggattggtattgatgaacggtcgtccgctggaacttacttgggaggacgagaatatggatgctattctcgaagcctggtatccgggcacgatgggtggtcatgccattgccgatgtcatcgcaggcgactataatcctgccggaaagctgacaatgagttttccacgttcggtggggcagctcccgctttactataaccacaagaacaccggacgaccgcttcctccggacaatccgaagatggactacaagtcttcttatattgactgtcccaattctccgctttatccttttggatatggcttaagttatactagctttgaggtggataacttgaaattggacaaggaggagctgaaaaagggggaaacacttaccgttacagtggatgtagccaatatcggtaaagtcggtggtgaagaggtggtacagctttatattcgcgaccttgtgggaagtgtgactcgtccggtgaaagaattgaagggttttcaaaagctgtatctcaaggctggcgagaagaagtcgctgacatttgtgctgactgaagaagaccttgccttttgtggtgctgatatgaagatgcaggtggaaccgggggaattccggctctgggtaggaacatcgtcggcagatgagcggaatgaatctgtttttacgttgatatgataaattgaaaaatcttataaatcattgaagatgatgaatcataaactatctttaggacttgccatgcttccattggttcctgctgttcaggctcaggaacaaagcagacaagacggtgaacgtcctaacattatttttatcatgagtgatgaccatgcacagcaggctatgagtatctatggtcatcctataggtaaagtggcacctactcctaatattgaccgtatcgggcaggaaggagctgtgttctggaataattattgctgcaattctatttcaggccccagtcgcgccgcgatacttactggcaagcatagccataagaacggcttcatgaagaattgggcactaggtttcgacggctctcagcagacgttgcctaaactgttgcaacaaggcggctatgagactgccgtcatcggtaaatggcatcttatttccaagccgacgggatttgaccattggatgattctcaatgaccaaggcgaatactgtaacccacagttcattaccgagggggacactactattcataaaggatatgtgaccgacctcatcactcaatattgtgaggaatggatggacaacggtcgtgacaagaacaagccgttcttcctgatgatgcaccacaaagccattcaccgcaattgggtacctgccgaacggcattatcgtttgtatgaacacgccaagttcccgcttcccgataattattacgatgcctatgagggacgttacgcagcacagatgcagaagatgaatatataccgtgacatgtacgaaggtcacgatttgaagatggttgcgggtatcgatagcgacagcctgctctttgacccttggccgcacgctttcatgggaacaatgacaccggaagaacgccgccgtttccttgatgcttaccgcgatcgaaataatgagttctattccaagccacgttcatttaaggaagtggctgaatggaaataccaacgttacctgcaagactacatggcttgtgtagcaagtgtggacgagagtgtgggcgagatactggactatctcaaacgtacggggttggacaagaatacgattgtagtctataccaccgatcaaggcttctacttgggcgaacatggctggtttgacaagcgtttcatgtacgaagagtcttttggtatgccgatggtgatgcgctggccgggacatatcaaaccgggtacgcaagttacaggtctgacccagaacatcgacttcgctcctactttccttgatatgtgcggcatctccattccgcaggacatgcagggcgtttcgttcaaggaactggtggaaaaaggcaagacaccgcgcgactggcgtaagtccttgtactatcactattatgagtttcccggcttccacagcgtgcgtgcccattacggtgtgaagatggaacgctacaagctgatgcacttctacgtggatgacaattgggaactttatgatctcaagacagaccctgaagagatgcacaatctttatgggaagaagggaatggagaagattaccaccgaactgaaggctgaactggcacgcttgcaaaaagaatacgatgtgccgcaggagttatgccgctgaaaagctaccggaagacatattgaacattaataacctgataataaagataaaagataatgagaagactgattactaatctgctgctggcattattatgcttggcgtctccccttttggcgcaggacatgcgcatggatacttattgtaatccgctgaatgtagactatacctatatgatatacaattcttcgaaagatatctcctaccgctcgggtgccgaccctgccgtagtagagtttcgtggagaatattatatgttcgttacccgtacgcacggctactggcattctacggatttgcaaaactggaattttatcaatccgggggaaaactggtatccacaaggttgtaacgctccggcggcacataactacaaggattcagtactttatgtctgtggcgatccttcgggtgtgatgagtgtgctttataccgacaaccccaagtcgggtaactggaaagccactcctgccatcatcaccaacttgcaagaccctgacctttttcttgatgatgacggcagtgcttacatgttctggggctcttccaacaagtggcccattcgcggcatgaagctcaacaagaaccatcgtttcatacaagaaggcgagaagctggaacttttcaatctcgacccagagaaacatggttgggaacgttttggagaaaatcatgccgataccgtgctgggcggttatatcgaaggaccgtggctgacgaagcataacgggaagtattacatgcaatatgccgctccgggcactcagtttaatgtatatgccgatggtgtgtatgtggccgaccatccgatgggaccttatatctatcagaaacataatcccatttcctacaagccgggcggttacatcaacggtgccggacatggaagtacggtgctcggaccgggtgagcaatattggcatttcggttccatggctctgcccattaatatgcactgggaacgccgtctctgcatgttccctacttattttgacgaagacggcatcatgtattgtgacacccgttttggagattatccccgttatgcacctactgtgccgggaaagaaaggggagttccgcggctggatgcttctttcttacaacaagcctgttaaaggttcttcggctgtagagggtcatacagctgccggattgacggacgagaattgcaagacctattggctggcttcttccaacgatgaaacgcagtgggtggagatagaccttcaggcacctgccactgtaaacgctattcaggtgaattacaacgattataagagtgatatgtatggtcgttatcccgatttgcgccaccgttacactatcgaaggttccgtagatggcgtcaactggatacgtcttgtcaaccgtagcaacagttttaaagacgctccgcacgattatgtggaactggaaatccctgcccgggtacgttatgtacgttacaaaaacatccatgttcccacaccgcacctttccatttccgccatccgtattttcggtctgggcgaaggtaaggcgcctgctcaagtgaagacatttgaccctcgccgtcacgaagatcgccgtgacatcacgctgacttggaaaccggtgaaaggtgcacaaggatacaacatcctttggggtattgcgccggacaagctttacagttcttggatggtgtatggtgacgagtgtaggcatctgatgaaatgtctttctaccgaccagaaatattattttgctatcgaatctttcaatgaaaacggtgtatctcaaatttctgtcgttaaagaagtgaaataatgtgttgtaaaatgagggtgtgccatcaaccgttttgacacgccctcatttgtcgttttatgtgtattttgtttattgtcagcttaataaaactatggataaaaagtcgtattgcatcgcttggttgatgttgttgttcgtcggttcattacatgcacaatatcgtactactacctactgtaaccctcttaatctggactatacttatccttttcacaattctcatttgggcaagtcctatcgttcgggtgccgaccctgccgtagtggggtttcggggggagtattatatgttcgttacccgttcctggggttactggcattccaaggacttgctgaattgggactttattactcccgaaaaatggtatttcgaaggttgcaatgctcctactgcccataattataaagattccgtactctatgtttgtgggaatccatccggagccatgagcatactttataccgacaatcctaaacggggggattggaaagcagtgccatcagtgcttcatgaccttcaagacccggcctttttcattgacgatgatgagcgtgcttatatgtattggggctcttccaaccgttggcctatccgcggcaaggaacttgatatgacaaataaattccttccgatggcgaaaaagccagactcattgctttatctccgtcccgatatccatggatgggaacgttttggcgaaaatcataccagtgacatcaaaccattcatcgagggtgcgtggatgacgaaacacaatgggaaatattatttgcaatatgccgctccgggcactcagttcaatgtgtatggtgacggtgtttatgtaggaaaatctcctttgggtccctttcagtatgcggctcataatccgttctgctacaagccgggaggatttgctaccggtgccgggcatggaagtacggtttgtggtccgggaggaatatactggcatttcggtacaatccatctgtccattaattataagtttgagcgtaggttatgtatgtttcctacattttttgatgaagacggtgtgatgtactctgatacttatttcggtgactatcctcactattctcccgaccaggtttcgcgacagacgacaagcggtggtttccggggctggatgttgctttcttatggcaaacccgtgaaggcttcttcgcaattggaaagttatccggtggaaaatgtgacggatgagaacttgaaaaccttctgggtggccggaaaaaatgacgataaacaatgggtggagatagaccttgaagaggtgagcgacgtgtatgccttgcaactgaatttttttgactatgaggaaaccggattttggggacgtatgccaaaactctggcaacgctatcttgtagaagcttcggtggatggtgtccgttggcaaatattggcagactatcgtaacagttttcgtgatgcccctcataattacatagaactggatcaaccgatagaagcacgctatattcgttatcgccaccattacgtgccgggcaagaatctggcaatgggggatattcgcgtgttcggtttgggacgtgggaaaaaaccggctacggtaaaaggttttacggtagtgcgtgaagcggacgaacgtaatgctcgcatttcttggaaatcggtgaagggtgcgcaaggctataatgtattgtggggtgttgctcttgataaattgtatagttcgtggatggtatatggcgataattcattagacttacgtgccctcacagtgggacaaaaatattattttgccatcgaatcgtttaatgaaaatggtatttcgcaacgtgtctttcttcgagaggctcactgattatgtaaattgagtaataatgaaacagataatacactcttttttgtgtggtggtaccgtttgggcagtttgtgctgtatcgcagggagtaaaggccggtggaacttctgtttctgctgcagaggatggcgaggttgttcgtcccaacattgtttgtgtggtatgcgaagacatcagtccttggctacgctgttttggtgacagtgtggcagtgactcccactattgacgcccttgcggcagagggcgtacgctataccagcctttacgggacagtgggtgtcagtgctccttcgcgtgcggcactcatcacgggaatgtatcccacacatattaaagctaattatatgcgtacgcaaggggggcagattgcacgtccgccagcagtaaccggttacgatattgtgttgtctgaaggaattaaatgctatactgagctgttgcgtgccgctggttattattgtacgaacaatccgaagaccgactatcagtttctatcgcctttgacagcttgggacgaatgcggtaggcaggcgcattggcgcaatcgtcctaagggaatgccttttttcgctatattcaatacccttgcttcgcatgagcagaaggtatgggaaagtgcaaaggatacgctatacgtctctcccgacgatgtggtactgcctccctattatcctgaggacagcattgtgcgccgcgacatagctgtcatgtacagcaatatttaccgcatggactgttttgtccgccagatgattgatgaactgaaggctgcaggcgagtgggataatactattcttatcttttattcggataatggcggaccgcttcctcggcagaaacgtgaaataacagaggttggtacccatattcctctcattatccgttatccggacggacgattggccggcagtattgatgatggacttcgcagtgtcattgacattccacccacgattctttcattggcgggtatcaagcctcctgcctatatggatggcaaggcatttgctgggaaatatgcttcgccatcgcggcgctatgtttttgccgcacgtgaccgtatggataagtgctatgaccagcaggggggcgtgcgcgattgccgttatcgttatatctgtaattatactcccaatcagcccggctatcagccggtaggatttcgtctgaacatgccgatgatgcgccgtatgcttcaactccatgaagaaggcgcactcgatgagaatcaagaaagctggtttgtctggccccgtcagcgtgaagagttctatgatttggagaaagaccctcatgagatgtgcaatctgattaatgattcggcttaccggaaagacattgaccgtttgcggaaggtgtatcggcagtgggaaaggaaatattggcaatgtcgtccgctgacagaaccggaaatagtataaactatgtggccggacggtgtacagccgctcgtgtcagctccgcagattgtacagaggggggcaggtcaagctggagtgttccactcctggagtctcttatgcctatcagttgaatggtcggggacggaatggagagaaacattggagtctatatgttgagccgtttgctgtccgtaaaggagaccgggtggcagtgcaggctttccgggtaggatataagaaaagtgagatagtaaacttcttgattgaacattaattttataaaatatgaagaatatagtttgtacagccttgatgctgttgatgtctgtgtgtatgtatgcgcaggagttgtatggagagtatgaaaagaaagtgtatgtctcttcgcagggagattcgttgaagtaccgtttgctgcgtcccgaagcagaaaaggcagggaagaaatatccgttggtgctttttctgcatggtgcgggcgaacgaggagatgataatcaaaagcaattggtgcatggtgggcagatgtggctcaatccggtgaacagagaagaatatccggcttttgtattggctccccagtgtcctaaggaagattattgggcttatgtgggtcgtcccaagtcgtttgtacctggagaaatgcccgaggtacaggagcctacgcgtatattccgcacattgaaggagttgctggatacctatttggctatgccccaggtggataaagaccggatttatgtgatgggactttccatgggcggtatggggacgtttgatttggcgatacgttatcccgaagtttttgccgcagccgttcccatctgtggtattgtgaatccggcaaggctttctgccgccaaagacgtgaagttccgtatttatcacggagatgccgataacattgttccggtagaaggttcgcgtcaggcttacaaggccttgaaggctgccggtgccgatgttgagtatatcgaattccctggagtcaatcatggcagttggacaccggcgttcaatgattctgagtttatgggttggctgtttaatcagaagaaaaaatgatgagagtattgtctgttatcggaattctctttttagggggcgctttttttacttcttgcatcacttctggtcgggtaagtacttttgtggtattgccggatacgcagacttatctggaacaatgtccggaggtctttgattcgcaagtggactggttggttgccaatcgtaagaaaatagatgccgtgttccaagtgggagatttgacacaagataattctccggtggaatgggcgtatatgcagaaagcctttcatcgtattagccaagcaggaataccttattctgtcgtatggggaaatcacgatattggcagtaagcccggtaagttttcggacgtgcataacactgcaatggccaacaagtatttccctctttctgactataagcagaagagttattggggaggcagtgcggatggaaagacattggataactattacataaaccttaggtcgggcgataccgattggctggtcttgaatctggaattcgggccttctgatgaggctctgcaatgggccgattccatagtgggtattcatccggataagcttgtcatattgaatacacacgcctatttgtattgtgacagtacgttgcatgacgggaaagattggtggcgtcctcaaggatatggcatcggcaaagagttcgggcgcacagtgaacgatggcgctggaatctggaagaaattgcttttcaggcatcgcaatgtgatagctgtcttttgtgggcatgtcttgaaaagcggagttggcacgctggtctctatagggaaagagggaaataaagtgtatcagatgctggcaaactatcagcgtggtgtggaaggcagtagattgggaggtgagggctacttacgcattgtaacttttaaccggaagacaagggagatagatgtgaagacctattcgacttggaataaagcctaccacccctccgaacatcataactttaagttcagagaggtggactttgacgaatatctgcgctgagacttaagtcctttcagcgtaatctccgttactttttatcagttctatcagcttttctaccgcctcttcttcgggaatgttcttttcgatacactccttcttcttgtagaggctgattttgcctcgtccggcgcccacatagccgtagtcggcgtctgccatttctccggggccgttgacaatgcatcccatgattcctatcttgagtcctttcagatggccggtggctgccttgatacgggcaatggtactttccaggtcgtagagggtgcgtccgcagccgggacaagagatgtattcggtcttgctggtacgtacacgtccggcttgcaggataccgaaagcagtggcatccactactttgccgcttatggtttctccttggttgaagagaaggataccgtcacacagaccgtcgaagatgagtgctcccatgtctgccgccgctttgatttgcagattttccaattcgctctctgcgtagtgttcaaagaagactaccggattcttcaggccttccttcatcatctggtgtaccagggcgcgttgttctcccaatcggttgggatgattgctttgcgaaaccaatacgacttccggatgatacttcaggcaggcgatggcttcgtcattcaatcccatatacgtgatgaagaggaatttcaaagaagcgccgcagctgcttaggaaaggaagctggtctcctttaaaggcaggccaggcattgtccggttccgttcctccgttactgtgctccatccagacatcggcatcgatgatgcattgcatgccttccggaagttgttcggggatggaacgtcccgtatagatatagtccggtacgaattgcggattgaagtccatgtccccgtccaggcgtgcggcaatgaccacgggcagattgtctccgccgatattgtgtacggcagcagtctcgcggcgggtgggagagagataattgaattccggcacatctgctccggggatataaggatggtcgtggcgctgcacgatatagtccaccagtttgcgggctacggggatttccgcctccggggcttcgctcagggaaacccggatggtgtcacccaaaccgtctgccagcagggcgccgatgcccaaggccgatttgatgcgtccgtcttctccgtctccggcttctgttacaccgaggtgcagcgggaattgcataccctcctgctccatgacggctgccagcaggcgcactgtctttaccatgaccactgtattggatgccttgatggaaatgactacatccgtgaaattctcttgcacgcagatgcgcagaaactccatacaagattccaccatgccttccggtgtatcgccatagcgcgacatgatgcggtcggacaatgaaccgtggttcacgccgatgcggatggcagtatggttctccttgcagatattaaggaaggggacaaagcggtcgtgtatcttctgcaactcctgggcatattcctcatcggtatactccagatgcttgaaagtacgtgctgcatccacatagtttcccggattgatgcgtactttttctacatactgtgccgccacgtccgctaccttcggattgaagtgaatgtcggacacaagcggcaccatatatccgtcctgacgtaggcctatgttgatattcatcaggttttcagcctctttgatgccttgggccgtgaggcgtacatactctcctccggcatcgacaatacgtttggcttgcgctacactggcttctgtgtcctgcgtagcggtgttcgtcatactttgtatgcggataggattggagccgcccataggggtggctccgatgtttacttctgacgtttcccgtcgggaatagttaaatagatccacgatgatatttacagttaaaggattaaaagatttacgattggatgatttacgatgtacgattgaagataccaagaagtaatttcaatcgtacatcgtaaatcatccaatcgtaaatcaattggttttgtattcgtacttcacatccttcaagtcctcatttgccttgactattttctttttcagcccttctttgtaggtggcaaatgtttcggccaatgaggaatcgcccaatgccagcatttgtacggcaaggatggcagcgttcatggcaccattaatggcaacggtggctactggtatgcccggaggcatctggatgatggagtaaagggcgtctacgccatcgagtgcggacccttttacgggaaccccgattaccggcagtgtggtgttggcagcaatgacgccgggcagggcggcagccataccggcagcggcaataatcactttaatgccgcgttggcgggcattcttggcaaattcctccactgcttccggtgtgcggtgagcagagagagcgttcatttcgaacggtacatgcaggtcattgagcaattgcgcggccttctccataacggggaggtcggaagtgctgcccatgatgatgctaacgattggagacatgaatcattaaattattaaagggttaattttataggggttagggattaacgattaggggttagggactgcgctatcattccatctggtgctaatcgctaacccctaatccctaatcctttcatttcatttcattcgtttatcagcgctttgtaggcttcggcatccagcaggctgtcgaagtcggcatcagcagcgggtttgattttgatgagccagccttcgccgtacgggtcctggtttaccagttccggctggtcggcaagggcttcgttttgctccagaatctcaccggctacgggcaggaagaggtctgatatggtttttactacttcgatggtaccgaacacttcgtcggcagccaatgtttcaccttcggtcgggatgtcgacaaacacaatgtcacccagttgctcttgtgcataatcggtaatacctacataggctacatcaccttccaggcgaatccattcgtgttctttggtgtactttacattagtcgggaaattcatgatcattagtttttaagggttgatactatgtaaattaaaagttgaaaattaaaaattaaaaattaaacaaggctcttaaaagaggaagattcggaacagtatgttgctcagcgggtggagtaccagcaacgagcagataagccctacggcaaagcctcccataacttcgcccagggtgtggtgtcgcaggatgatgcgggcggtgcccagcacgccagccaccagtataaagaggcatagccaccatacgggattgtagctgaacaaggcgctgaaagctaccagtccaccaattacggctccggcgcctgccatgtgttcgctcagtttccattttaagttgacaatgacgcagattatcatcactaccagggcggagagtatgataccggtcatgtaccacgggatattgagccggtgcatcatgagcaggcagaatacataagaagtgatggtcagaataaagggaatgtatctcctttttcgttccaccagttcttccggactgaaaccgttgattttgcggaagatgaagatagtcagtgtaggcatcaggatggtgaagcaatacaccacgcccaatactatcaacttgtactgcaacggcatgatgcgcaggtacgagaatataaacagaaccagaaatgccaggaaagggatggagaacggtgtgaataccgccgaaatcactttcgctgttctgattaaagttttatctgctataatatgctcttccacaacctaattttatttacgatttgactatttacaatttactatttgaatgcactaatctttaaaccttaatccctaatcgctcatccttttctctcatcttctcagtcttgccacggggatattcatctgttggcgatactttgccaccgtgcggcgggctatgggatagcctttcttcttcagcagctcggtcagttcgtcatcggtcagaggctttttcttgtcctcgttgtcaatgcactctttgagtatcttgcgtatttcgcgtacagacatctcttcgccgtcttcggtagtgtagccgtcgttgaagaagaacttcagcgggtagatgccgtagttggtctgtacatacttgctgttgctcacacgggagatggtcgagatgtccaacccggtgcgttcggcaacatccttcagaatcatggggcggagcaatgactcgtctccttcgaggaagaacgggcgttgcaggtctatgatggcctgcatggtggtcatcagtgtattctggcgttgtttcacggcgtcgatgaaaccttgtgcggcatccattttttgtttgaggaacatcatggcttcgcgggattccttggattggttggcccggttcttggtgtgttcttccaccatctcggtgaagtcgcggctcatgcgcaattccggtacgttgcggttgttcaatgtcacgttgatggtaccgtcatcataagtgtctaccaagaagtcgggcacaatctgctgcatgttcttgccgatggcttcgccgagcgaggcgccgggacggggattcagtttgcagatttccttaacggcttgttgcagagtctcttcgctgattcctaatttctgcataatcttgtcccaatgcttacgggtgaactcttcgtaacactgggtaagaatatcttcttctatatagtattgtggaggtgagggcatgggccgttgcgcttccttgcgtcgaatctggatgagcaggcactcttgcagggtgcgggcgcccagaccggcggggtcaaagtcttgtataatcttcaatacttcttccagctcttcgggagaagcgtcgataccggcgtagatggcgagttcgtcgctgatgctgtccaatgatttgcgcagcaggccatcgtcgtccagcgagccgatgagatattctgccagttcgcgctggtgcggagtcaagttctgctcgccgagctgctggcgcagggtctcatagaaggaggtggcgtcggaaaaagggatttcttctgcctgctcccctttgctgcggttgttctcctgcagcttgtagtcggggatatcgtcttcgttcagataatcgcttaaggaatcatagccggtgtctccaccgtcttccgttccggtttccgtatcaggagtgtcggggtattcatcgccgggagtatcctccttaccctcttccagtgccggattttccaagagttcggcacgtacgcggtcttccagctccacggcggggagttccagcagctttaccaccagaatctgttgcggcgacagtgtttgtatctgctgttgcgcttgagtctgtacttgtcgggaaccttgtgccatactttataaattacaaattacgaataagggaaatttctaccgcaaaaatagtgaatagttcgggaacgcgaaaccttctcttatgatatttaacaagaaaacgggagcttggttgcttttttgttcctatctttgttccataactactaaaaaatggaacgttatgtttgctaaagaaacgtatgtgcagcgcagggcccggctgaaaaaaacgattggctccggagtattactgtttttgggtaacgatgaacaagggttgaactatgaggacaatactttccgttaccgccaggattccacttttctctattatttcggtttgtcgtttgccgggttgtcggctctcatcgacatagacgaagataaggaaatcattttcggtgatgagctgaccatcgaccatattgtatggatgggtacccagcccacccttcacgaaaaggcttccgccgtgggcatttccgaaacccgtccttttgccgacattgtcggttatctgcacaaggctgtacagaagggacagaccatccattatttgcccccttatcgtgccgagcataagttgaaactgatggattggctgggtgttcctccagcacgtcaggaagggtccgtgccgtttatccgtgcggtggtggcacagcgcaactacaagtcgacagaagaaatagcagaaatagaaaaggcctgcgacgtgactgcagacatgcacattaccgcaatgaaagtgcttcgtccgggcatgtacgaatacgaggttgtggccgaaatgaaccgcatcgccgagatgaacaactgcgagttgtcttttgccacgattgccaccgtcaatggccagactttgcacaaccactatcatggaaataaagtaaggccgggcgacctcttcctgattgatgccggcgcagagcttccttcgggttactgtggcgacatgtcgtccaccgtgcctgcggacaaaacttttactccacgccagcgtgccgtttacgaaatccagaacgccatgcacttagagtctgtcaaagccctccgtccgggcattccttatatgaaggtgtacgagctttccgcccaagtgatggtggaagggctgaaagagctgggcctgatgaagggcaatgccgaggatgccgtgcgcgaaggagcgcacgccttgttctatcctcacgggctgggtcacatgatgggactggacgtacacgatatggagaacctgggcgagctttgggtaggctatgacggccagcccaagagtacgcagttcggccgaaagagccagcgccttgccatccctctggaaccgggctttgtgcatacggttgagccgggcatttatttcatccccgagttgattgatttgtggaggggagagaagaagtttatggacttcattgactatgataaggtggaagaataccgcaatttcggtggcatccgcaatgaggaggattatctgattaccgaaacgggagcgcgccgcttgggcaagaaaattccactgacaccggaagaggtggaggcattgcgctgaatccattaagatatagaatgataaagcctgctgcatcttgtgtgagaatgcggcaggctttgtggaaagttcatagaccgaaaagttttaattatacttcaaacttttgctgatgtatcattttaaatacttgtctattgttgttgtcacttgtttgtcacttggtctcggagcattcatttcaacaatattgccctgtttgtcgaaaatgatgtatcggggaattaattccagttttagcttttccagcattttgctgttctttggatttgtgatgaagaaattgtcgggtacttctgataagccctcctgctctaccgccattttccaactgctttcctggtccttgaaggcgagatagacgaataccacatcttttcccttgtacagttctctcagctttgccgagggaggcatctcttcccggcagggcacacaccagcttgcccaaaagtccacataaatgacctttcccctgttcttctccagcagtctgttcaggttagtggactttccgtgaatgtccttcagcaatagctggccggcatcggcagacaagttgtattggtctcttatcctgtcggacagcagtgtgtcttgggtgatgtggatatatttgtcaagatagctgtttgcgtcttgtgccgaaaagttctcaccgatttctttgatgcagcgttcaagcagggcttgcttggattttggctggaacggtttcgcagatagctcatcgaaggtttgacgccagtccttgcttcctccctgggatttgcgtatcgtcgggatatgctggttgaagaaccaaaggtaatagtccagaaattcacggtaggagggataacggatgtatttgtcagctatttcgggctccatctggcggtagaaggcggtgtcttcattcagcattcgccgggattcatagtctttcagcttgagcaggcattgataacggtcgtgtatctcgcttgagataagctgctgttctttaaaggaatcgatggtgtctgtatagtttttcttgtaactgtcgaacatggattgtaatgaatccaaagggcagtaatccattagtaatgaagtccagttatttgcccgtattatatcaatcgatttggcaatccgcacccagtcacccccaagacaagtctttgcttccagtcctgcatgggtcttccctttgcgcaactcatggttcatgttatagattctgctatatccgggatgatgcttgctgcttaaaatggggtagccaaggctatccatggaaataataacggtatctccttgcattaatgggtagtagttgaactcaaaatctccatagttcaggcccaactccttgaagtattcagtggaatagatggtcagggtatcggaatctttgttgggcatgtattccacaagagttcctatgctgtcggtatagaggactttaggcatcggcatgtgtcccattcctcccggtgtcttgtatggtttaggatgataatggtcgaaacatactataatgttcttctcgcatttttcattgacggcttgctgctggcaggatgaaatgcttattgccagaaaaaggatgatacataaatacttcataagtacaagattttaatttatgatggtattgaataaggagcgggaggggggatggttgtacctgttattccaaagaatacggttgaagcggtaagatacaagacttgtttcatgctttttgcttttgggcttatggcaaagttagccaatttttatctattgcgcaataaagcatgtctcatttttgaggtgaattgtctcattttgcatgatacatgtctcatgtatcggaaggagtgctgtttatcatgctttttagccgttttgtaacttgtcgtttcagtgcaggctgccaatggcacggtcggtatggatgtaaaggctatggtttcgttgtgctccgcatgcgtgtttcttccgagaaaccttttgatttgccaatgctccactacagtgaacaagtcggctcactaaggtgaacaagacagaccactacagtgagctgaacagaccactatagtgagccgttgtcaatacactgtgtctggcacaagaaatgtatatgcttttcttaataaaagacgggggagaggcggacgaaagcccgtgcgtactgagggggagtggcagcaagtaaccgggtaactgaaaagagtgagggcaaattttgccctcactctttttatttgctctcactcgccgctgcaatgccgatgagcagggcatttcagaaaagcggtgagggcagtgagggcaggtttgataacttcttgtttctttctcgcttgctgctgaattccactctattctgtaccaacctgccgttaagcatgcagttctagtacaaaccgtgcccccttgctgtagccggtatccagtgtcaggctgccgttcatcttggtggctatcagtgagcagatgggaagccccaagccgtcgcccagtgtcaagtccttcacttcggtgaagggcttgaagatgttttcgcgttgctcttcgggaacaccgcaaccggtgtcgctgacgatgaactgatgcgtgtgtgcaccgcgtttcttgaagtcgagccatatcttgcctccggcgggagtgtattcggcggcgttctctaaaaggtgcagcagtatgcgttccagttgctccggattgatttttacattcagctttggagcattgacggccagggaaacgtcttcccgggtttttcccttaatcttgtccatgatagcctcgcagaaggcggagatgttcttctcttgcatttcgtaaggttcggacaaggtgttctccaattcggacagttcctggatgtggttggagaatgtatgcagggcctttactcccggcagcgaagcgtcgagcgtgtccagtgtcggttccatctgggcggagatgttttggatgaattttgttttcagttcgttgtgctcgttggcgataccgatggctttcttctgcttgcgggtaaggacgatgaagcgcaacaatacgatagcaccgaatatcaggactgcggcaaggatggcagccagtacgcagagtccgatgatgatgtattgcttggcgctcaaggagtcgtccttctcctggatggtggccaggctttcatcgtacttcttcttcaggacgttcagttcgtcctgtgcggtaagcgctttcacggagtcggtccagaggatatacttgtcgtatgtacgagccaccagtccggcattgtttgccttgcgggcaatgctgatgagagtcttgtagcattcgtctaccttggcgtagttcttctgttccttatattgccctatcaggcggttggtggcggcatcaccttgcgcattcataccgaaggtgtagtaatagttggcctgcgtataaagcaggtcgttgctcagagagtcgttgtgagaggctttggcggtctcttccagtttggtcagctgttccttggcgcgtgcgggatttttcaggttgatgtacatctgcaggcgttccttgttgatgcggaaacgtaggttgggcatggccttgcccgttttctgttcgccggttgccaccacttgctcggcaccgcgcagcagttcaaaagcttctttatagtaattctcccgatggtagagggcgctggcattgacgccgcattccactgcctgggcatacttgtcttgcgtggcaaaggcattgtaggcttgcaggaatagatagcgggctttgatatattcttttttcgtaagattttcttgtgcttgtttcatcaattcgtctgcacggttttgcgcatggagttgagtaaagatgcagaaagtcgctaagagaagtatcgaaataatttttttcatgtgtacgtttgttttatttgctcacaaagttagaataaaaacttagtatttgaagctgctgcctcctaaaaattctctcaataaggatgtcggtggaatttctttgtcctgcacgggggtgaaatatttgatgaatttcagcaaccggtaggcttctgcgtattccggacagttccgtggaacactggtaaggatgggctctgcgtggcagcggagcacggcaaattcgaacaagagggcggagttgaacatgacatcggcattttcctggtaggggaatatccatttgtcctcgccggcacgtacactgggccagcgtgaaatggtctcttgtgccgagtagccgcggtagttgaagtcgcggatgatgcggcgcagcaggcggttgtccgtggtgggaatccagttgtggtcgtccagcgagatggtggtcagggcggatacataaatcttatatttgctggcggcgggaatctgtggtgtcagttcagggttcagggcatggattccttccaggataaggatggtatgctcgtcgatgcgaagtttgtcgcccttgtactctttcttcccgaggttgaagttgaagcggggcagctccacttcttcgccacggagcaatgcctgcagctgggtgttgaagagttcgaggtcgagggcgtagagtgattcgtagtcgtagtttccgttttcgtcgcgtggggtgtcttcacggtctacgaagtagttgtccagcgagatgggatagggacgcaggccgttggtcatcaactgcacgctgagccgcttgctgaaagtcgtctttccggaggacgatggaccggagatgagtacgagcttcacccggtttccgttttcgccgcggtggtagatgtcgtcagctatttgggctatctttttctcctgcagggcttcggctacgttgatgaggtcggtggcatggcctgtctcgcaagccaggttgaagtcgcccacgttactcagccccatgatgtagttccagcgcaggtgttccttgaatacgtcgagcatcttctcctgtttcaccacttcttccagtacattcgggttctccttgttggggatacgcagcagcaggccgtcgtaatacttcacgatgtcgaacagccagatgaacccggtactgggcagcaggttgccgtagtagtagtctacggtgtcgcccaatgtgtaataataggtatatagcgagccggaggtttccagcagcttaaccttgtcgttcatgccccgttcgctaaagatacgcacagcctcggtggtgtggcattctacacgatggtaggggatgttttcggcgatgatttcctgcatccgtttcttgatggcggtcacatcttccagctctatggaacggccgatgcgcaagttacagaagtaacctttggataccggatgctctacgaacagttttccttccggaaacagctcgctgacagctttgtaaagaatgaagcagagggaacggacataggtgcgcatgcctgaggagtcacgtatgtcgagaaactctacatccttattgttgtatacacggaaattcagtccttcggaacggttgttgacttttgcactgactacctgataggggaaatttagattaaaaccgtaataaatatccaaaagtgagctccctatagggaattctttagaaatattattatttttgcaacaaatttgtaacatgtgtttcatgatgtctcgtttttagtgggttgacacgttaaatataggacattataacacgtgaaggaatgaaacaccttaaataattaaagatggaatattctttttatgattttttaaagctactcggctcattggcactgtttctttacggaatgaagattatgagtgaggggcttcaaaaatttgccggtgacagactgcggaaaatattgaccgcaatgacaaccaacagagtgaccggtgtgttgacgggcgtgctgattacagcacttgtacaatcttcctctgcaaccacggtgatggttgtaagttttgtcaatgcggggttgttaacgctttcacagtccataggtgtcataatgggtgctaatatcggtacgactgttacggcatggattatttcagctttaggtttcaaggtggacattgccgcctttgctcttcctcttcttgctttcggcattcctctcctcttctctcaaaaaagtaaccgcaagtctgtcggtgaatttattttcggtttctcattcttgttcatggggctttcctatttgaaaaacaatgctcctgacttgagccaaaatcctgatatgctgtcatttgtgcaggactataccgacatgggctttatctccatacttctttttgtgggtatcggtacggtgttgaccatgattgtgcaggcatctgcggcaactatggccattacgcttattatgtgcgccaacggctggattagtttcgaattgggggcagcactggttttgggagagaatatcggtacaaccatcacggcaaaccttgcggcgctgaccggtaatacgcaggcaaggcgggctgctttggcccacttggtgttcaatgtgtttggtgtgatatgggtgttgtgtcttttcaccccctttaccgaggctgtgtcatggttcgtagagaacgtgatgggtactaaagatccggctgtggccgtatccttcaagctttcggcattccatacttgcttcaatatctgcaacgtgctgatattgatatggttcgtgaagtttatcgaacgtacggtctgtgccattattccaatgaaggagcaggacgaggaatatcgcttgcgttttatctcgggcggtatgctttctacggcagagctgtccatcctgcaggcaagcaaggaaatacatctttttgccgaacgtacccgccgtatgttcggaatggtgcaggacttgctgcatacggagaaggatgatgatttcaacaaagtgttcagccgtgtggagaagtacgagaatatcagtgacagcatggagctggagattgccaattatctgaatcaagtgtccgaagggcgcctgagttcggaaagtaagttgcaaatacgtgccatgctgcgtgaagtgacggagatagagagcatcggcgacagctgctataacctggcacgtaccatcaaccgcaagcgccagaccaatcaggatttcaccgagaagcagtacgagcatatccatttcatgatgaagctgacggatgatgccttggagcagatgattgtcgtggtggaacatccggagcatgcaggcgcggatgtgaacaagtcctttaatttggagaacgaaatcaataattaccgcaatcagctgaagaaccagaatatcttggatgtgaacaacaaagaatatgattaccagatgggtgtttactatatggacatcattgcggaatgtgaaaagctgggcgactatgtggtgaatgtagtggaagccagcagcgatataaaagaaaagaaagcgtcttaggacgctttctcaaattcttctttgcctactccacacaaggggcaaacccaatcttcgggaaggtcttcgaaagatgttcccggttctattccattttcagggtcgcccaattcagggtcatagacataatcgcatacagtgcaaatgtacttttccataaatttcttttttaggtttattctcctataataacgtttaaaagccctttttgttctattgttgaacaaaaatagtttatttttgttctctattaaaacaacattttatgaaaatgaccgacaagctgttcagggcgattatgcggaatctgcacgcctatgtactgctgataaaccgcgacttcactgtattctacaccaattactacgatattaccggagctgtaaagcctgccgaaactggacgggtgggagatattctgcgctgtaacaatgccttgtcggcagcaggaggttgcggcactcacgatttgtgtgagcactgccccgtgcggaatgccatagagaatgcctttgtggtgcaaaagaacttcacggatttggcagctattctgaatcttagggatagcgaaggcagaactacggaatgcaatgcttatgtttccggcgagtatatggagattgaggaccgcgactgcatggtgattaccgtgcatgacattacccggctgaaacaagtggaagctgaattgaaactggcacgtgagaaggcagagaatgccgaccgctccaaatcggtgttcctggcgaatatgagccatgaaatccgtaccccgctgaacgcaattgtcggattctcggaattgctggcctctgcatcgacagacgaagagaagacacagttcctggaaattgtgcaaagtaacaatgaaatgctgcaacagctgattgctgatattctggacctctcgaagatagaagccggaacattggaatttgtgttctcggatgtggacatcaaccagatgatgtccgatttggaacaacagttccgtatgcgggtggccgagctgggtagtggagtgcagattgtccgggaggcttctgagaaggaatataccatgcatacagacagaaaccggcttgcacaagtgatatccaattttatgacgaataccctgaagttcacccaggaaggcagtattaccctcggattcagactctatgaggaaggtctctatttctacgtaaaagacacgggaaccggtattccccaggaaaagttgccacatgtttttgaacgtttcgtcaagctgaagcaggaaaagaacggtaccggactgggactctccatttgccagaccattgtccgcaaattggggggcgaaataggcgtggaatcggaagaaggggcaggttcgactttctggttcacattgccgtgggagcctgcaactagaccgaaactggtgagggaaaaagagaatcaatgacagtcaattaatcactaatcattatataggtattgttttcccggattattattgtatttttgcgttccaaaattaaacctaaagacttgcatgactgcaataaaggatgattattatcatgtcggactgaccgacgaacaagtgcggaagagccgcgacgaacatggagtaaatttattgacgcctcctaaacggccttccttatggaaattgtatctggagaagtttgaggaccccgtagtaagggtattgctggttgccgctctgttttctttgattatttccattgtagagaatgaatatgccgagactatcggcattatagtagccattctgctggctaccggtatcggtttcttctttgagtatgatgccggaaagaagtttgacctgctgaatgcagtgaacgaagaaactttggtgaaagtaattcgtaacggacatgtgcaggagattccccgtaaagatgtagtggtgggtgatatagtggtgctggaaaccggtgaagaggttccggcggacggtgaattgctggaagccatttccctgcaagtgaacgaatcgaatctgaccggtgagccggtagtgacgaaaactacagtagaagctgactttgacgaagaggctacgtatgcttccaatcgcattttgcgcggtacaacggtggtggacggacatggcactatgcgtgtggaggctgtgggcgatgctacggaaatcggtaaagtggcacgtcaaagtaccgaacagaatacggaacctactccgctgaatattcagttgaccaaattggccaatctgattggaaagattggcttttccgtagcgggtctggcttttttcattttctttgtaaaggacgtggtactggtctatgacttttcttcatttcataccttccgtgattggctgccggccttgcaggctactttgcaatactttatgatggcggttaccctgattgtggtggctgtgcccgaaggcttgccgatgagcgtgacactcagtctggcgttgaatatgcgccgcatgctctccaccaacaacctggtgcgcaagatgcatgcatgcgagacgatgggagccattacagtgatttgtaccgacaagaccggtacattgacccaaaatctgatgcaggtgcatgaacccaatttctatggtttgaagaataacgggcagctggggaatgatgacctcagcaagctggtaatggaaggtatcagtgctaactctactgcttttctggaagaagaggtgactggcgagaagccgaaaggggtgggtaaccccacggaggtggcactgctgctttggctgaacagccaaggatgcgactatctggcgctgcgtgagaaagctacggttatcgaccagctgactttctctacggaaaggaaattcatggctaccctggtgcaatcccccctgattgggaagaaggtgctgtatgtgaagggagctcccgagattgttttgggtaaatgcaaggatgtcatgttggacggcaagcgtgtggatgcggtggaataccgttctacagtggaggctcagttgctcaactaccagaatatggctatgcgtacacttggctttgcattcaagattgtggatgatgcggaagcgtctgattgtgtgtcattggttgctgaaaatgacttgtcgttcctcggtgtggttgccatcagtgatcctatccgtccggatgtgcctgcggccgttgccaaatgccagtcggcaggtatcggcgtgaagattgtgacgggagatacaccgggtacagctaccgagatagcacgtcagattggtctgtggaaaccggaggatacggaaaagaaccgcattacgggagctgcatttgccgaattgacggatgaggaggcattggaccgtgtgatggacttgaagataatgtcgcgtgcacgccccacagacaaacagcgtctggtgcaactgttgcagcagaaaggtgcggtagtggctgtgacgggtgacggcacgaatgatgctcctgcgttgaaccatgcgcaagtgggactttcgatgggtactggaacctccgttgccaaggaggccagcgacatcacgttgctggatgactccttcaacagtataggtacggccgtgatgtggggacgttctctatataagaatatacagcgtttcattgtttttcaactgactatcaattttgtggctttgtttatcgttctcctgggttcactggtgggtacgacgcttcctttgaccgtcacgcagatgttgtgggtgaacctgattatggatacgtttgcggccctggccctggcgtccattccacccagtgagagcgtgatgaaggaaaaaccgcgtaagagtacggatttcattataaccaagtccatgaggtattacattctgggaatggggtctgccttcctggtgttacttatgggaatgctcttctggtttaacagtgaagagggggggatgactacctatcggttgactgtgttcttcacgttctttgttatgcttcagttctggaacttgttcaatgcacgtgtgttcgacacttcggactcggcgttcaagggcatttctaaatcttatggcatggagctgattatacttgccattttgggcggacagatactgattgtacagtttggtggagctgtattccgcacagtgccgctcgattttatgacttggatgacgattgtcgtttctacttcgtttgttttgtggataggtgaactggttcgccttatccgacgtttaacacagaaatagtgatgaaaagaagaggaatcaagaaccttattattgattttggcggagttctgattgatttggaccgccagcgctgtttagagaatttcagaaagctgggattgccggacgtggaagtcatgttggacctctatcaccagcaggatttcttccagaaatatgaaaaagggttgattaccagtgcggagttccgggaagtgattcgtggaaagatagggaaaccggtgactgatgcccagatagatgacgcctggaacagtttcctagtgagtattcctacttttaaattggatttactgttggaactgcgcaaaaaatatgtggtctatctgctgagcaacaccaatgaaatccattggcaatggtcgtgtctgcacgcgtttcgctacaaggctttccgtgcggaggacttttttgagcatatctatctctcttatgagatgaagatggcaaaaccggatgccgatatatttcagaaagtactggatgagaccggtattcttcccaacgagactcttttcattgacgattctgaggccaattgccggacagcggaggcgttgggtatttctacctatacgccaaaggcccacgaggattggagacatgcagttgttttgtgaaacatcggacattggttcccgtccaagtgtagccactatcggtttctttgacggagtacatcggggacaccgctacctgatagagcaagtgtgtgcggtagctgccgggcgtgggcttgcttcgtcggtcgtgacttttccggtacatccgcgtaaagtgatgcaggccgattatcatccgaagttattgaccacttgtgatgagaaagtttccctgcttgccaagactggggtggattattgcatgatgcttgattttactcctgaaatagcccggctttcggcacgggaattcatgtccatactgaaggatcgctatcagatacaagctttggtagtggggtacgaccatcgtttcgggcataaccgcagcgagggttttgaagactatgtgcactatggtcgcgaattgggtatggaggtgcttcttgcgcgcgcgtattcttatagtaaggagacatcggtaacggaggttactgtcagctcctcggctattcgcggtctgttgctggagggaaacgtttcggaagctgccgagtatctgggatatgatttctttttggacggtacggttgtcggtggctatcaggtggggcgtaagataggtttccctacggctaatctccgtgtttccgatcctgacaagctgattccctgcgatggtgtgtatgccgtccgtgtctgtgttgaaggcaaggagtacggcggtatgctaagcattggctaccggcctacgttggagaacggacccgatcgcagtattgaggtccatatattccggtttgatgctgatatttatcagcagccgatgcgtctttcctttgtgcgccgcacccgtcctgaactgaaattcgacagtatagaagaacttattgcccagcttcaccgtgacgaggtggagattaaatccattctttctttataaacataaggcgaggtcatttatccccttgcagttctatgtattttcccgtttgaagtgtttgttttctgtatatttatcgtaaaacgcgttttttttattgtttttcgataaatattttctgtttttctttgtcatatcaaaaaaaggccttttatttgcatatcgaaaaacgataaatgattatcgaaaaacaaaataaagaactaataaaacaataacggtatgaaaactttagtaatgacaacaatttttgtagtgacagtagtgataaatgcttttggtggtaatatccaggaaaactttgcctataatgaagtgatgaacggaaatcaggtggagtcccaaattgtatataaagtagagaacggtaagtttctgcagaaccatttgaaatacaatttcacctatgatgcccaagggcgtacgatacagaaggaggcgttgagatggaacgagattgagcaggcgtttgaacgcttctattgcttgaactacaattatacggaagccggtacggatgtggaatatgccttgtgggacaacaagacgaatgcctactccgatgtgaaggaaaaagctgtttatctgcaggcgggagatgacatcaactacttgagttacaaatggagtaagaaggacaacgactggaatctgttggtggaacatgccactgcggaggaagacgtattgctcctggcagtaaaataaatgaagaacaatatagaaatgagggaggggtttaggttatgagaagagcattcatgagtattacactattggtattgtcactttctacagtgatggtgctgctgatgggacttgttgccacagcttgacggattgacagagaaaatgtgtatctttgcgaacttttagacgaatagaacaatgaaaacggcaataaaactagtattgatttactttttgatgcagattgtaggagcactgtttgcaggacctttctgtctgctgtatacgtatttcgcttatggaactttcgacatggacaaggctggtcagattgctgtggcgcctaccatgctgctgggctttgttttcatgggactgtacttgtggcgcaagaactacctgacgggagacaagcatctgtattctccggtgtcagtcccttatctggcatggagcctgcttgccggaatgacttccatatgtataataggtcttctgatgtccgaacttacttttttgcccaatttgttggaccagacatttgatatactgcaatccggttggctgggtattctctgtatttctgttttgggacccgtactggaagaactgcttttccgtggtgccattaccaaggagctgcttcgcagatatagcccggcaaaggctatcttgttttccgggttgatatttggtatctttcatctgaatccggttcagataataggtgcttgcctcatcggtttcttgcttgcctggctttattataagacacggagtcttatggcatgtattctgatacatatcatgaataacggcttgtctgtctatctgagcctgaaacatcctgaaatggaggatgtgacacatctgctgagtaacccgtatgtactggtttgggcagtggttttcatattgttgcttctactctccttgaaacaactgaataaatataatatatctgatactaatacaacaactgaattatgaaaagaagattgaacattctctgcctggtggtaatgcttgtactgagttactcggtattggagcaggggtactatatctttctgggagccaagatgggggcgcagaccggactggagctgggaaagaaagggagtgacattgctgcctacaaggaactgatgaacctaaaggttgtcaacctgataccttcttccatggagtcgtttgatttcttcagggattccgtctacaatgagaaaagcaggagttatgtgcctgcagcctactcttcgttgatggtcagcgtagattctcatgattctgtcgggaaagtggtggcaaagtatttgctgatatatctgcatttgggcttttccctttgggcggtagtattgtttatccgcttgataatctctatcaacaagtccgacatcttcaactggcggaatgtacgtcggctgcgtcgattgggaatggcactggttgtcagcttctgctgtacctttgcgtcatcatatcttgattttataggtatcgataccgtattctcgctgcatggttacgagctgagcctctcagaattggtgagcactaccacgctggtacttgggctttgttcgctgattgtaggtgaagtgtttgccattggattgaaaatgaaggaagagcaggatttgacgatttaataataagaagaacggacagagatatgaataaaatcagagtatgtgccttcctggctttggtagtgtttattggtagtgttgtaacggatatgtttagtggatttatggacggctggaatgaggcgggcgaccagaaggattttcatgccttaccctctgtgtcacttttggtgcgggcagatgatacgctgcctgctgatactttgattagtgcggcacaggatacgcccatgtattgcaatacaagtgaggtatcggtgcaaggtttccgtagtacgaagtggcggtgggtatcgttcttgctgtttcctgcgggactgtttgcgctttacgggttctatagtgtggcgcggctggtgcttactgccacgaaaggcgaggtgtttgtgcacaagaatgtgcgtcggatgcgcatctttgtctatgcgctgatttcggtgagtcttttattcgagttgcagcaatggggcatctatcatgacttggcttctcaagtgcggctggagggatacgaggtgttgccttattctttcaagtatgcttggttcaattatatgctgttggcattgttcaccgagatattcgccatcggcgtgaagataaaggaagagcaggatttaacggtttaatgtggggggaggattatgaaaaagataagtatattgggtatcctggctatattggtcattgttgcagagtttacctatgcgatgatagcgggctgggtggatatgaagaatagttttcttgagggttacaatagtgtaaatgtgcattcgggaactccacagccggagtattccggtttatttgataaggtatatgtggatgtaagacctttggaaacgacagcagtcgattccttgacgaatcgttttgccgataagtcagtaccttatcaggtaaagagaataggcactgtgattgtccccactgtctggagttccatagtgaacttctttgccatgtttgccatcattcctttctttgtaggaatctattgtctgatacgtttgctggtatccatctcagagcgggaagtgtttacttcggataatgtagcccggttgcgtttctttacttattcgtttgctgcattgtacggcttgatgactttgcacgattggctgaatcatcttgaagcagtgaagcaagtggctctgctgggctatgaagtggttgcatcgcatgatacggatttcacatccctggttattataattcttttcaccgagatatttgccgccggggtgaagataaaggaagaacaggacttgactatttaaaagtgagaggagggattatgacacttatgaaacaaaaggaaccaaaggaaccaaagagacggatagcgcttattatgaatgtgctgttttatttctgtggactatgtattggtggcggcattgttcgtaatctgacattgtgctatgagttgggaaaggatgatactgctaattttatctggcacatattacccgaatcagtaacaatgctggtgatgacaatatgtggcttgtgtatttttctcattctccgcaatgtgaagaaagaggaagtgtttgtttatcagaattcatctttgatacaaaccattggggtgctgatagcattgaatgggctttttcaggtaactctctcctggtttactcccgaaggagtaccgactgatacttcttatcggatattcgtgttattgggagttttcatcatctttatgggctatctttttaagatgggagttcgtatgcgtgaggaacaagagttgacgatttaaataaaagtgaagagcgcgatatgaagaaaagtgtgaaatatggtctgtatttcgttgtcggacttgtggcggttttattgttggcaagtattgtctattttctcctcttgtttccggcctttgacgggaagtggaaagtctatattgtaatgccgtggatgtatctgtgcatatatggttattaccggttgacgaaacggtacactgactggtggtgtgagtgggaaaagaataattgataaatagaacacaattatatgattatagtaaaccttgacataatgatggcccgaagaaagatatctttgggcgaactggcggagaagattgatattacgcctgccaatctctctattctcaaaaccggaaaggctaaggccatccgtttctctacactggaagcaatctgtaaggaacttgattgccagccgggggatatactggagtttaaggagggataaatagggagaagaaggcgcaagtagaggttgaaatgcttaccgccttaagaaactccgtttacgtactacagtaaacacctttacatactacggtaaacgcctttacatactatggtaaacgcctttacatactatggtaaacgtcgttacttcataatgtaaaaaccgttacattctggagtaacggcttttacattatagggtaaacatccggtaaatataatctgctgattattagcttatatattgtcggtcgtaacctttagatgtctttcgctttgaaggccagcgcatacattcgcatctgctttaccatagacagcagtccgttgctacgggtgggcgacaagtgttccttcagtcctattttatcaatgaaatagaggtcggcgttcagtatctcatccggtgtgtgcccggagagtactttgataagcagtgaaatgattcctttcacaatcagtgcgtcgctttcggcctggaaaataatttttccgtccacttcgtctgcctgcagccatacgcggctctggcaaccttcaatcaggttttgttccgtcttgtatttttcgtcgagcggttcctgctcgtttcctaaatcaataagaagttggtaccggtccatccaatcgtcgaaatcattgaattcggcaattacttcatcttgtacttcgttgatacttatcatggaatttactatttacgatttactatttgattgtctatttctcattgtagatgacttcgagcaaggtctgtcccactgcgttgagagtgcccttgtcgatgatgtccatggtgtcgtctatcgtgtgccagaagtcaccgaagccggtgtcgcagttcgggtcatagttgatgatgtctacgcagggaatctgccgcaggttgtatacatacatatggtcgtctgtcacttcggtgcctttttctttggggaagaagttgccgaagcccaggcggtgggctgtgttccatatcttgttcacgtacttaccggcggttctttgagagaactgttccttgtagaaggtggcgttctttccacccaccatgtcgagcaggatgccgtagcgggcattatagccgtctacatggggtactcgtccccaatattgcgagcccaggcaccaagtgtcgttcttgtatgcaccttgatagaagtaggggatgccatagtcttcggcgtcaaagaagatgatgtcgatgcctatggctggagcctgctgctgtagttggcgggccacttcgagcaatacgcccacaccgctggctccatcgttcacacccaggatggggctgtgatgcttcgtcttgtcggcatcctggtcggcataaggacggctgtcccaatgggcacagagcagtacacgccttttgctttccggattataggcgccgataacattgcgcgctttcaggatggtgttgtcgtaagccaccaggtcggcatgctggttgtatactttggcgccgaattcttccagcttcttggcaaggaattctccgcaggctttgtgggcggcggtgttgggcacgcgcggaccaaaatccgcttgggtctgtatgtattgatatgcactgtctgcactgaactgaggcacttggacagtcgctttggtcgcatcgccctcactgtcattatcggctgcagacttgctgctgttgttgctgcatgccactatcgctacaatcagcaacagcagcaacgggatgaatgtataattccgtttcattctctttctgtattaaaacttagtttcacttctttctttccaactttcagtgttaccgcagcgccgtttatcagcggtacattcatgctgacatgtccgacgggaaaatcgaaacatatcgggtaatcgtattccttcaccaaatcggccaatgcgccatataggtcttttcccagggacttgttctcctcgtattcggtgaattgtccgatgatgaggccggaaagcttgtcgaggacacctcccagtttgagattgtacatcatgcgttccaccgcatgtgggcgttctcccacatcttcgatgaagaggatggtgccttcggcgggaatatcgtaaggagtaccacgcagcccgtagaacacagacaaattgccgccgcgcaacacaccttttccctctcccttatgatttagtttgtgccccgggcagacataactgaatgcttcggttcctcccaatgcctgcccgaatagtatatccttcagtgcttgtgtgcagaagtcgtcttccggttctactgtgagatggcgcgccatgggggcgtgcaacgacgcgaagccattctgctggaacagattatggagggcggtgatgtcactgaatccgatgagccatttgggatgctgcctgaacttggtaaaatccagtttgcctatcagatgcacggctccgtaaccgccccgactacagaatatgactttggcttcttcatcgtccatggcttcctgcaggtcctcgaggcgttgccggatatttcctgcatacgttccgttggaactccccgcgtgctttgcgaatacgacttccagcccccaggacttcaaacgtttgtaggcgcctttcaggaaagatttgtcaatcttgctggaaggggagagaacaatgacacggtcaccttcctgcagatacggagggaaaataagactacccatatatattatcaatctattttgggcaaaagtacacaattcaccacagatatcacagattaacacggatttttaacagaagagagggaggttatatatgatatataatcaacagagtaattcaaattctgttcaaatccgtgtcaatctgtgtaatctgtggtgaacatatcaaaatgatattaaacatataaaatttcaacggggcaaatgctgtatttctcgacatttttttagatatttgctaaaaatctaacgttatggaaccgatacggaactttgcccagttaacagcccacctgaaaaccttgaataagaggaaacgtattgcggtagtctgtgccaatgaccctaatacagaatatgccatatcccgtgccttggaggaggggattgcggaatttctgatgattggcgattctgccatattggaaaaatatcccactttgaagaaatatcctcaatatgtcagtaccttacatatagaagattccgatgaggctgcacgtgaggcggtgcgtatcgtacgcgagggtggagcggacatcctgatgaaaggcatcatcaataccgacaatttgctacgtgccattctggacaaggaacatggtttgttgcctaaaggaaagattctgacccatctggccgtgatgcagatacctacttacgataaactgctctttttctccgatgctgcggtcattccccgcccgacactgcaacagcgcattgaaatgatttggtatgccatccatacttgccgccatttcgggatagagcagccacgcatcgcgctgattcattgcacggagaaggttagcgccaaattcccccattcattggactatgtgaatattgtagaactggcggaagccggagagttcggcaatgtcatcatcgacggcccgctggatgtgaagacctcttgtgagaagacgagcggtaacatcaaaggcattgtatcaccgattgacggggaggcggatgtgttgatattcccaaacatcgaatcgggcaatgctttttataaggctgtatctctgttttctcatgccgatatggccgggttgctgcaaggaccctcatgtccggtggtattaccgtcgcgtagcgattccggtttgtccaaatattacagcattgccatggcttgcctgaccagcggggtgaaagaaccttgattgtaattagtaatttgtagttcgtaatttgtaaatcgtaatcaatgaaaatactggcagtaaatcccggttccacctcgacaaaaattgctgtctatgaggatgaaactccccgtctggtactcaacatccggcattcggtggaggagctttcccaatttccccgcatcatcgaccagttcgaattccgcaagcacttggtgctggaagcgctggaggccaatgacattccctttaagttcgatgccatcgtcggccgtgggggattgttgaaacccattcctggcggtgtgtatgccgtgaacgatgccatgttggacgatatgctccacgccatgcgtacccacgcctgcaacttaggttgtctgatagcccacgaacttgccgccatgctgcccggctgcccctctttcatagccgatcccggcgtggtggacgaactggacgatgtggcacgcatcaccggttcgcctctgatgcccagcatcaccatctggcacgccttgaaccagcgagccatcgcccggcgctatgctgccgagcgtagtgccctgcagcccgaagctcccgtgcattacgaagacctcaatctgattgtctgtcacttgggtggaggcgtttccgtaggagtccaccgccacggccgtgcggtggacgtgcccaatgccctcgacggtttcggtcctttttcgcccgaacgtgcaggtaccctgcccgccgggcaactgatagacctttgtcactcggggcgttacactaccgaagaactgaagaaacgtatttccggcaaggcgggacttgccgcccatttgggtactaccgacattcccgccatagagaggcgcatcgctgagggagacacccatgccgctttggtgcttgatgccatgatttaccgcattgccaaggagataggcggtgctgctgttgtgctttatggcaaggtggacgccattctgcttacgggaggtatggcacattccgagtacatcacttcgcggttgcaggagcgcgtgtctttccttgctcccgtccacgtctatcccggagaagacgaattggaagcattggtaatgaatgcgctgggagctttgcgtggagagcttccggtgcaggtttaccgataataatcatatcgcttttgttcttcatgaaagtgtcataactcaccacagattacacagattcacacagataaatatgtcagatatcaataaactaaaaaaatctgcgtgaatctgtgtaatctgtggtgagttatgacatatatggaatcccggtttacttaccgtaatcgtcgtacatcatcaacagatgtgaggagctccagctgaaatggggagctttcaggcgttcgccggtatgggttccgtagttctcgtggatgggagcaccctctttcagcccactcaggcggtcgaagacttgcagcgtatattcatctgccagccggttgtagccgtagttgcgcagtccgcggatggcaaagtaggtttggtccagccagatggggccacgccagtagccgtgcggattgtatttgggattgtcggcggcaatggtcgggaaggggatatacgtggagaactttgccgtatcttgaagcatgggcagcatgctgtccacttgcgcttgtgtggcaatccgggtccacaacggagtgtaggcttcgcagcccggctcttcgatgaatgaaccgtccttcaggcggcgatcgcagaagaagttgatgttcttgtcaaagaaatagtcggctacctggctactgtagtctggtgcgtcgaaaggtatcttcagcaggctggagaatttcttcagcagtttgcattccagtgccagataagcgttcaagtccacactctcctgatccatactccaggcatcctcgtagccttcgtttttcagcatcacggcgccgtcaaaacggatggcgttgtccatgccgctttcccaggcggcagcttccagtgttccgtcggtagcaccgtactcgcacatgccattgcggttgtggtcgcgcttctcgtaccaccatctataataggagagcagttgcggatacatctcggcaacgaaggcggtgtcacccgtatgggtaaatatttcatcgacagcccagcataccaagggaggcttgctgtcacgggcattgttctcggaggggtcggtgtagatacagtcgataatcatgccgtccggttgctggtagtcgaacatggctcggatgttgttcttggccagttcggggtcgaatttggcggttccggcactgaagcgccagctatcccatgcccaaaagccgacgaaatagcctacggcatggctcgggatgataccttcgtgaagcaatccaccgcggtgtgtccgccaattggagatgagcgtggtgacggctttcacggcgatacggtcatattcgggcttcatgtccttgcgcagtatcttggtgaggtaaccttcccaacgttcggcattggcttgcagggcgggggcgggattgttgagcaggctcggcaggttttgcaggttggcagtcatctctttttcggaagtgaagaaagagatggctacgttgacagggtagcgcggagagcggacgagggctgtatagttattgtcggtcttggccagctctacattaggagtgaaggtcacggttacggtttcgccactgggatgacgggcgatgacggagttctgttctacgctgacggtgatgtctttgccccattggctaccggagaacagcaggtcttcagccgtgtcggcttcgatgcgcagcaaggcggtcgaggcacttgtgaagttgagccgttgcgtgatgctcccgtgggtggaatgtgccgacatatagagctcgccggggtaatagcaagtggaatccggaacaaaaatctcttgtgtatctttggcaaagcttacgacggcggctgactgtgccatccactggcggcggaacatatcgaggctgaaggggccgcagaagccgttgacccattgttgccgttcgggcagcgtgaagcccatccacgagccggcgtcggtgaaccaaccatagcagcggtgcagggtgtcgggagtgtaggagatgtccagtatgtcggcgaaggcataccgtttctccgtagtgcttttcatgccgggggtgcaggctgcgatgcctgcggccaacaatgtgaagcagagtatgcgtataaatttgtatttcatatgaatgaggtatttaacggttatttgtgcgcttgttccgctgcatcatcctccggtgcgagaggggcgagcgtgaagctgtatttccattcgtgcggagtgatggtgtactcgggatgaacttgtgctccccaggtattgtcaccgcctacgcccatctgcttgtggtcgatgttgagccatatcatatctttcttctggatgcttccaccgtggcggcgctccatctgtgagggacggtattcaatgtcctccatcgggaagttccaggcgcttacgctcaacggttcctcgcccactaccagcataccttcaccggcagcattgcgcagggccacccagcgtacgtcacaatgattggccgtctcttgggcacgtacatacggatggaattgttcccacaccgtggcgttgtagaggcctatcaatgctcccgtcttgcggtcggcgtacgtctcttgcggaccacggcccaaccaggtcatcatttcatattcggcagggagtatcatgcgcatgcccagacgaggcatctcgctcaatggcttcttgccgggggtgaagtgcatggttacctgaaccttgccgtcgggagtgattgtgtagagagtctgcaaatcagcatcttgttcttccatgcggtaggtcgcagtgacagtagccgtttgtccggcttctgcaacttcgatgttctgcagtttggcatcgcgtccggcgtttctccaggtgccgcagcgtatcaggtgcccatttggaatatcattatcggtcaacgggcgccagaagttgggttgcagcccttccttaatcagattctttccgttgtagttcagctctgtcatttcaccgtttcgggtagagaaagctacctggaagttattgcctttcacggtcaatgcttcgttgttgcggtttacggtcaacgttccctccaccggctgaacggttttggctgacgggacggaaggcagttcccattgttcgatggcaacctcgtgtcctttcggtactaatggcgcttcgtgcttggtgaatgcacgaagtgtgaggaaatactccttgccgtcggcaggcagcgctttcagtggcaattctatgttggcagagtttttgggagcaatcttggggaaatccatctcaccgttctgaacggtcttgccgtcgcattccactgcccagcggagggtatatccttccaatccgatgaaatcgtgccagttggtgacctttatcttgttcggggtgaaggcaagcggttcgaagtggatgtattgcaataccttcttcacttcgtagatgtgcgggtgcggggtgcggtcggcagcaaccaggccgttggcacagaagttggagtcgttgacgacacctacaaatcccatgtcgccgccaaaagcccagatgtcgcgctggttctcgtccttgatggcaaacgtctggtccacccagtcccaaatgaaaccgccttgcagctggtcgtacttgtaaatcaagtcccagtagtcctggaagttacctacactgttacccatggcatgggcatattcgcagagaatcatggggcgggcatcacgctggttcacgtgttggcgcaacctccagatgcgtgcgtacatggggcaatagatgtcgctcttggagttgtagccacccccttcatattgtacgggacgggtggggtctatcttcttggtatagtcatacagagtttcgaagtgcttgccgtagcccgactcgttgcccatggaccaagtcacgatggcagagtagttgcggtcgcgtgcaatcatacggctcatccgctgcatgaaaggcacctcccagtcgggatagttggcaagggtctcatccttgtggaacatcatgccatggctctcgatgttggcttcgtctaccatataaagtccgaattctgtgcaaagctcgtaccacgcatagttgttcgggtagtggcagttgcgtacaccgttcaggttgaactgcttcatcagctggatgtcgtgtatcatggaccccacggtgatggtacgtcccttgtgcgggtcgtgctcgtgacggttcacccccttgaagaggacggcctggccgttaatcatctgcatgccgttcatcatttccacggtacggaagccaaaaaggtgcgtaaaggattcctgcggtttcccttgtgcatcaaaggtgctgactaccagcgtgtaggtgttcggtgtttcggcattccaggctcgtgcattcgtgaacacttgctgctgggtaaacaaagtgtctgtggcagaggttatggactttttccggtcatagataaccttgtccctgtccattaccttcacttccaccgtttctccggctttaggctgatggaggaatacatccagctttagttcgccatccttgtagttgtttatcagttccgctgtcatccggaagtccttgacgcggctctgggggcgggcgtagagataaacactccgttcgatgccgctgtatttccagtagtcctggccttccaggtaggaaccgtcgctataacggaatacttttacagctagtctgttgttgcccttcttcagcagcttggtgatgttgaagtgcgacggcaggcggctgtcctcagcataacccgccaattcgccgtttacccatacatagtaggcagactccactccttcgaaatcgaggaaaacgtccatgccttcccaacctgccgggacggtgaattcgcggatataagcgcctacggggttgtagtcggcaggcacgtagggcggattgggtgggaacggataacgggtatctgtatagatgggcgcatcgaacccttgcagctcccagcttccaggaacttctattttgctccacttgcgggtactgaatccgggcttgtggaagtctttggggcagaggtcattgttctttgagaaaaggaatttccaggtgccgtccagcgtgatgcggcgttctgttgcaggatttacgtcgaaccgtacgtcggcaggcaaggcacgttgtttcagtgcgttggcttcattcgtgaatggagtgaagtgggcgtgcatcggctctctgttcatttcgttgacttgcgggttctgccacggctcgttgtcggccagggcatcggtgcaaagcagcgaagaaaggagaaaggtataaagtttggttttcattattaataggatttagtgatataaaaatggctcttgtcagagaccggtgtctgtcaaaagagggtaaaagccctatatcgagcagaacaatgtcaccaggaacggaacgctgaaatcgaccacaaacccgtggaagatggaaaccactacaaactgctgtccggctgtccgtgtgatgatgggtagtgtggtgtccatcgtcgtggctcctccggcagagatgggggcaaggtttccgaaccatcgtaccagcaacggggcggctagcagtgtcagaatctcccggctgatattggcaagcagggcgatggtgcccagctcggctcccttgtattcggtaatgaagatgctggagagcgagtaatagccgaatcccgagcctacggccagacagtccgttatagaacggtgtgtcagaatcagactgacggctgccgaaccagccagtgttcccagtatcgtcatgatgggcaggaataccagtcgcggattgagtgaacggaagttcttcagggtctgcgggtcgttgcctacgctcaaccctacactgaacatcagcgcgcaaagcgcgtagtagctgatattggtttctgcaatatcaaaaggcagcagatggcacacaccacaaatcgtacccaatacaaaaaagcccacaatgataagacttcctttcatgccctgcctcctttccttttatacaaggctctccagagtgcccaagcagcgataacacttcccaaggtccctcccagggtgagtatcacagcttcaagacctatggtatggagccccttgatgatttgctcgttgcttccgacctcgatgccgaggataaacagcagcagccagatgagcagggtgatgatttggtggattttctttaagtcccgtttccgtaagagatagcccaacagcattcccgtgagcattagtccgatgattgtaaacatatctatgtcgttttttagtggcaaagatagtatggtctatttttgcaggtgcaaagataaagctttcaaagtaaacgaggcggcattgccggggcgaataccgcctcgatatactatttggagaaaaggattattcgtttatttcattgttggtctgaatctccatcagaggaatgggcaggaaggagtgggtagatgcactgaatccggttctgccgtcagccttcatggcttcgtccagtttgccccaacgacggaggtcgtagaagcgtgagttttccagtgtgaattccaccagacgttcatgctcaatttgcgctttaacagcagcttggtcacttccggtcatggcaggcagcttgccgtgcacgctacgtacttcgttaatcaatggaatggctttttctggatgaccttgttcattgtagacttcagccttcatcagcaatacattggcataacgcatcagtggcatgttggtacctacgtagttttgtgcgtagtcgctccaagttgaaggcatgtatttacggtaattatatcgggtggcggaattctcatcatagatgtcatcgtaattgtaccccaggatgtgcccgccttcgtagtaatacggatcatcaaacatcatggaaccataggcacgggcatcgtacatgttaccttcggcaatgcgtccttctttcagaaattcgttgtacatcatgtcgctgacacggatttcgtcccaaccggacatgctgcccggagccacccagaagtggagtacgtgcttgtggaaagtaccgtcggccgtactgttggtaaactgaagttccagaatggactctttgcaatttttgttggttccgtcgaacatgcttccgtagtcggactccagttcgtagccggtcactttgttgaaagcggcttctgccagccccaggtattcggcctttttgtcactttcttcataagcacgggtcaagtaagcccatcccaggtaagagtaggctgctcctttggttacacgtcccgcttcggaagaagggcggtcttgtggcagcatgctgcctgctttgtccagttcagtacagataaagtcccatgcttccgttctggtagacaatgctttgtgagtctgggattctccggtcagatattcattgcggataatgattttctcccagctcataatcagtttgaaatgatagtaggcacgcaggaacagagcttcgcccgtaagatggttctcgtcatcggcactcatcttctcaccgctggtctgtactttgtcaataccgtataatacgttgttggcgtagttgatgccattgtaattgttcatccagtattctttgatgctggagttctcattgttgtaggtgaatccgtacaatgcagcccattccggatagttgttgacgtcctggccttttaccatctcatcgctacggaaggtttccacaacaaacttgacttctgcaaccgtgtaagagccggtgcggttatccagctggccatataccgctgatagacctgcctctacatcggctttatctctccagtatttgtctgtagaaaagtcgggagactctgtcgtcaggaaatcatcgcatcctgccagtaaggcggcgcataagaaagaggctatatatataatttttttcattgtcttcttgtttttaatggtgattagaatgtaacttgcagacctactacaaatgagcgggtgaacgggtatacaaaggagtctacaccggtgtccagaatgcttgaagagaattcagggtcgataccggaatatttagtgatggtaaagagattctctccactgacatagaggcggcatttttcaagatacattttcttagctaaagctctggacaagctgtatcctaactgcaactggcgaaggcggacgaagttaccgttttcgaggaagcgatcggattcacgggtattttcattcgggtcacccagtacagctcttggcatacttgttcctgcgttttgcggtgtccatgcattcatggtgcttgtgaagtagtttctaccggcgtccattccttcataatacagacggtttacgttgtagagtttgtgcccccatgcactgccaaactggaaggaaaggtcaaagttcttataggaaccgctgaatgacaagttggcttccaccttgggaataccggaaccggaatataccttgtcgccggagtcgatgcttccattgccgtctacatccttgaagcggatatcaccggctttggcactcggctggagacgttcgcctgcactgtttacgtaagcagcagcttctgcatcagtctggaatatgccgtcagtctgatacagccagaagctggctaccggataacctttcagtgtttgggttacgaagtggccgtcacccttccaggcagaaccataaagtacctggttcgggtctgccttcaacatttcgttgtggatggtagaaaggttgaaaccgatattatagtcgaaaccgttgatgttgtctccatagttcaattcaagctcgaaacctttgtttaccatctttcctacgttgacagtaggattgtagatacctgcagaaggcggcatgactttttcaatcagtaagtcttccgttgtgttgtaatagtagttaaggctaccgctcaacttattgttgaaaagaccgaagtcgaaaccgatgtttttggtatcggtagtttcccaacgcaaatcgtcgtttaccagatagaggttggacatgccggcccaaggattaccaccttgtatgtagctcatccattgggtgttgctgttactcattgttggcgcataatagtagcccagtgcactctcgctacccaggcgtccccagctggcgcggaacttcaagttgctgataggggtgtttttggggaagaaatcttcctcgctgattctccatcccactgctacggaagggaaggtaccccaacggttgtttttaccgaacttggaagagccgtcggaacgtacagtcacttgcagcaagtaacggctggcgtatgaatagttgaagcgtccgaagaaagaagcgcggttgtaatcgtagaaagtacctgtgccggcaaatgtaccgccgatacctgcatcgattgtgggagatgtcgggtcgaagaatccgccgggaacctcgctggaactcagactgccgcctactacatcatattcggttttcttgccttccacgctgacagaacttttatcctgatgggcggaaatgatggagttacctaccatggcagtaacggagtgcttgccgaagtctttcatgaaggtcaatacattctcgaatgtttgcttacgatagtatgagttgtactcgtagttataaggatagaggctcggctcttgtgcattggcttcgtatttggcacgatgataacggtcgttgtagtagtaaccgtcgtacgtatagcttgttttgaatgtaagccacggggcgagcttcatggtcagaccgatattgccggtaatgtcgtagcccgtatattttctgtctttgtaatggtcgtctgccatgacattacggttggttgggaattccatcttggtaccgtctaccgacatgtcggtcagaccgtatccgtatgtctggttttcgtcgtaaacgggcaccagtggcgaaatggagtacatttctttcaaggaatactggggctgtttgctttgtgtgaccttgaagttcaagctcgcatcgaaatcaaagatatatttgtgcgcattcagtttcaggcgggcattatcctggatgtaagagttacccttaaagatacccttctcgtcggcatgcccataagaaagtgaatatttggcaacttcagaacctccgatgaggtttacataatagttctgtgcgataccggtacggagcatttcatcctgccagtttgtatcggcaccggtagggttctgtccattcttgtacgtaagataagcgggcttgtttgttcctgcattctcgtacatcatgttgtgcactttcaagtagccgtctgcattgagcatgtcgaacttcttggctaccgagttgaccgtcatatacgtattaaaggaaactttcagctctccttcctttccgttcttggtagaaacgatgactacaccattggcggccacagaaccgtaaatggcagcggcggcaccatctttcaggatttccatggattcgatatcctgcggattgatggtgttgatgtcaccaggatacccgtcgatgatgtaaagcggctcattgtcacccatagtcttgataccacggatttttacagaaatgcttgcacctgcattacctcccgatttcaaaacgcttacaccggcaattttaccttgcagtgcttcggttgcgctggtagtggcacgcttcatcaaatcttccgctttcaccgaagaaatggcaccggtcatatcactcttcttcatcgtaccgtaacctacgactacgacttcatccagcatttcagaatcatctttcaatgctattttgatgttcttctgcccgttgaggggaatttcctgggttacataacccacataagagattaccatagttgctttgggagagactgtcaacgtaaagttgccgtcaacgtcggtgatgcaaccattactggttcctttttccaggacactggcaccgataagagattctcctttggtatcggttacggtaccggttagctggatggtttgcgctaatgcacttagcggcgctagacatacaaagagtaaggcaagtagtaatactctttgcattgagaaatactgtttaattttacccatgtgtgataaagttttttaaggttaatactttgtttttcacaagggcaaaggaagcgatataattaaaaggttggctatgaactttatctataaaatatctacaaagggggttgaaagtactgttatttaatctacaatccgattgctaaatcgttgaataatagtattatattctaatatgatctatctacaagagagcttttctctttggcttcgtttttagaaactctgaaggtattcaaccaagtcttcttctgtggataagttcaaagatttgcgtaaacgataccggttcatattgattgttttgggaatggtaccggttatcatggagatttctttggttgacagattgacgcgtaatagagttgctaggtatttttcaccttgcgtcagattaggatgctttagtgcgagccggtccaggaattccttgttcttttcttctatattcagcaataagctactgtttgtcttatctccgctttgatattggctgatgaaggcattcactttcttcaggtggggaatgagtgtttggttatccattttataaccctctttaatcattccacgtatcttgtcgagtagctcattgcggcttcttaggaacacggcaaagctggtaacctcctggcggctgtcatccaaagcactctgcacgtttttcagttccatttcttgctgttgtagtttcagttcggatacttcgcgttcggagagttccagctgatagcgggtttcaatcagttgcaggtcttttctgcgtttataccatttatataagaagatactgacagccaaaccgagaataagtatgctgcccaagagccatagattgcgtttcagcagttctatttcatagatttgttcctgcatttcagtggcatgcttctggtcttgatatcttttataggagatttccagctcaatgttacgcagcttgttactgctttgtagctctttgctcaggtgctgcattttctccaggtatttataggcttgggcatagtcacctatagctgcatataccatggacgaatattcgtaattgtcgcaaatcagttcgcgggctccgatgttgtgggcatactcgtaggctttatgcaaggcttccaaggctttggagtattgcttgtcatagtaatactgtttccccatgttgttgtagttttcgccaagagaccattgggcatccagattcttgttgatggtgatggcttcctggatgaaagaaagtttctcttccgtatttccccggtacagacagaggttgttcaggttggttgcaatctctttcaggtttcgttgggcacggttgatggccagcgcacgctggaagaaacgctcggcaacggtaaattcactcatgaagtggtgcattactccacgttcgttatagcatccggccacagaggtggaatcgccgatggatttgaagatggaggttgctttgtcgttcagttcaatggctttgttgtaatcgcctagtttgctgtatacacgccccatcaaggagcagagttgtgccatttgttttttgttggtgggatggatatatttttgggtgtcataaagattcttgatacttaggtcgaagttccccaacaattgttcggcttgacagtagagaatcatagcttgtgcgcggacctcactgggctcatcttcgggaaacaaggcagaagcctgagctgcatagtaggaagcttgtttggggttgttgtacaggtatttctgtgcttggtcaatcaatttctgtgcttgctgcatgtcttgagcttgcagtggggcagctgctgacagaagacatacgagtagtagacataggtttttcttcatggcatcgtcttgtttctgcaaatttaattaattcttcttagaagtccggtttccctccaaaaagatttatctttgtgcctcaaagatagcgatatatatgttattaccttatttgaataaagatttgatagaggcaggatgcgatgaggccggtcgcggctgtctggccggtgcggtctatgccgctgctgttattctgccaacggactttaagaatgaacttttgaacgactccaagcagctgacggaaaaacaacgctataccttgcgtgaagtgattgaaaaagaggctctggcatgggcggtgggcgtcgtctctcccgaagaaattgacaaaatcaatattctcaatgcctcctttcttgccatgcaccgtgctgttgaccaactgaatgtccgtccgcaacatctgctgatagacggcaaccgctttaaaaaatatcgggacttgccgcatactaccgtagtgaaaggagacgggaagtacctttccatcgctgccgcctccattttggcaaagacctatcgtgatgactacatgaaccgccttcacgaggaatatccgtattatgactggaatcgtaacaaggggtatcccaccaagaaacatcgtgccgccattgctgagcggggtactacaccctatcatcgcttgacgtttaatctcttgggggatgggcagttgtcgctgaacttcggacaatgatgctgtttagaaccacttaatccttctgaaccatacgaatgtcactgctgataatattgctgacaaaagtatgatgaaaataaacgcgtgcggaaaactctccaggtggatgtccacattcatgccgtagaaactggctatcaacgtgggaatcatcagtgtaatgctgaggcttgtcatacgtttcatgatggcattcacattgttggagatgatggaggcgaaggcgtccatggttcccgtcagaatatcactgtagatgttcacggtattgtatgcctgcttcaactcgatgaccacgtcttccaataattccaaatccagataattggtgtcctgaaagatgtttttcagccgtcctatcatcacttcattgccacggatggaagtgttgaagtagaccagcgtcttctgcagcttcatcagttgcaggaggtcttcgttgcggatgcttttctccagctctttttcggcggtggccacgtcgttgtttatctgtttcagatacttcaggaaccagacggcagaagagtagatgattcgcagaatcaaatccagtttattgttgacgactatgttcttccggcgtgtgtgctggatgaagtccggtatcagctccgtgtggtgatagcagacagaaacgatgattccgtcattggtgataatgccgatgggcacggtgatgaacggcacgccgcgttggttgctctgcatcgggatgcggaggatggtcagcagccagttgtcttctgtttccgtacgcgggcgctcgtccacgtcggctatgtcttccaagaatgattcgggaactttcagctcttcggtaaggaatttgaaatcatcgttgtccgggcattctacgttgacccagcagttgggttgccattcggccttttcagtgaagccgttttcactgtagagatactttctcattgtttgcctcctttcaggttggaacagaggcattgcagtcaacgtctccgttcgttttattggtgaatactattgcacgttcgtgggtttgaatcgtccatatttcttgttttttattttttaagcgtggcaaaagtacataaatcatttgaaacagtacgctttaacggctgttttttgtacctttgcagcgcaaaaacaggttcctactataaagaacgtttgtatcatacaaaaagattatacaattaaattcgattaatattatgagtaagaaagcccttttaatgattcttgatggctggggcatcggcgatcaaggtaaagatgatgtgattttcaatacacctactccgtattgggacagtctgttggcagcttatccgcattccgagcttcaggcaagcggtgaaaacgttggtttgcccgacggacagatgggtaactctgaagtaggtcacctcaatatcggtgccggacgcatcgtttaccaggatttggtgaagattaaccgtgcttgtgccgatggcagcatcctgaagaacaaggaaattgtttctgctttctcatatgcaaaggaaaacggcaagaatatccactttatgggactgaccagcaacggtggcgtgcacagctcttttgaccatttgttcaaactctgcgatatttccaaggaatacggtatcgagaataccttcatccactgttttatggacggtcgtgataccgacccgaagagcggtaaatgcttcattgagcagctgactgcccattgcgagaagtctgccggcaagattgcttccatcgtgggacgtttctatgccatggaccgtgacaaacgttgggagcgtgtgaaggttgcctacgatttgttggtaaacggtgaaggcaaggttgctacggatatggtccaggctatgcaggagtcctacgacgaaggcgttacggatgaattcatcaagccgattgtgaacggtggcttcgacggtaccatcaaggaaggtgatgttgtaatcttcttcaactaccgtaacgaccgtgccaaggaattgaccgttgtcctcacccagcaagatatgcccgaacaaggcatgcaaaccattccgggcctgcagttctactgcatgactccgtatgacgccagcttcaagggtgtacatatcctttttgataaggagaatgtacagaacacattgggcgaatatcttgctgccaatggcaagacccagctgcacattgccgaaacagagaagtatgcacacgtgactttcttcttcaacggtggccgcgagactccctacgatgctgaagagcgcatcctggttccttctccgaaggttgccacttacgacttgaagcctgaaatgagtgcgtacgaggtgaaggacaagttggttgaagctatcaggacccagaagttcgatttcatcgtggtgaactacgccaatggtgatatggtgggacataccggtatctacgaagctatcgagaaggcagtgaaagccatcgacgaatgtgtgaaagacaccgttgaggctgccaaggcaaacgattatgaagtaatcatcatcgccgaccacggtaatgccgaccatgctctgaatgaggatggtactccgaatactgcccactctctgaaccccgttcctttcgtttacgttactgcaaacaaggacgccaaggttgagaacggtgtattggctgacgtagctccttctatcctgcatatcttgggtatggagcagccggccgaaatgactggtaaggatttgattaagtaaggcgtcaaagccgtaacaatatttagacgcggattatacggattccacggatgctcttaaagttgagtctgtgcaatccggataatccgcgtcttttttcaatagaacgattatgatacagattggtgatgttgtggtttctttcgatgttttgcgcgagaagttcttgtgtgacttggatgcctgccaggggatttgctgcattgagggcgatgccggtgctcccgtagagctggacgaggtggagaaactggaagaggtgcttccgctgatttgggacgagctttctcccgaagcccgtaccgtgatagaggagcaaggtgtggtctataccgattgtgaaggtgacctggtgacttctattgtaaacaacaaggattgcgtctttacctgctatgatgataaaggctgttgctattgtgccatcgaaaaggcttaccgtgagggtaggaccaacttctacaaacctatatcctgccatctctatccgataagggtggggaactacggactctataaggcagtgaactatcatcgttgggatgtctgcaaagccgctatactgttggggcaaaaggaaaatctgcccgtgtacaagtttctgaaagagccgcttatccgtaagtttggtgaggactggtatgcagagctggaattggtagtggaagagatgaaaaaacaaggaatcctatagttcttccgtgcggagacgggcctcttctttggaggagaagagggataaaggaaaagccccggtcagcaggattatcctgcccgtccggggcttcctcgttgtaagatgtgaggttggttatttattatttattaagcgtcaatatttgcatacgttgcattcttttcgatgaaatcgcggcgcgggcccacgtcttcacccatcagcatggagaagatatagtcggcttcggctgcattttcaagatgcacctgcttcagcatgcggttttccggattcatggtggtttcccacaactgttccgggttcatttcacccaaacctttgtagcgttgggtgtgtactgcgttttccgaaccgccgccgtaagtgtcgatgaacttctggcgctgctggtctgtccagcaatactctttcgccttgcctttggtgcaaaggtaaaggggaggagtggcgatgtacaagcaaccctgctggataacttgcgggaagtagcggaagaaaagcgtcataatcagcgtgtcgatgtgagaaccatcgacgtcggcatcggtcatgatgataatcttcttgtagcgcagcttgtcaatgttcgcttctttgctgtcttcaccgtccacgccgaaacggatgcccagcgcctggatgatattgtttacttcgtcgctctcgaatgccttgtgccacatggccttttccacattcagaatcttaccgcgaagcggcaggatagcttggaacgcacggttacggccttgctttgctgaaccgcctgccgagtcaccctcgacgaggaacaattcgcattcttctgggtccttgctggagcagtcggccaacttaccgggcatgccaccgccggacatcggcgatttgcgttgtacggattcgcgtgccttacgtgcggcgatacgtgcctgggcggcaagaatcaccttgtctacaatcagcttggcttccttcgggtgttcctccaagtagtaggtgagggcttcgcccacagcctggtctacggcacccatcacttcgttgttacccagctttgtcttggtctgtccttcgaactgaggctctgccaccttgatggagataacggcagttaatccttcgcggaagtcgtcgcctgcaatctctaccttggctttctccagcatcttgttgtcttcggcgtattttttcaatgtacgggtcagtgcacggcggaaacctgccaagtgggtacccccttcaatggtattgatgttgtttacgtaagagtgtacattttcgttataagaagtgttgtacatgatggctacttccaccggtgtgccttgcttctcggtgttgatgtagattacatcgttcatgaagtgttcgcgtgaggagtccacgtagcgcacaaattccttcaggccttcttccgagtagaagatttccttcttggcatttccctcttcgtcctttacgcgaaggtcggtcagtgaaatcttgatgcctgcgttcaggtaagccaactcgcgcatgcgggtggcaagaatatcatagttgtagactgtttccgtaaagatggtatcgtccggccagaactgctggcgtgtaccggtaatgtctgttgtgcccacttccttgacggagtagagcggatgtccgcaggaatattcctgctgatagatttttccgttacggaaaacctgggtagtcatgtgtgtagacaaggcgtttacgcaagatacacctacaccatgcagacctcccgataccttgtaggaacctttgtcgaacttacctccggcatgcagtacggtcattacaacttccagtgcggatttcttttccttttcgtgatagtctaccgggataccacgtccgttgtcttgtacggtgatggagttgtcctcgttaatggtgacttcgatgtggtcgcaatagccggcaagtgcctcgtcgatggagttgtccacaacctcgtacaccaggtggtgaagccctttgctgctaatgtcgccaatatacatcgcgggacgctttctcactgcttccaaaccttccagtacctggatgttttcggcagaatagctcccgttattggagtgaatctgttcttcagtcataatcttttttccttattgtaataacagagcaaatatagtgaaaatcctcgggatatggtgctaaacaaacggataaattcgggtagtttacagctttttagcacagaaaagaaacttgtgtggaagcaggtaaatagagaggtataaatgagaaaggccggactaaaaagtccagccttgtaatatcttttgtgtaacagtcaacttaaaccagcttgttgatatagatagccaattttgacttcaggttgttagccttgttcttgtggattacattagtcttagccaatttatccaacagttttgtgatacccggatacatcgctgttgctgcagctttgtctgtagtagcacgaagcttacgaacagcgtttctcatggtcttgccataatatctgttgtgaagtcttcttgtttcttcttgtctgattctcttcagtgatgatttatgatttgccatctcgactaatcttttttaattcgtttatttttttattttgtagcccgtgggggaatcgaacccccctttcaagaatgaaaatcttgcgtcctaaccgatagacgaacgggccatcctttgttgagcgtttccgctcttgcaaagagcctttatttctcgtttgcggatgcaaaggtagaaactatttttgaattaccaaaacattcgcaagaaaaaaatatagctttttgttgctttttgtcttagggtggaattttatctgctgaaaatcagtgtggtatgtgcttttatttttttacactccttaccttatttttttattcttctccttttgtttctcttctttcgggctttttttgtagctttgttatcagattgaaaccagataaagaaatcgggaatgttacagaaaacactgggaattgtgctgcataccttgaaatataaggatacatctctcattgcagacatctatacggaggtggctggcagggcttccttcatggtgtccataccccgttcgcgcaaggcggcggtgaagccggtactcttccagccgctggcattggtggaacttgaagccgatttccgtcctaatgccactatatataaggtgaaggaggcgaagtctctttatcctttcgccacgcttccctacgatccctacaaatctgccatcgctttgtttctttcggaattcctttatcgcgccgtccgggaggaggcagagaaccgtccgctgtttgcttatctgtatcattccgtcatctggctggatgaatgcagggaggggtttgccaatttccatctggtcttcctgatgcgcctttcccgttttctcggtttgtatcccaacctggaggattatcatgccggagattacttcgatttgcagaatgcttgtttcactcccttgcgtccgcagctccattccaattacatcgctcccgaggaggcggcccgcctgacacagctgatgcgcatgaattatgaaacgatgcatcttttcaccatgaaccggttggagcgtacccgctgcctgaacattatgaatgaatattatcgtctgcatctgccggatttcccggtattgaaatcacttgaggtattgaaggagctttttgattgattatcgtcggtgtaacggcccaataagtgtgcgctgcctttattataggagtagggagttttacttactgctgtaagggtcgttacgataagctgtaacggtcgttacaatatagggtaacgaccgtttcaatatagggtaaccgtcgttacatcattaggtaacggcttttacatcttatggtaaacggtcggtaaatataatgcgttgatagatagtgtataatctcttgtgggggaggatatggattggtatgtaaaaagccgtgttcaacagactttggacgctgagtccctctgttgaagcacggcttatatgataggggaagtgtatttctttatcccagcaactcttttactttggctgagatggcgcggccttcggcaagcccggcaagtttcttgctggctacacccatcaccttgcccatgtccttgccgctggtggcgccgacttcggctatgatttccttcaaggctgcctccagttcttcggcgctcatctgcttgggcagataggtttcaagcacctttacttgtgccagctcatcgtctgccaagtcctggcgaccttgctgtacatagatttcagcggcgtctttgccttgcttggtcagtttttggataatcttcaaagcatctgcatcgctcagggtatcgttggctccgggagcggttttggcttcaaggaatactttctttacgtttctcaatgtttcgagagccactttgtctttggctttcatggctgttttaatgtcttcgctgactttttcaaataaatccatattgttataggtttactcctgttcccccgaaggggaggaggatggttttacatatcgggaacggaaaaatcagaaggtgatgactccccctgcaccgccttctgcctcttgcgcggcttcggtggcgagctgcccttcctgctctgccttcatcttgatgctgttcagcgtgcttttgtcacgcagataggtcggagaattctctaccatgctgatgatgtcggcgttgtccatgtcttcgggattgaagagatagatatggcgacggcggctgcgctgggaacgggcattggcatccttgccatagtacacttcgcggcggttgcgtctctgttcctcttcctcctccagctcggcaaggcgttgctgttcttcggcggtgcgctgggtgatgcggtcgtccatttccttcatgtggatgtcctggataccgaaaccagtggcaagcagggtgattttcactttctgttccagcttgtcgtcaatggccataccgaatttggtttcgaagtcgcggctgaaacggttcatgaactccttcacctcgtccatctcgctcatcatcagcttgtattgtgcactgtaagagatgttgaggagtactttcttggagttgaagatgtcgttgttgttcagcaacggcgagtgctgcgcgttcttgatggcttcgctgacacggttgtcaccttcgccgtagccggtactcatgatggctacgccgccgtccttcagcactgttttcacgtcgttgaagtcgaggttcacctttccatgcagggtgatgatttcggcaatactcttggcggctaccgaaagggtgtcgtcggccttgtcaaacgcgtcgtctacggatagctcgctgtatatctcgctcagcttttcattgttgatgaccagcagggcatctacgtgcttgctgatttcctctacgccatccagtgcctggtctatcttcttgtcgccctcccagcggaaagggatggtgacgatgccgatggtcaggatgtccatttccttggcggtttgtgcaatgatgggtgcggcacccgtaccggtaccaccgcccattccggcagtgatgaataccatcttggtgccgtcgttcagcatattcttgatgtcttcgatgctctcttctgctgccttgcgggcacgggcagggcggtttccggctcccaggccttcttttccaagctgtaacttcacgggcacgggagagtccttcaacgcttggttgtctgtgttgcacagtacgaacgtcacgtcgtgtataccttcccggtacatatggttcacggcattgccgccacctccacctacaccgattactttaatgattttcggtgaatcggtcgggaaatcgaattgtactatatcttccataataacttaattttctggcacattatcacattattacttcatatcgtcgtccgagaagatttcgttggaaagcttgttgaaagtcttttcgaaccagctggggccttctttctttttcttcttcttttcttccttttcgcgcagctccctttctttgcgctcacgctccttgcgttctttctcttccttctcgcgctgtgccttggcggcgcgtgcggcggcttcctgctctttcagcgcttcgtcgtcaacgaatatgtcgaccggtttgggaggaacattggaggcaggctgctgcaccggcttcacctcttgcaggcagcaattctcgttgccggcagccagcaggcccagcagtgtgttgtgcatgccgtccttcttgggctcgtcgctgcgtgtgtggacggtggtctgtacgaacttggcggtctttaccttttcaatcttgctcactctatggaaggctttctcaagattcttcagattggctcctccaccggtgaatacaacaccggagaaaagtttgtcctcgtagccggaaagttgcaactggttccatacgttggcaagaatttcttctgcacgtgctccgataatattgttcagcagggccagttcaaaggtacggccgtcttccgacgtgcatacggcaggggtctcggcgtcttcttcctcctcgtagagggcatcaccgtattgcagtttcagcttctcggcatcttcctcttccatttgcagggaagtgatgtcgtgggtaatgttgtttccacccagcggcagtacgctgaggtagcgcaggatattgttcttatagaccagcacggtggtggtgtcggcaccgaagtccaccagtgcacagcctgaacgcatctcgttttcggtcagcacggctttggccaacgcagtgggagccacgagcaggtcgtcggcaatttccactttggcttgctcgaagctgtgttcgaggttcttcttcagcgaggcacgcgccacgatgttgaggaactgtccggtgatgtatcttccggcaactcctacgggctccacatgcagcgtgttgtctatcttgtattcttgcggggctacatccagcacactcatgtctaccagaggtacatcacggttctcgtcgcaaatctcgtctaccagttcttgcgaaatgatgctctcttcctccagcgtacggcttaccgcattcctcaccgtgcgcaatgattgtccgccgatgcctacatatactttggcgatggagttgttcaactggccttccagcttgttgatgatggaagtcagcgcttgtgcggccttgtcaatgttgtagatggcccctttgtgtataaacggggatgcatcttcgcgtgcataagccaacacctggatacttccgtcactgctcttctttcctgcgataccggaaatcttggaagaactcaactcgatagcggcgatgaaatctgttgttgccatatctatttatttactattttactatttacaatttactatttgctgcgctttgataaagaaggactattagtaaatccctttctctactctctctttgtgcagatgatttgattatcaaattcaacgctgatacgggagtatttgttccaacccacctggttcaatcctctttcgtagaatgcctttacacgtttcagcttcttctcgaatccggcaatcttgcctaaatagataagatggtcgccgacacggggcactaactcgatgttcttgccgggcaatacgtgaatttgctctatctgtgcattccaaaaagaattcttttgcaaaaatacaccaaacttatataaatccctcatggcaaacgacttttctacatttccggttacaacggcgaggtgtgcaacgcactttgcatcggggggcatcacggtacctttgttgtccagatagtagttttcgccgttggcgctcatcacgcgcaggatgggggtgcgctgggtcacttcgatgcagagcttgccgctcggggttttgtagcactccacctggtcgatgaggggatgcttggcaagttcgcgctccaaggtcttggtacgcacgcgttccaggtctttcccaatggggctgatgcctttcttttccagcagggtagctacttccttcttcgtgatgaagccggcatataccgtgtcttttatcaccagttccacgtcttggcacacctgcgaggtgggcttgcggttgaaagctgtgacagccactaccaggtaagcaatgacaagcaacagaacgatagaaagtagaatccttttaaccatgatatttttctgataatagttgggtgatttggggcgcatagttgtccaggtctccggctcccagcactaccaatacttcggtgtgcttttgggcgaggaggctgaggacgtcttctttcctacagatgcatttctcgatgccggggcggaggttgtcataaatcagctgactcgtcacgccgggaatcggttgctcgcgggcagggtatatctctgtcagaatcacctcgtcggatagggaaaggctgtctgcaaagtcacgatagaagtcgcgagtacgggtgtacaagtggggctggaagatgacggttatcttcttgtcttggtacaactcgcggacggacttcacgctttgggctatttcggcagggtggtgggcgtaatcgctgaggaatacaatccggtcgttcttcagcttgaagtcgaagcggcggtccactccgcggaagcttgccatgccttgcttgatttcttcgtcggtggcaccgctgagatgggcgagtgccatggcggcaacaccattctcgatgttgatactgacgggaacccccaactgaatatcgttgatgcgggtgtcaggcgccacgaagtcgatgaagatttcaccgtttccgatgcggatattctcggcatggaagtcgccttcgttgcgcgagtaggtataggtggtgacgcccggttgtacgtcggcttgcatttccagtcctttgtgcagaatcaaggcgccgcccggctggataagcgtggtgtagtggcggaagctttcgagataggcttctttggtgccgtatatatccaggtggtcggggtcggtggcagtaatgacactcatccagggcgatagccagtggaaggagcggtcgaactcatccgcttcgataacggtataagggctggtggcggaaagcagcagattcgtaccgtagttcttcgaaatgcctccgaggaaggcggtgcagcccacgtgtgactggtgcagcaggtgggcagccatggtgctggtggtagtcttgccatgcgtacctgccacgcacaggcctttactgctgcgggtgatgatgcccaatacttgggagcgcttatgtatgttgaagccgttttcacggaaataggtcagttctgcatgcccttgcggcacggcgggggtatagaccacgagcgtgcttgccttgtctttgcactcctccggaataaggtcgatatcctcttcgtagtgtatctgtgctccttccgtaatcagacgttctgtcagttcgctcgacgtacggtcgtagcccgctactgtctttcctttagagaggaaatagcgtatcagagcgctcatgccgatgccgccggcaccgacgaaataaacggagcgaatggcttcaagcctcaccccctgcccctcccccgtagggaggggagatgagttactattgcttatatttttattcatattcaaattttttcttcaaactcttcttccaaaagtatgatattataaaaagaacgatagcagtactatctattcccccctccctacgggggagggacaaggggagaggctcttcaatacctccttcgcaataattgtcgccgagtccggcaacgctagcttggcgatattcttgctcaagtcttgcagcttctcggggttagcgattgtctccaacgccaccggcagcagcttctctttcgcttccacatccttcacatagatagctgcatccttatccaccagcgccagcgcattcttggtctgatggtcttcggccacattgggtgagggaaccaggatgaccggcttgtgcagcaggcagaactcggagatggaaccggctccggcacgtgaaatcaccagatcggcagcggcataggcgtttgccatatccttaatgaagtccgtcacatacagattcggaatggcactgatatgcgggttacgtacggcttctcccgtagtggctgtaatggcttctctgacttggtcaatgtatatcttgccagtctgccagataaactgtacgtcggggtgggtacgaatgacatccagtccggcagtcaatgtctggttgatggtacgcgctccaagactgccgcccagaatgaggatagtcttcttttccgggttcaatccgaagtactttacggcgtctgcgtgcaggatggaatgtccgagcaggttctggcgcaccggattacctgtcatgattatcttttctgccgggaagaatttttccataccttcgtaggccacgcaaatcttgcatgccttctgtgccagcagcttgttggtgacaccggcgtaggaattctgttcttgtatcagcgtgggaatacccatcatgcccgccattttcagcgtaggaccactggcatagccacctacaccgacggctacttgcgggcggaactccttgatgatgctccgtgctttccactggcttcgtatcagtttcagcagtacggagaagttcttccacagatgtttacggtcgaatccggcaacgggtaagcctataatccggtaaccggcatctggaacacgctgcatttccattcttccttcggcacctacgaagagaatctccgcgtcgggacacaactcttttatggcgttagcgatggagatggccggaaagatatgtcctccggtaccgccgccgctgatgataagcctcacccccttccccgtagggagaggggtagagttacttttggttgtatagttgttcgcctctttactcatattcttgttcttttttatttttgtattattggcatgctctccattactcaattattcttttctcccctccctacgggggaggggttgggggagaggctgttattcaaactccgcatcactgttcagtacctttgctgtcggctcggcggctgtctgtgcttcgctatcggccggttgttccgggttctcggcatttccggcatctatcagcatcggcacttgcgcatcatgcatccgctgttcctccagcttggctgtatagcggctgacactcagtatcatgccgatgtaggcacagttgatgaaagtggatgtaccacccttgctgatgagtggaagcggttgtcccgtgacgggtgccagacctacggcaaccatcatgttgaacagcgcctgcgtgacgagcagcaaggctattccggtaatgaggaaagcggggaaagtgcggtcgcattttttggcgatacggcccactcgcaccaataggcagacataaaggaacacaacgactattccgcctaccagtcccagttcctcgatgatgatggcatagatgaaatcggagaatgcctggctcagaaagtcacgctgtacggagtttcccggacccttgcctacaacgttgctcgtagctacggcaatacgggcatgtgccacttgcccgtcgccgtcgatgtcgaatttggcggcaggaacttcctccttgttggtaaagtctgcaatacgggattttacagtggtgaagcggtgccccatcggtatattttccaatgtcttgtctggcgtggccagcaggaaggcgacaaagactgttacgaatgccacaatccctcctcccagtatcagcagtttcctggcagatacccgcccgatgaacatcatcaggtagaccgttccgaagagcagcattcccgtcgagtagttttccggcaggataaggccacagacaatgcaggtaataatcatgatgcgcttaaaggctttcggacttgcaccgtcttcatcctgccctttcgagaggataaaggcggtaacgatgacgacggccatcttcgctatttccgacggctggaactgaatacccatgaaggtcatccagcgggctgcgccgtttacgcggtcgccggtaatgaatcccatcagcatcacaaaagccagcagtccgatggatatcggaagcaggaataccgggaacacctgaaaccatttataggggatgttgtgtaccagtactacaatgacggcgcctaccatcaggaggatgctgtgttgcgtaatcggtccccaatggtcgccactcttgtaggtcagcgtactggcagcactgaatacctctgtgatggagatgaggcaaaggaaaaggaaaataatccaaatcactttatcgcctttgaatatgctctttaataaatccaatgcttcgcaaattaaaaattaataattaaagaattaaaagttgccgttcttgttacggaattcgtaataggactgttacggcatctgtatcttatagtgctctgacacatgctttgaactgatcgccgcggtcctcatagctcttgaagaggtcgaaggaggcacagcaaggactgagcaacacggtttcacctttctttgccagcttgaaggctgcttctacggcatcctgcatgccggtctgcacgtcggctacgggcagtcccagacggtcgaagaaggcgtgcagcttttcgttgtgcaatcccaaatagaccagggcagagcacttttcgcgtacgaggtcttcgatttccgtgtaatcgtttcctttgtctttaccgccgaggataagtacggttttgccggtcatgctttgtagggcataccagcaggaatttacgttcgtagccttggaatcgttgatgaagctcacgccgcgtacggtggctactttctccaaccggtgttccactcccttgaagtcggacaaggctttgcggatatattctttccggatgccggccaaattggccgagatgccggcggctaacgaattgtataggttgtgtgtgccgtgcagcgccagctcctcttgctccatattgaaggctatcggttcgttgatttccacttcaccgtcttccacgtatgcgatggccccgtcttccttcacggcagcgaacgggtagagatgggcgcgcaggccatgcttgtccagctcgcgcttgatgatggggtcgtcgttccagaagataaaagcgtcttccggtgtctggttttgggtgatgcggaatttggcgtccacatatttctgcatacagtggtcgtaacggtccaagtggtctggtgtgatgttcatcagtacggcaatgttggcacggaagttatacatattgtccagctggaaggaactcagctcaatgacgtagtaatcatgctgctccgtggctacctgcaaggccaggctgttgccgatgttgccggcgaggccgacgttcaggcctgcactcttgaagatgtgataaatgagcgaggtggttgtagtctttccgttcgagccggtgatacagaccatctttgcgtcagtgtaccgtcccgcaaactctatctcagagatgatgggcgtacctttttcctttaatttcataatgagcggagcgtcgttgggaataccggggcttttcactacttcgtcagcattcagaatcagctcttctgtgtggtgtccctcttcccaggcaatgccgtatttatccagcagttccttgtatttgtctttgatggcggacatgtcggagacgaacgtgtcgaatcctttcactttggccagtacggcagcgcctgcgccgctttcgccagctcctaatactacaattctactcatacttttttaattaagaatgatgaatgaagaatcgctatgcagcgagatgatgtacagctaaattcttcattcttcattcttagttcttcatttgtttgttatctaatttttaatgttataatcgttatcgctgccaatacaatcgtcacaatccagaagcggatggtgattttggattcgtggaacagcttgtccggtttggtgaatactacgctgcatcccggctctatcaggctcatggaagtgcggaagtggtcgtgtatcggtgttcttttgaagagacgttgtttcacgcctttccgcttgcctgccttgtagtagaggcgttgcaggatgaccgaaaggttctccaccaggaagataccgcaaaggatgggtatcagcagttccttgtgaataatgatggcgtatactgcgatgattcctccaatggtcagactgcccgtatcgcccatgaatacctgggccggataggcattgtaccacaagaagccgataagtgcaccgatgaaggcacagataaagattaccagttcttccgagccgggaatgtacatgatattcaggtagccggcatattcaatgtggctcgatacgtaggcgagtattcccaaggtcagtccgataatggcagagttccctgccgccattccgtccattccgtcattcaggttggctccgttgctgacggcggtaactacgaaaatcgtgataatcacaaacagtatccaacctgctgtctgggcatgttcacccatgaagcccactaggtcggcatagtcgaagttgttgctcttgaagaatgggatggtggtctgtgttgccttgatttccttggcggcatgcaccacttctatctgtccgtccggtttctctatttctatgttctcgcggataaccacctgcggactgaggtagagagtcagtccgacgataagtcccaagcctacctgaccgatgattttgaacttaccgtgcaggccttccttgtccttcttgaatatcttgatgtagtcgtcggcaaagcccagcgaccccagccagattgtggtaatcagcatcaatatcatataaatattgctcaatttgcccagtagtaggcaaggaatgagtatggcaaaaataatgatgacaccgcccatgctgggtactcccaccttgtttacgccgaacgggtcgatgctggcatcacgttgcgtttcagtaatctgcttgcgtttcagtagattgatgaacttatctccccagatactcgaaatgagcaatgccagaatgattgccatcaacgaacggaaggatgtatagccaaacatgcccgcaccggggaagtcatatttgtctaaccattgaaataaatagtataacatgatgttaattatttaattgtttaatgtgctaatgtgccaatatgctaattgatagtctggtatatctgctggtaaaggaatgaatatcctacatgacgcatggcaattagcacattggcatatcagcacattatttcatttaatatctctttgtcgtcaaaatggtgtttcacgcctttaatctcctgataattctcatgccccttgcctgcaacgagaatcacgtctcccggctgtgccagcatgcaggctgtcttgatggcttcgcggcggtcggtgatgctgatggttttctgcatgtcgtctttatccagtcccgccagcatgtcgttgatgatgtcctgcggctcttcaaagcgcgggttatcggaggtgatgatgacccggtcgctcaagcgggcggattctttggccatgatgggacgcttgcctttgtcgcggttgccgccggcgcccacaacggtaatcactttcccttttccttccagcactccgtgaatggcgttcaatacattgaccagggcgtctggagtatgcgcatagtccacaatggcggtgtagcctttcggtgaacggatggcatcgaagcggccggttaccggatgcagcgtgctgagggcaaccagtacatcctcttctttcttgccaagcaatacggcagtaccgaataccgccagcaggttgtaggcattgaactttccgatgaaacgtactgccagttcgtgattgttgaagtcgagcaacattccctcgaaatgagactccaagactttgcctttgaagtcgctaagactacgcaaagagtaggtgtataccttcgaacgggtattctgcgtcatcacaagtccgttcttgtcatccaggttggtcaggctgaaagctccttttggcagttcgtcgaagaactttttcttggctttgaggtagttctccaccgttttatgataatccagatggtcgcgggtcagattagtgaaaataccgccggcaaacttcagaccgctgatgcgcttctgggcaatggaatgggaactgacttccatgaaggcatacttgcagccggaatctgccatttctccgagcaggcggttcagggttatcgggtccggggtggtgtgttcggtcggtacgggcaggtcgtcgatgtaattgcatacagtggaaaccagtccgaccttgtagccgaaatagcggaaagtattatataataaggtggcaacggttgtttttccgttggttccggtcacgccgatgagttccatcttggatgtagggtcaccatagaaagtggtagccactttccctacggcatcttcactgtctttcacctgaatgtaggtgatgccggccttaagctcttccggcaattcttcacacaatactgcaacagcccctttatcgatggcagccggaatataggcatgcccgtcggtctgcgtaccacgcatggccatgaacagatgtccggttcctatcaggcgggaatctatattcacccccgttatctccatgcttgtatttccggtaatccggaccggctgtattgtttgcaacaaatcacttaatctcataccttattatatatagtgtatatccaaatcttgtttattctcatgttaacgtagtgtcagggctatggtttgtcctttcactatccggctaccgcttgctatggactggttcctcacccgtcctacgccgtttagccttactttcagtcctttgctctctaaaaggtagacagcatctttcgctcccatacctaccacgctgggcacggtgcccgaggccggttcccggtcctgcaggatgactgccgacggagcagcttgtgtatgtccccactgttcctttttcttttgtccagagaactgtttctgaacgggcactttcaaatcattcagtacaaggagtgcttcgttcatctctccggctttcacgggaggaatcacattggtggtactgtctatggcactgcgtatgtcaaaacgcaggtctttggcataaactctttctgctattttcccgaagacactacctgccatcagaccgcctgaagctggtaacccaggcttctggatggaaacgatgcaactgtatttgggtgcttccgaggggaaatatccgcagaaacttacaaggtagttcacccgtcccgacttatatccggcggctccttgagaaatctgtgccgtacccgtcttgcccgatacggagaactgtttgctgccggcaggttttgccaatccttgcgataccactttccgaaggatttcgcggatttgtgtcagggtatggtcggagcatatcttgggattgattacttccgtaggatattctttcactacctcaccgtcctttaccgctgctttcacaaacttggggcgtaccatgaccccgttgttggctatggcattgtagaaggtcagtatgttcataggaggtacctgagtctcgtagccgatactcatccacggcaaagtcgttttggcaaaataacgctctttaggccctttgatgttgggtttcccttcaccgggtatttgcagatgaagcggctggtcgatgctcatgcgcttcaaaccgtccacgaacttctgcggattatccttgtagtgcttgtcgatgaggtaggagacacccacattggaagaaacttccagaatacgtgtcacatctatctttccgtaacctccccggtgccagttgtggtccctcatcttgctgccgtacatattcataataccgttgcccgtgtctacctcggtatccggggttatcttgccatcttccagtgccaccataatggaggctgtcttgaaggtggagcccggttccaacatatcgctgatggcattactgttcatttcgtagtaattgccgtctccggctttcatcatgttgacaatggcctttacttctccggtagccacttccatcagtacggctaccccgacgttggcattgatttccttcaacttgtccaccagggctttttcgcagatgtcctgcatgcctacgtcgagggtggatatgatgtcacaaccgtctaccgggggaaggtctacgatattcaggtatttattcatcaccttctgacggtgggtaataccgttccgtcctttcagcagggtgtcgaaggccagttcaatgccgttacgggctcccatggctgtatcggcatagagacggcccagggtttgggctgccaaagaaccgaacggctttttacgctggttgtatatctgttcgtggaacccgcctctgtacttgttcattttgaatacgggtaaccgcttggcttccttatactgaatgtaagagatgcgccggttgcggttgggaagaatgttgtagttccggctcttcatctcccgccccttgcgcagatggcttttgaaggtggcggcactgatgtccggaaaaatctgatgaagcccgatacagatggaatcgaaattggctttccagatagaatccttgcgctgctggtcctttttgcggcgcttctcgtccctttcgccggacatgaagtccatatatattttatattccggcagcgaacttgccatcagtttgccatccgaggacaggatatttccccggttgggcttcaccgttacattctcttttacgaagcggtcggctacatcgtgccagtactgtcgctcggcaaacataatcatggcgcctttcacaacaatagctatccccaccaaccccatgagtaggacgacgaagaagtaacgggtcattatgttttttttatttacagccaatgttatttacgatttaacgatttacgatgtactattgaaattactttaatcctcaattctccattattttagtaagtacggtggattagtggaagtctgcaaatcgctttctttggtggcgatgtattcctcgatgcgcgattggcggctccgctccatcaattccgaactgcgtgtcagggcatcgtacttgatgtctatcagctcttttttaagattgtctatctctatcagttgcagttggcattcgtaacggttgttgatgtaaataatgataagcaccatgataaggaacaacaatccggcttggcggcggaagaagtctgtggccagaatgtcgcctccgatgatgttcttcagtgaggtgcgttttttcaccttttccgtattcttttcttcttgcttcttttccattgctagtcactaatcattcattattctttctgcaattctcagcttggcgctgcgcgaacgcggattgcgctctatctctttctcgtccggtacaatcactttgttgttgactagccggaacggggtcaatacgttcccgaaaaaatctttttcggccttgccttccacgttgccggttttcatgatattcttcaccatacggtcttccagggagtgataggttatcaccaccaggcggcctcccggctttagcgcttctgttgccgcatacagcatttctttcagtgcttccatttcctggtttacctcaatgcgcaatgcctggaatacttttgccagttctttcttctcgcgttcgcggccgaagagtggcttgacgatttccagaaattcgccgatggtggcaattctctgcgtagcccgtgccttaacgatgacagatgccagtttccggctgttcttcagttcgccgtacagataaaaaatatcggccagcttttcttcttcgtaggtattcacgatgtcggcagcggtcaggccggcacgcttgttcatacgcatatccagtgccccgtcgaagcggaaggagaatccccgttcgctgtcatcaaagtgatgggaagatacgccgaggtcggcaagtatggcatccactttttcgatgccgtgatagcgtaggaagttgtgcaggtagcggaagttgctgcgtacgaatgtaaaatgcgggttgttcacaatgttacgttccgcatcctcgtcctggtcgaagctcagcagccggccgccgtcttccaggcgggacagtatctcgcgcgaatgtcctcctccaccaaacgttacgtctacatacgtgccgtccggacggatgttcattgcatctacgctcggcatcagcaatacggggatgtgatatgttgtttcttctttcatcatctgttgtttatagcttattttcgtcacaacaaatattttcgtctcccagcagttcttcaagagcctcgctgaactcgtcggggttcatgaatggttggtcggcacgttccttagcccagatttctattgtgttgtccacaccaatgaagcggacatcactttgtatacccgccatttgcaggtaacgttttgggagcaggatgcgtccgttcccgtcaggggtcataacttccgcgtcacttacgaactggcggaaaatcatttgttgtttggcgttccatttattcagccggcagcgaagttggttttgagtggcaaaccatacactttccgggtagagcaccaggcaatcctgatacacgtccttacgcaacacgagtctttcttcagaagcggcttgcagctgtttccggaaggtggccgggatgaaaactcttccttttgcatccgccttagcctcgatattacctaaaaattgtatcatttctcaccttattataataagcgacggtaaaaatacacatttccccacaattccccacaatcttttaactaaaatcttaggaagaagttttcaacaccttgttgatagcttattcatttgataatgaagctgcttttgaaacgctttgctggtgggggattcgtgtagtctcttttgaaaagattcggttgaggatgacggtctttggtttgaaagtcgcttgttggtggaatggtgtcttgggtgggaaacttctttcccagctttgcggatatctaaaccaagacttggtttctctatccccaggcttggtttggaaaaaccaaagtttgggataaagctctttcttaactctttcttgttttagtattaacttctgaaactttttttgttaacttcccgtctattttgtgaacgttactacttaccggaagatgatgggagggaggagtgataatattccccctggagtggttgattattacattcatccacagaatccagggggataaatgtttttttactgtatgctgttcagcaagtctagcttgccctcgttcaccagttttagaatgagttcgccaaacaatgtgttttgccatgcaaaccaggcgcgggtgaacttggcgggattgtctttgtggaaagactcgtgcataaagccggttccggcttctgtatccatcaacatcttcacgcaagttttaatctcttcatcgttctggcttgtgaaggctttcatcatgatgctcatcggccaaatcatgtcgtagccgatgtgcggacctccaatgccttcgcctgccgtacctttgaagaagtatgggttatcctcgctccatacgaaacgacgggtgttctggtaaataggatcgttgatgtccacatcgcccagatagggcagtgcgataaggctcggtacattggcgtcgtccatcagaaggtggttgccgaaaccgtctacctcgaaggcatagatggtgccgtatttgggatggttgtaggtagcgtattttcgtagggcggtttctacttctccggccaggtcggtacattcttttgcaagctccgggcggttattgacttcagtcagaatctcggctgccttacgcagcgaagatacggcgaagaagttggagggtatcaggaattggaaggtggtggcgtcatcggaagggcggaaagaagatgcaatcagtccgaccggtttcaccggattgccccagccgtcgttggtcatcgtgtccagtgcgcgttcagttacccgctggaaatggtaggaaccgcgtccgtcacggcgctgttggtcgcggaaggtggtcaggatgttttggattgcttttatccactcggcatcgaagatgcttgtatcaccggtcgttttccagtaatggtaggcaaggcgtagcggataacacagtgaatcgatttctcatttacgctcgtgcacctcgtcgttcatgtcggtaaggtcggttttccagtgtccgtcggggatggggccgtcgttgaaggcgttggcaaacgggtctacattaatcagcttgaattggcggttgatgactcctgcaagcatcgtcttcagttccttgtcttcattggccagctgtacgtagggccacacctgcgcacctgagtcgcggagccacatggcatggatatctccggtgtagacaaatgtgtcgggcttcccgtctttcttgtccttgcggaaatggacggtggtgtccagcgtgttgggaaagcagttagtgaacatccatgacagcttctgatttttcagcagctgctgtatccgttgaatttgttcttctacggctttggaacggaacagtcgttttgattctaccggtcggttgtctttcttgatagcgtcggaggcgcatacgtggttactcatggccggctgtacggcaaaaacggcaggagtagccattgtcattgctgcaaatgtgcaggctgtaatgattgtctgtttcttcatgttgtttattaattactcggtttttctttaggtatcttggtttgtgtcccatgattgcccaaagataagcatatttacttttttatccggccaattaataaacaattcttaggttgccgtattctcttatctgaaatctttcagttcctgttgcagtttctggcgggtaaagaagatgcggctctttactgttccaagtgggaggttcagcttttctgcgatttcacggtacttgaaaccggagacatgcatggagaaaggtatcttgtactcacgtggcaaggcattgacaatgcggtgcatttccttcaggtcgtagacgccttctgtgctgtcgagtgtgaggtcgtgcggcgtgttcagatgatagagattgtctgtggtatctacaaatgtctggtcacgtaccactttacggtaattgttgatgaaaatattacgcatgatggtatatatccatcctttaaagttggtatcaggtgtgtacttctcttcattgtccagagctttcagggatgtctcttgaagcaggtcgttggcctcttcgcggtcggaggttaatttatatgcaaagcgtaataagtcgttttgaactccgagtaggtcttgggtaaatgttctattattcataatggatgtttttttaattattgttcgttttattgatgatgcaaagctacggatgatttctctttttgatagacggaaatcaaactctctttggggtaaaatctaacaattggcagttttcgggtggctttggttagctttcagtgcctcggataggtggaaaagtgggatgtagccagagattgctatcctgatttttgtaaataatattgtcgcaaagcgtaacggcttgaatgagtttgtgtacgaaatacaaggggcgagaccatgaaaggcagacgcgggattgtcccggcctgcctttctctcttttgatacaactaaaatctgtactcttcttaatttatggaaatcactggttttatatgctgagtgcttaaacaaaatccttcaagtcttgttgtagtttttggcgggtgaagtaaatgcggctctttaccgtgcctaagggcaaccctagcttctctgcaatttcgcggtatttgaagccggagacatgcatggagaagggaatcttgtactcccgtggaagggcgttgacaatgcggtgcatctctttcaggtcatatgcgctttctgtgctttcaaaagcggcgtcgcgcggcaggttcaggtgatagagattgtccgtggtatccacgaaagtctggtcacgcaccactttgcggtaattgttgatgaagatattgcgcatgatggtgtatatccatcctttgaaattagtatcgggcgtatacttctcttcgttatccagagctttcagggatgtttcctgcaagaggtcgttggcttcttcacggtcggaagtaagtttgtatgcaaaacgcaataaatcgtcttgaactccgagcaggtcttttttaaatgttatattgttcatatgtgctatgttttttttcgttaatcttgatattgcaagtttacggaagttttctctttcaggcagacggatttcaaacacactttaggggaaaaactatcaattgacagtttttaggtgctatttgatagatttcgggtgcagttttctgtcatttttttgcgattaattaaaaagatgagttaattttgcgcattcatttcatcaaaagaagaatggctgacgactctttatttttgattgacatagacaagatacttcgggaaaaggctccgaagaagtctaagtatatccccaagttcgtggtttcttatttgaagcatatcgttcatcaagaggaattgaatgtctttttgcgggagtcgaaagataaagtcggtgtggattttctgaaagcttgtctggagttccttgatgccgatattgtggtaaagggggaggagaatctgcctaaagaagggctttatacttttgtatccaaccatcccctgggtgggcaggacggagtggcgttgggttatgtcctgggctccttttatggcggcaaggtgaaatatatggtcaacgacctgctgatgaacctgcacggactggcaccgctctgtatccccatcaacaagacgggaaagcaggccaaagacttcccgagaatggtggaggcgggatttgcttcggacaatcagctcatcatgtttcccgcaggtctttgttcacgtaggcagaatggggtcatccgtgacttggattggaaaaagacctttatcgtgaagagtgtcgaagcccaccgtgatgtagttcccatccacttcgaggggcggaactccaacttcttttataatcttgccaatttttgtaagatgttgggcatcaagttcaatatcgccatgctttacctggcagatgaaatgctgaagaatcgccataaaacatttaccatcaccatagggaagcctatcccctggcaaactttcgacaaatcgaaaagcccggccggatgggcgcaatatgtgaaggatattgtatataaattgtagagagaccgtatttatataaaagaagaactactaacagagaaatatggaagatgtaattgcaccgataagcaaggagctgttgaaagcggagttgactgaggagaagcgcctgcgcatgaccaatagaagtcataaccagatatatatcattactgcccaagactctccgaataccatgaaggagatcggccgtttgcgcgagattgcgttccgcgctgcgggaggaggaacgggcaagtctatggatattgacgaatatgacatcatggacaatccgtacaagcagttgattgtctggaatccggaagctgaagaaattttgggtggataccgttatatcttaggtacggatgtgcgttttgacgaacatggtgcccctattctggcaactgcccatatgtttaacttttcggataaatttttgaaggactatcttcctacgaccattgagttgggacgttcgttcgttacgttggagtatcagtctacgcgtgctgacagcaaggggctgttcgcgttggataatctgtgggatggtttgggcgcactgaccgtagtcatgcccaatgtgaagtatttcttcggaaaggtgactatgtatcccagctatcatcgtcagagccgtgataagattctttatttccttcggaaacattttgcggataaggacaacctgattactccgatgaaaccgttgcttctggagtcggacgagaatgaattggatgctctattctgtaaagactcttttaaggaagactataagattttgaattgtgaaatccgtaaggcggggtacaatattcccccgttggtgaatgcctatatgagtcttagccctaccatgcgtatgttcggtacagccatcaattacggttttggagatgtggaggaaacgggtatcctgattgccgtggacgagattttggcagaaaagcgcatccgccacatcgagtcgttcatagcgagcgaaccggaggcgtgcaagcttacgtcgggagcaaataaggttgtatcataggactatccggaggaatgtttgtcgtctgttataccgctggcaagctattcccgtttattttcctatataaatcgagtgcaaatacatccgtcattccggagatgtaatccaataccgcctgtattctttcgtagagtgcaggcgcttttatgttgtactggcccgatacgcgattgatgagcagttgcgaatatgccttttccggagaacgcacggcgtcaatcatcagttcgagcagggtactgatgatgcggaaaccggcaagttcaatgtccagtacatcgcgtgaacggtaaatcctcttcagggagatgtctgcacagtgcttgtaggcattggctggtacctcggatatatggttgatgaggcttccttcaaattctcctttcagaatcttttcttcattgtctacaaaggcttgcacgcattcgccgataagcagtccgataacgctggaacgcagataggctatttgttcattggtgtcacttactatctccatcgttttgagccggtgtgcttggcgctctttcgagaaataagaaagaagcaactctttggtttcttgtgtagtcagaattttcagtttgtgagcatcctcaatatccatcatctggtagcagatgtcatcggcggcttccaccagatagaccagcgggtggcgggcatatttcaacggggcatcgttctgcttctccatacccaactcttctgctatgcggcgaaaactttcttcctctgtgatgaagaaaccgaattttgactttttgcctgcaagactcgatgaaaagggatatttcacgatgcttgccaaggtggagtaggtgagtacaaatcctccctgtcgccttccctcaaactggtgggtaagcaggcggaacgcatttgcattcccttcaaagtgggtaaggtcctcccattgggaaggtgtcagttggcccttcagggacattccttttccttcagaaaaaaaggtggaaatagctcgttctcccgaatgtccgaaaggaggatttcccaagtcgtgtgccaggcaggcggccgaaactatggagcctatttcggtgaggtagctgccttgcagttccgggtggcgggcaatgagaactttcgatacatcgttgcctaatgagcggcctacgcatgatacttccaagctgtgtgtcaatcggttgtggacaaatacactaccgggaagagggaatacctgggttttgttctgcagacggcggaagagggcagagaagacaaggcggtcatagtcacgttggaattccgagcggttttcatggcgttcctggtgaaactcttccagtccgaagcgtttggcagatatgagcgtattccaattcatcatgatgttatttgagatttgacgatttactatttacgattgaagttactattatttaactgcaaatgtatcactattttgtataaaaagccgtattttcgcccaagtttatagtaaaaggaagatgaattgcgaaacttgaattactcgaattgtaagaatagaagtagccccaatcgtaaatagtaaatcgtcaaatcgtaaataacatcatgttgaacgtacaaatcatcaataaatcaaagcatccgcttccggcttatgccactgagctgtctgcaggaatggatatccgtgcaaaccttaatgaacctatttcgctggctccgatgcagcggtgtctggtgcctactggcctttatatcgctcttccggaaggatttgaggcgcaagtgcgtccgcgtagcggattggccattaagaaggggattaccgtgctgaactcccctggaacgattgatgccgattaccgtggtgaagtttgtattattctcgtcaacctttctgcagaaaccttcgtcatcgaagatggggagaggattgcacaaatggtgatagcgcgtcacgaacaagctctttggcaggaagtggaagtgctggatgagacggagcgcggtgccggtggcttcgggcatacgggtaaaaaatgaatggatattgttccgttttacgggttaagaatttataattaaatagatgagaatcagagtaaaaataatacttgcgttgttgataggtaccttctgctttactacgtacggagtgcaggctgccaatgttcaagcttctaaggagaaaatgagcgggtacggtcggtctgaaaaggcacggaaggaattgaagaaacggaagaagtcgaagaaagccgacgtttcgcccgtaaaggagcttacccccgaacagcagcgccgttacgactacttctttcttgaagccgcccgtctgaaagtccagaaagactatgatgcggctttcgatgtcctgcaacattgcctgacgataaacccgaacgcatcatcggctttgtatgagatggcccagtattatatgtacctcaagcaggtgccgttgggacaagccgcgttggaaaaggcggtggagaatgctccccataattactggtatgcccagggacttgccaatctgtatatgcagcaaaacgaaacggagaaagccgctgccttgttggaaaatatggcggtacgtttctcggataagctggacccgctatacaacttgctggagatttacaaccgccaggaagagtatgacaaagttatcggtatactgaacaagctcgaggaacggatgggcaagaatgaacagctcagtatggagaagttccgcatctatctgcaaaagaaggacgacaagagcgcctttcatgaaatagaaagtctggtagaagagtatcccaacgatatgcgctatcaagtagtgctgggggatgtctatatgcagaacgggaaaaagcaggaagcttatgagatttacaagaaggtgctggccgaagagccggacaatgcaatggccatgtactcattggcttcttactacgaagagaccggacagaaggggctgtatgaacagcaattggacacgctgttgctgaacaagaaagtggcttcggacaccaaactgaatgtgatgcggcagttcatcgtgcagaacgagcaggcaggcaaggacagcacacgtgtcattacgctcttcaaccgtatcatggagcaggagcccgatgaggcgcaattacctttgctgtatgcccaatatcttctttccaaaggaatgaacaaggaggctggaccggttctgcgccaggttctggcgatagaccctaccaacacagcggctcgtatgacattgctgggggaagctgtgcgccaggaggattacaaggaaataatgaatttgtgcgaagccggtgtggagtccaatcccgatatgttggagttctatttctatctggccattgcctacaaccaggcggaacggacggatgatgcccttgccatctgtcaaaaggctttgtcgcacgtcaaggacgacagcaagaaggaggtcgtatcagatttttatgccattatcggtgatgcttatcacaccaagaatctgcatgcggaagcttatgcggcttatgattccgctttggtgtacaatccttcaaacatcggtgccttgaataactacgcatattatctttccgtggagcgccgcgacttggacaaggcggaagagatgagctacaagacagtgaaagccgagccgaacaattccacctatctcgatacatatgcatggatattgtttgttaaaggtaattatgccgaggcgcgtctctacatagatgaggcgataaagaatgataaagatagcagtgacgtggtcttggaacattgcggagatatctattacatgactggcgatgcggaaggtgccttgaaatactggaaacaagcctgggataagggcaatcgctctgatacgttgaaacagaaaatacaaaaaaagaaatatatatcagatgaaactaaacctgctgaatgatatggcaaggacgtgccgcctattgtccttgctgttgttgctggctgtggggcttgccggttgcaagacttcgcgtcactcaagttctctgtccggagaatctgcctgcctttcctccaaagtgcagctgacggtaccccataaagatgccacccttactgtgaacggtacgatgaagttgaagaaggaagaatgcatgcagatttcctttctgatgccgatacttcgtacggaggtggcacgtatggaagtcaccccggatgagattctgttggtagaccgtatgggaaaacgttatgtccgtgcaacacgtaaggaactgaaggatgtgctgcccaagaaggcggattttgcccatttggagaaactgctttatgctgcttccaaacccaatggcaagaaggtgcttaccggcaaggaactcgggataccctctctggaaaagggaaagattgaactttccaacttctcggataagccttttgcactgactcctacccagctctcacagaaatataaagaggtggagctggaagaactgctggaaatgctgatggacctttgattagttgataattgtcagataatccctcataacttataactcataacttatgaagcttctccttctcttctttctcctccttttgccggtttctccgctccttgcccagtccaacaagctgattaaggaactggaaagcaagcgtggtgccttgcagaaacagatagcagagtcggaaacgctgttgataaccaccaagaaggatgtgggaagccagttgaacggtcttgctgcactgaccggacagatagaagagcgcaaacgctatattctgactatcaataatgatgtggaatccatagagcgcgagttgtcttcattagaacgtcagttgacccgcctgcaacgtgacctaagggacaagaagaagaaatacgaatcgtccgttcaatatttgtataagaaccgctccattgaagagaagctgatgttcattttctctgccaagagcctggcacagacctatcgacgcatgcgctatgtacgtgaatatgctacttatcagcgcctgcaaggcgaggaagtgttgaaaaagcaggagcaggtgaaccgtaagaagactgagcttcagcaagtgaaggttgccaaggaaggattgttgaaagaacgtgaagaggagaaagtcaagctggaagcgcaggagaaggaacaaaagttgttggtagccaatctgaaaaagaaacagcggggattgcagaacgaactgaataagaaacgccgtgaagccaatcagctcaatgcacgcattgaccgtctgatagcggaagaaatagagaaagcgcgtaagcgtgcggcagaagaagcgcgccgtgaggcagccgcacgtaaaaaggctggtgagaaaaccgaaaaaacggcaactgcctctacgcccgcaaagccgaaggcacagcctttggaaacttactccatgagtaaggcagaccgtgaattatcagggaactttgctaataatcgcggtaagttgccgatgcccatcaccggagcgtatatcattaccagccattacggccagtattctgtggaaggtttgcgcaatgtcaagctggacaataagggcattgatatacaagggaaaccgggtgcccaagcccgtgccatcttcaatggtaaagtggcggctgtctttaaactgaacggactgttcaatatccttgtccgtcacgggaattatatatcagtctattgcaacttgtcatcggcctcggtgaagcagggcgatgatgttgccaccaaacagactctcggacaaatcttctcggatggggccgacaatggtcgtacggtgctacacttccaattgaggaaagagaaggaaaaactgaatccggagccgtggctgaacagataatgataatttaaatttttactccttccagcagctccagatacatccctatcgcctcctctatctccttgacaaagataaattcatcggcagtgtgtgaacgggcacttttccccggtcccatcttcagagaagggaatggcatcagtgcctggtcggacaaggtcggtgagccgaaaggagtacgtttcatggtaatagccttttgcactaccggatgctccggagctacgtgtgaagagcttagccggaaggagcgggctttggcttcacacgtgatgtgtttctgtatttcatcgaatagctcctgattgctataacactcgttgctgcgaatgtctacgacaaaagtacaacggtcgggaatgacgttatgctgtgtaccggcgtttaccatggttacgctcatcttcacgggacccagcagggaagattcttttgggaaacggtaatcacgaaaccaggcaatatcatccaataccttatatatagcattatctccctcgtttcgggcagcatgtcccgattttccggtagcagttacgtccagcaccatcaatcctttttctgcaatggcaggttgcatctctgtcggctcgcctacaatggcaaactgtatgggagggagttccggcaatacgcattctattccccccttgcctgatacttcctcctcacacgaggcaagatatatcagattgtaggcctgagtggtgcggcacaatgtcaggaatacttgcagcaggctgactacactggctccggcatcgttgctgcccagcccgtagagctttccattactttccagcgttggtttgaaaggatctttccgccacccgttgacgggttttacggtgtcgatatgggaattcagcagcaaggtcggtttctttaagtcgaacatcgggctgaggcaccatacattgttgcctttacgtcctgttgccatgccttgcatttcgatatagttctgcagataatctgccgccttctcctcgtcgcggctcaaggaaggaatggctatcagtgatttgagcaatccgattgcttcggaagttaaagtcggtatatcgtaaatcatattcggtaaataaataatctggccgcaaacttacggataaaaaatgaaaaggacgccaaaccgacgtcctttctgttttttcaatattgtttagaagaagcaactgagtgatatcatcaagttgcggtttttgttgcctgaatctttaatgttctctaccagtccccagtcataaccgatggaaatctgatatttctgactgaattcgactccggcttttaatccgagaccgaaatcaaaacgcttcatggcatcatccccgaatacattggtggagttatcatcaaactcatattcgtcaagaatatctccttctgccttggctttgccaaaaagaccgatggctaaataaggaccggcattgccgaatatggcaaagttctcattcactgcatatttatagccaatgtgtacaggaatttccaggtagtagggattgaacttgatagaagcagcagagcctccgtctattttggctcctttcagcgtaagtaatgcacccatatcgaggtagactccttctgaaatttgaggcaatcctacttcagcctttaccccagcatgaaagcctattttactgtcgaaaccggtaatggagaagttactggagttcatgccgactgttgctccccatctgaggttgtcttgagcattgatgcttgctaaacctatggtcagcatagccattaaaagcaatacttttttcatgttcattgaatttgatttagtttgtatatcaccacaaatatatagatatttaatatgtttctattgttttaatggtaaagaaagtatcttttgtggataatttgctaacggatggtcggatactttaaaggtaaagtttgaataattacccgctaatatcaaattagtttcaaatgaaaccactacctttgtaccgtatttaccaatatcaaaagttatgacttatcatcatttatctgtcctggtgcatcgccaggcagagaagtatggagacaaaatagccctgaaatacagggactatgaaactgcacaatggatacccatctcttggaaagagttctcacagactgtacgccggactgccaatgcaatggtggctttgggaatagagccacaagagaatatcggtatcttctcgcagaataaacccgaatgtctctttactgatttcggtgcattcgccaaccgggcggtgactatacctttgtatgctaccagctcaccggcccaggcacagtatatcatcaacgatgcacagatacgttatctgtttgtaggcgagcagttccagtacgatgccgctttcagcgtgttcggattttgccagtctctgcagcagctcatcatcttcgaccgtgctgtggtgaaagatccgcgcgacatgacttccatctattttgatgaatttatggcaatggatgaagagttgcagcacaatgccattgtagaagaacgtacagcagctgcctcagatgatgacctcgccaatatcctttatacttccggtactaccggtgagccgaaaggtgtcatgctccatcatttcaattatagagaggctttccgcattcatgatatccgattgcctttcatgacagaccaggatgtttccatgaacttccttccgctgacccatgtattcgaaaaggcatggacctacctttgtatacatcggggagtgcaggtctgcatcaatctccgtccacaagatatccaaactactattaaagagatacgccctacactgatgtgcagtgtaccccgtttttgggagaaagtctatgccggtgtgcaggagaagatttcccaggaaaccggtctgcgtaaggcgatgatgttggatgccatcaaggtgggcaggacgcataacattgattatttgcgccaaggaaagactcctccgatgatgcttcatctgaaatacaagttctacgaaaagaccatttatgctctgctgaagaagacgataggtattgagaacggtaatttctttcctacggcaggtgctgctgtgcccgatgaaatctgcgagtttgtgcattctgtaggtataaacatggtggtgggctatggtctgacggaatctacggctaccgtttcctgcttcctcaacgaaggctatgagattggttccgtaggtacggtgatgcctgatgtggaggtgaagattggcgagaacaacgagatacttcttcgtggtaagactatcactaccggctactacaagaaaccggaggcaacggctgctgccatcgaccgtgacggttggttccacacgggtgatgccggttatttgaaggatagccatctgtatctgacggagcgtatcaaagacttgttcaagacctccaacggaaaatacatttcgccgcaggcattggaaacgaagctggctattgaccgttacattgaccagattgctgtcattgccgatgagcgtaagtttgtttccgctttgatagttcccgtttatggctttgtgaaggattatgccaaggagaaaggcattgcatacaacaatatggatgagttactgcaacattccaagatacaagcgttgttccgtgcccgtatcgataccttgcagcaacagttcgcccattacgagcaagtgaagcgcttcacgcttctgccggaaccattcagtatggagcgtggggaactgacgaatacgctgaagctgaaacgttctgttgtggcaaagaactacaaggagctgattgataagatgtacgaagaataaaactttgtttttttgtttataaccgtccgacctggggtgaatctttttcattccgggccggacggtctgttttttatctccttcttctgaacagaaagaaactaccccctgcactgcgagaaactaatcatctgtatactgctgactggcagtttttatgcttcttattattcttacaacagctgttgtaagaaaagaacacagctgttataagaaaagaatacagctgttgtaagaaactaacatgactgtgataagaataatgagatgcgagaaaatagttagtttgtcgcagtggagaggttaatttgtcgcggtgccgggggagagttctcttgtagataatgaaagcctcactcttaggcgagggagagaagggtgatgccgtaatctgcttaaaaccatgcaataaagcaccggttctgccagcagcttttcttcattaacttttattagcaaataaatcatccttttccgatagggttgcggttgtgcccccggttttatatacgagagcttgaaagaaatctgcagaataaagacatttggataagcttaaatattaaccgtaacatactaatagcctatgaagcatacaaagaagaaatgagaggaacagccaatcaaactggccgatcgggataacagatttccgagaatctgtttattaacttaacacatatttaatctaatatttattttccgaaaaacagcttatgaaaaaaagaattatgctgaccttggtttgcctgctggcagccatcggttgggtagcagcccaaaattcccccattaccggtatcgttatttcagctgaggacaatgaaccgattatcggagcttccgtattggtaaaaggaagcactaccggagccgtaacagacttagacggcaaattcactattacagatgcgcccgcaggtgcgaaaatcctgcaagtgtctttcgtaggtatgataacacaagaagttcccatcactccggggacgataagagtcacattaaagaatgatgccaagctgctggatgaagtggtggtaacggcattgggtatcgcaaagaaagaaaaatcactgacgtactctacccaggtggtaaacggtgatgaactggcacgtgtgaaagaccccaatatgatgaatgcattggccggtaagacggcaggtgtgcagattaataagagttcttccggtttgggaggttcttccaaagtgattatccgtggtaaccgttcggtaagcggaagtaaccagccgttgtatgtaatagacggtgtaccgttcggttcatctaccaacgaaaatacctcaactactatcggcggagacaacgacagtggtaactacgaccgtggcgacggtatttccaatctgaatcccgatgatattgagagcatgaacatattgaaaggccctgccgctgctgcactttacggtagttcggctgccaatggtgtggtgattattaccactaagaagggcaaggaaggacgcgccagtatcagtttcaataccagcaccactttcgatatagctgcatacggtattcccgaattccagaatcactatacgggtgtgtcaaccagttggggcagtgatatcaaaggtagtcccgactatacagacgatttcttcaaaacaggtgtcactactatcaactcgctctcgttgagcatgggttcgcaagctatgcaaacttacttttcctatgctaatacttacggcaagggcgtggtggaaggtaatagcttggtgaagcataatttcaattttcgcgaaactgccaacttcctcaataacaaactgactgttgatgccaatatcaatgcgatgtatcaaagggggaacaaccgtactacttcgggaggttattacatgaatcctttggtaggtctttatcacttcccgcgtggtggtgttgaaggtggaaaggactttaactactacaaagataattatcagattcttaatgccggtcgtaacataatggaccagaactggtataaatctcaaggtactgatatggagcagaatccctattggttgattaataaggttccgaatgaggatacccgttatcgtacattgttgaatctgagtgtgaagtataagttcaatgacctgttcagtatacaggctcgtggtagtgccgactatgttgtagacaagaacaatacacgtatgtatgcaggtaccagcccggtgttgtgtggtatgaatccggctggaacaggaactaacggtcgttacatctacggtgaatcaagtagcctttcttcttatggggatgttttgtttacttatcaacagcaattcactaacttcagtgtcaatgcttcggtaggtgccagcatcaacgattatacaggaaacggtacaggtttcgattcctatccgggtatactctctgtgcccaacgtattcactatgcagaactgctccttgaacaagggctcattgaccgattggaaaacccatactcaaagccagagtgtgttcttcaccggtcaggtaggcttcaaagatcagatttatgtggacgtgacagcacgtaacgactggacttcaacattggcatttaccaaatacaaaaacaaaggctttttctatccgtcagtaggtgtgacatggttgctgaacgaaacattgaaattaccttcttggattgatttaggtaagattcgcggtgcatggtcaaaggtgggtaacggtttgaatacttatacttcaaatcctctcaactccattacaaagagtggtagcatcaatttcaacagtacagctccgtttgcagaactgaaaccggaaatgactacttccattgagtttggtactgagtggcgctttttcaatagccgcttggagttcgacttcacttattataagactaatacaaagaatcaactctttacgttggatgctccgtcaggttcacaatacgcccgatattacatcaatgccggtgatattcagaataccggtgtcgaagttatgttgaatggaactcctgtcatgactaaggatttccgctggaaaaccggtgttaactttgcaaccaataagaacgaagcaaaggcactggctggtgatgactttggttattttacatttagcggtggcgaaagtaacaatgtatggagtcgtttagaagtaggtggttcgtttggtgacatttacggtactacttttgtacgtgacgaaaaaggcaatattcagtatgaacctgcaaaagaaggacaaaaagatagtgatagacttccattggtggacaagacaaatccggtgaaactgggtaattctactcctgattttaacttggggtggagcaatacaatcacgtggaaggacttctctctttacttcttgattgatggacgttttggaggtgaagtgatgtctttgacggaagccgacctcgatcagcagggagtaagcaaggcaacgggtgatgctcgtgaccgtggttacgtgatgctggaaggccgtcaaattacagatgtggaaggcttctataatcaggttggtggccgtgcgggtgtgaccgagcattatatgtacagtgctaccaacatacgtttgcgcgaactttccattggctatagtctgcctcaggcttggttggcaaagactggtgtcattaagaacgcacaggtttcacttgtaggccgcaacctgttcttcttcaagaacaatgctccatatgatcctgatggcatgctttctaccagcaaccgtctgcaaggagttgatgtgtttggtatgcctaccaaccgttcgattgggttcaacttgaaagttaatttttaaacagtagatatgattatgaaaaatatatttagacttacagctgtagcgctgctggcagctaccttattctcggcatgtacgggagcgttcgaggatatgaacactaatccgaagggagtgagcgatgaagaactaaaacaagataacaactacattggtatgcacttcattcccatgatgcagtctatctattataataaaaatgcaggtgtcaatgtatgggaatatcagcttattcaaaatttgaatgccgatttgtggtcaggctatatcagtacggctactgcatttgccggcaatgtaagtaatgtgacctatgccatgaatgcaggatggaatgacaactgttgggattatgcttatagaaacgtaatggtggaaagcttgaaaatcaccaacaagtgcaaagacgatatggagacgtatgcccatttcgaggctatcaataccatctgccgcgtaatagctatgtcgcgtcttgccgaccaatacggatgtattatctattctcactatggcgaatcggctactggtggtgagtatgattcaggacaggatgcttataaaaaattctttgaagaattgaaagaagctgcagacgtgctgcgtactgctaaagaaaaggatgtggcttcgtttatgatgtttgattatgcctatggaggtaacttgaacaaatgggcgcagttgtgtaacaccattcgtttgcgtttggccatgcgtattgtgaagtatgatgctgcttgggcaaaaagtgaggcggaagctgccatgaacgatagtaatggattgattgaaaccaatgatgctaatttcggcattgcaggaaacggttatgtcaatccgctttacggtattgcattcaactatggagatggtgttttaggtgctaatattccttctatcttgtctggtatgggcgatgcgcgtcttgataagtatgctacacagaacagcaagagtgaatattttggtattcgtcttggtattaaaggactggaagaagaagggttttcggatgcctataaggcgattgtaagtcgacccaacttgacagaaacctctcctgctattttggcaactgctgccgaaaccattttgttggaagccgaagctgctttgcgtggttgggatgtaaatggtaagggcaccgctcagagcttgtatgaaaagggtatacggacatcgttcgaacaatggggagccgctgtgggcgattatttaagcagtacgactactgctgcagcgtatgtagaccccgttattcccgctgccagcattgaaggccagagcaaggtgactgctaaatgggacgagtctttgagtaacgaggaaaaatttgctaagattgccacacaacgctggattgctatttatcctgaaggtatgaatggctgggctgagatacgtcgcactggttatcccaaattattcccggtaatggtgaactacagtcaaggtgagattgatacagatcttggcccacgccgtttacccttcaccatcaatgaaaaaggcaataatcctaccggttatgccaaagccgtcgaaatgttgggcggaccggacaatggcggtactcgcatcttctgggatgtagataaaccgaacttctaatccgcattattatcatagagattaagtgatgaggactttttgaagcatgtttttttaaggggaagtatgaaatctgtttttcatacttctccttatgttatattgatatagggtcaccgtacccaaattcttttatgtatccgctacgaagtgagtacaatgatattttaataatttgttgtaatttatcgatgttttgtactcgctttgcagcttcttgattatcagtgttattataatgcgctgcattcagtatacgactgaactgacttggtttagaataattaactaataacctgcgcttttacattagggtttgaaccttctcgtcggttcttactataaaggggaattcttaacttagcacaatcaggctactgaaccccatttttcaatagcctgatttaatcttaaaaaatatattatgaagaaactcattaaacctctctgcttgttgaccggtctgctttgtgccccggctgtttggcttcatgcccaggtagatgaaaagttgaaagccgacatcgtcagtacgggttacgtgcacagtccgttgccgctcgacgagacaaaggctttcgagacattcggcttgaaaaagaaagtgttggaaactatgatgctgtgtgatatggaggatttctccaaatggtcgcacaagggcatcggtaagattggtttgactgatgaacggagcaagtctggcaagcatagcctgcgtctggaagctcctgcccatccggagaagattctcggctgggggttgggacgtggcacttgcatggcctcttatgatataggaggtgtgaactgggaaggttacaaccgtctgaagttctatatctatcccacgtgcgaaggggcacgcagcatttacttgaacctctatgtggaaaatgacggagaaataaaagtacccgacatttacggtcgggaaggataccacgaaatcaacttgaaaaacaaccaatggaacgaatgtttcgtcgagatgtccgggctggcgcgcgacaaggtgaccaagatttcatttgctatcgaagtgttcggcaaggaacgcactatgggagattccctccgtttcgatgtggatgccgtggaattgcagaaagtggagaatccggaaaccgtgaaaggctggatgcccgcacaaaaccgcatcatcttctctactaccggttatggcatagagagtcccaagagcgccattgtcaatgtggaaaagcacggcggacagttccagttgaaggatgccgctacgcaggccatcgtttataccggtcctgttcgtaaggaaaagaccggcctgggagagttcgagacgatagacttctcggacttcaagacacaaggccgttacgtcattcaggtaggggatgtcaccaccttgcctttctatatccatcaggatgtgtgggaggattctgcctggcgtatggtgaacttcctgttctgcgagcgttgcggttatcccgttcccggaaagcacggggcttgtcataatgacttgcatgccacttacaacggacatattattcctataaacggaggatggcacgatgctgccgacatgtcccaacagaccttacagacgggagaaatagcctattccttgctcttgatggccgaacgcgccaaagaaaaaggcaatgtcgacttgtacaaccgcctgatggaagaggctttgtggggaatggactatgtgatgaagacccggctgggcgatggttaccgtgcacagacatggggtaccaatctatggactgacggtgaggtaggcaccgacgacgatgccggccgccgtgaactgcttgtccataacggagctttggaaaacttcctgcttgcaggaattgaagcgtatgcctccatgatggttgagaaggatgaagccctcaggagcaatctgaaaaagattgcaaaggaagacttcggttatgccatgaaacgctttaatgagttgggctttgccgaactgataaagaagggtgggggacatgccgccatggcatccgaaagccagtatcacgccaatatttcatgggcagccagcatgctctacaagctgaccggcgaacagcagtatgccgatgaggccgtgaaggctatccgctacaccttgcagtgccagcgcaccgaaccgctgaaagacaaagacaagacctgcggcttcttctaccgtgatttggccaggaagtccattgtacactatacccaccagtcccgcgactatgcctatatggaagcccttgccgccctttgcgagacacagtccggccatgccgagtatgagcagtggattcgtgccatgaaactctatggcggttatctgaagaatatcatgaagtatgtatatccttatggaatggtgcccagtggcatctatcacaaagatgaagtgaaggattccgccaacttctacgccgttcaggtagggattcgcagcggtgccgataaggatttcgaggaacagctcgaaaacggtatccgtctggataaagagcattatttgcgcatattccccgtctggttctcgtttaagggaaatattgccgtacatttgtctaccggtaaagctgccgctatctgtgccagggtactgaaggacaaggaactgaaagacattgcagaacagcagctcttctgggttgtaggccggaatcctttcgggcagtccatgatttatggggaaggcagcaactatccgcagctctacacggcattgcccggagaaacggtgggagagatacccgtaggcatgcagtcctatttcaatgaggacgcgccctattggccacagttcaatacggctacttataaagaggtgtggggctcttcggcagccagatggctgatgttggtttctgaattctaaagcaagatgatatgagtgacaagactgtttattcacggcgcaacctggccatcgacatgctgagggcattgaccatgttcatcatgattttcgtcaatgacttctggaaagtgcatgacgtaccccattggctggaacatgccgtctatggtgaggattttatgggactggcggatattgtattcccctgctttttgtttgcagtgggaatgtccataccttacgccattgagcgcagatatgccaagggcttctcggcagagtccaccttggggcatatcctttcccgcacctttgccttgctggtgatgggggcgtttataacgaactcggagttccggctttcaccggaagctccctatccgataggagtatactggttcctgatggccataggctttatcggtgtgtggaaccaatatccgaaaccggcttccggcactcagaagaaccttttccgtgcttttaaaataatcggagtattggttctcctttaccttgccttcacgttccgcaatccgcagggaggtgtattcggtgcctattggggaatattgggctccatcggctggacctatctggtatgtgccgtaatctatatcttcagccgtgaccggttgcagtatctgctgcctgcctggggtgcctttatcctgatatgcctgctgggtacgcctttgcgcgagggctttggcggtgaggctatccttgcctttcccgaacgcaacttctatcaggacatgttgtccatcctgcatatcggcaacggggctttgcccgcatttacaatgggaggtgtcatcctttccattctcagcgcccgctatgccggcaagggtgacggctggaaactccgcaatgggctgacggttgccgttctgcttctgctggtcggaattgggacacaccatttctggattgtggccaagatgggtggcactcctccctgggtgttctatgtgactgccatttccgtggggctctacacactgctcggctatctggtcagccatcaggtcacaggttggttcaacctgatacgccctgccggaacggctacgctgaccacttatctggtgccttatgtcttctatggctttgctgatgtgaccggtgttgtcctgccggactggttcacacatggattcatggggctggtcaactgcctttgttttgcctttgtggtaatcggcgttacgtgggtgatggaaaaactgcatgttaaacttaaaatttagatagaatgaaaaagagctttttacctgcattcttgctgctgttccttgcgctgggcatgttctcgtgccagcagggagctaaggaaacaaccaaggaatatcccatgttctggacgtggctggactatcgtcccggcatgaacttcgactccatctgccaagtgatgaacgacatcggcatggatggaattatgctgaatgcgccgactcccgacgattaccgggctgctataccggttgcccataaacacggaatcgaagtgtatgcctggttatggaccatgaatctggaacacgaccgtgacaagatattgaaggagcatcccgaatggttcagcgtgaatcgtaacggcaagagcctggcagacactaccgcctatgtaggctattacaagtttctctgcccggcattgcccgaagtccgcgagttcatcaaggaaaaaatcaaggcctactgcgaagtggaaggcttgaatggcattgccatcgactatcatcgttttgtggatgtggtgcttcccaccaccttgtggccccattatggcattgtgcaggaccgtgaatacgctgcgtgggattacggttaccatccggaaatgctcaggttgttcaaggagcagtacggttatgacccccgcgagcaggaagacccttccctcgatgtgaagtggcgccagttccgttgcgaccagataaccgaagtggccaatatgattgccgaagtggtgcactcctacggcaagacaatggctgcctccccgttccccaccccgaagatggcttcacgcatggtgcgccaggactggggcaaatggaatctcgacatcgtgttcccgatggtttaccataccttctatacgggcgatgccagcttcatttccgactgtacggttgagaatgtacgcgacaagaacgatatgactacactgtactgcggcatgaccgccaccgacggcccgatgatgttcgaatgcatggatgccgctctcaacaacggcgcccagggaattgccgtatttaccattcatggactgcgttctccggaggtgaagaggcagttcaaggcttatacggacagtgtcagagccgtgcgtgccgccaatggcggggtgataaaggctacccatcccgaagtggcggatcccgaccccttcaagcatgaaggcattatgaagctgatgcaggagcgcatgcagcaaatcatagccaaggctgccggcaaggaagagccggctccgctggcattgggcgagtacaaggaggtggattcctatgacgcgacacgctgctaccaagtggtggatgagaatagcaagactacttttgacgtgacattctatctttacggcgacgttgtttcaggttgggatgtagcagtagcagacaaggcttctactaataagaaatgaaaggacgttttatgatagtgagagattacgggagcaaactccttctgctcttggtgttttcaatggtaggcatggtttgttgcaatgcccagagtggaaagagcttgtccgtaaagaaagtaatgtgtacggcttcaccggaaggtgaggctgtgccgtccttgctggacgagaacgggatagagtttcagccccttgatgtggtcaactggaaagattatccctacaagccggaagtgagtttccgcatagcccatacggggcgcgaaatcctgctccactacaaagtgaaggaagccagtgtgcgtgcagtggcctccggagacaatggccgggtatgggaagatgcttgtgtggaattcttcgtatctcccgaaggtgacgaccgctattacaatttcgaatgtaactgcgccggcaggctgctgattcagggaggtgcagtcaatgagcgccgtcctacggcgagtcaggaggtgctgggcatggtgaaacgttggagctcgttgggcggcgaacctttcgaggaacgtttgggcgagtgcagatgggaactggccatggttattcccgtttccgttttcttccagcattccgtcggttctctggacggaaaaacaatgaaagggaatttctacaagtgtggtgacaaactccagactccccacttcctttcttggagtcctatcgggctggaacgccccatgttccactgtccggcctttttcggcaccttgtcttttgaataaatctttagggtgttctggtggaatcatttgccgttagcattacttattggattgacaattgcggaattatgtgtttttttatacctttgcacttcctaaattgtaaatgcatatatgattaccgcagaacaactgaaagatatcaaagaacgtaccgaggcgttgaatcgctatctggacattgaaggaaagaagatacaggtggaagaagagcagctccgcacccaggctcccggtttctgggacgaccagaaggctgccgaggctcagatgaagaaagtgaaaggcttgcagcaatggatttccggctacaatgaggtaaagaccttgactgacgaggtacaactggctttcgacttttacaaagacgaactggtgactgaagaggaagtggacgatgcctatgccaaggcaatcactgctgtcgaggccctcgaactcaagaatatgcttcgcgaggaagccgatcagatggactgtgtgctgaaaattaactctggtgccggtggtacggagagccaggactgggcaagcatgctgatgcgtatgtatctgcgctatgccgagactcacggctataaggccaccatcgcgaacctgcaggaaggagacgaggcaggtatcaagacttgtaccatcgagatttccggcgattatgcctacggctacctgaaaggtgagaacggtgtacaccgcttggtgcgtgtttcgccctacaatgcccagggcaagcgtatgacttcttttgcatccgtgtttgtcactcccttggtagatgataccattgaggtgaacatcgaacctgcccgcatgtcatgggataccttccgaagtggtggcgccggtggacagaacgtcaataaggtagagtccggtgtccgtctgcgctatcagtataaggatccatatacgggcgaagaggaagaaatcctgattgaaaataccgagacacgagaccagcccaagaaccgcgagaacgctctccgccttctccgttccatgctttacgacaaggaactccaacaccgcatggccgagcaggcaaaggtggaagccggtaagaagaaaatcgaatggggtagccagattcgtagctacgtcttcgacgaccgccgcgtgaaggaccaccgtaccaacttccagaccagtgatgtgaatggtgtgatggatggaaagatagacggctttatcaaagcttacctgatggagtttgcaggaagtggcgaataaattttctccctttcatttgcattcttcccgaatttcttcttactttgttcatcgttgaactttaaactataaaacacaccatgggaaaaagtaaaaagaaagcaatgcacagccagaaggaagagcaacaagccaagaaagtgatgatgacgatgggagtaatagccattgtattggtcatcgccatgtttgtggcttactcttactggggctgataaaatcactggaaacgacatgccgcaggagatagaacggaaattcctcgtgacgggagaatacaagccacaagcgtatgcacacagccgtatcgtacaaggatacatcagcagtgtacgtggacggacagtacgggtgcgcatccgcgatgaacggggatttctcaccatcaagggtgcatccaatgaatcgggaaccagccgctacgagtgggaaaaggaaattccgctgtgcgaagcgcgggaattgctgaagctgtgcgaaccgggtatcatcgacaagacccgttacctggtgcgcagcggacagcacgtctttgaggtggatgaattctatggcgagaacgagggactgactgtggccgaggtggaactctcctcggaagacgagcctttcgtgaaacctgcattcatcggacgggaggtgacgggagatgtccgctactataactcgcaactgatgaaacaccctttcaccacgtggtagcaaaccaattgtatgccgtacttgtttaatcgtcatggagaaactttacgactacctgccaagagaactggtcaccttccttttggtcactgtattctctttactcatcgggctttcacagcgtaaaatcagcttgaagcgcgaaggggaaactacgcttttcggtaccgaccgcaccttcacttttataggcattctgggctatctgctctatatcctcgaccctacgggctatcgtctgttcatgggaggaggagccattctgggactgctgctcggactgaactattatgtgaagcagtcacagtaccatgtgttcggagtaaccaccatcattattgcactcatcacctactgtattgctcccattgtggccacgcagccgtcgtggttctacgtcatggtcatagtgaccgtcctgctcttcaccgagctgaaacacaccttcacggaactggcccagcgcatgaagaacgacgagatgattacgcttgccaagttccttgccatcagcggcattatcctgccgatgctgcccaatgagaatcttattcccggcatcaacctgacgccatacagtatttggctggccacggtggttgtatcgggcatttcctacctttcttatctgttgaagcgttacgttttccatgagtcgggcattctggtttcgggcatcgtgggaggcttgtacagcagcacggctaccatttccgtactggcgcgaaagagccgtaaggcttctgtgcaggatgctcccgaatatgtggcggccatgttgttggcggtcagcatgatgttcctccgtttcttgatattgataggtattttcagccgggagacgctactggccatttatccctacctgctgataatgtcggtggtaacggctgccgtggcatggtatctgcattccaagcggaaacgggtggacgacggcacgcagaccacggaggacgaggacagcagtaatccgttggagttcaaggtagcgctgatttttgccatgctgtttgtggtgttcactatcttgacccactatacgctggtgtatgccggcacgggtggactgaacttgctctctttcatttcggggttcagtgacattactcctttcatcctgaacctgcttcaaggaacgggcagtgtggcggtgctggtgattacggcttgcagcatgcaggctattgtcagcaatatagcggtaaacatgtgctacgcgttattctttgccggtggaaaaagccctttgcggccgtggatattggggggattcggctctgttattgccgcaaatatctgtctgttacttttcttctattttctctaaattgctttctttttgcttttttaactccgaaagtctcgtaaatgcatgaaaaaggggctatttttgccgaattcattgtgacaaaactcgaacgggaaacgtctaataccaagacaataaacatgaatagtcactaaatataaaaacgcaatgagaacaaaatggactgtgctgctatggatgctgatgatttcgggactgcttgcagcgcaaaacacggcaaacacttctttccaggttaaaggaattttgctcgactcactcacccaggagggtgaaccttatgctaccattaaaatcgtgaagaaagaggcccctgcaaaggcgctgaaaatgctggtaacggacatgaaaggccagttccaggagaaagtacccggtacgggcaacttcgtgatgaccatcacttccgtgggacgtactcccatcgtgaaggacttttctgtgaaggcaggggagaagctggtggacttcggcacgctgtatatcgtagatgcctccaatgagctggggcaggtggaaatagtggcacagaagcctctggtgaaggcagatattgacaagatagagtacaatgtgcaggatgaccctgacgcccagtcgaactccgtgctggaaatgcttcgcaaggtaccgttggtaacggtggatggcgaggacaatattcaggtgaacgggagtagcagctttaaggtatatgtcaacggaaagcccaacaacatgatgagcaacaacccgacggaagtgctgaaaagtatgcctgcaaacagtatcaagcatattgaagtgataaccaatcccggccccaagtatgacgccgagggtgtgggcggtattctgaacatcgtcaccgtgggcagcggactcgaaggctatacggctacgttcagtgccaacgtcagcaaccgcggtgcaggcggcggggcattcggtaccataaagagcggaaagctgaccgtcagcgcccgctacaattacaattacaacgaccagccccgcaactacagcagtggtagccagcatgtgacaccggaagctgttacggagaattcttccaatctggactatgacggcagcaacaagggacacggttctttccagtcgggcagcatggaggccagctacgaaatagatacattacgcctggtcaccatgtctttcggactttggggcggcgggaacaagagtaacggctctacggactacatcgctacttttccggagaacataaacgctgctcccatttacagctactctgccttcaaccgcagcaagtcttcctggtattccatcgacggaggtatcgactaccagcgtctgttcaaggtcaaggaccgcatgctgacgttctcctacaagataaacacccgtccgcaaacgtcggattcctatacggaatatgaaatagacaatggctataaccccgattgggcagactatctgaaccgtttgaagaaccagcataacgacggtgagcagaataccacggagcatacgttccaggccgactataccacgcctatcggcaagctgcatacattggaggcaggtgccaagtacattctgcgcaacaactcctccgaagacgaccgttttgatgcggacgataccggaaagtatgaatacaacaaggaccagagttcacactacaagcatttgaacgatattatcgccgcctatctgggatatggactgaaggtgaagagactttcgggccgtttgggattacgctacgagcataccatccaagatgtgaagtatctggtgggccgcggtgaggatttcacaaagaactttgacgacgtagtgccttccgcttccatcggctacaagctgacggatatgtccaatctgcgtttaggatacaacatgcgtatctatcgtccgggaatctggtctctgaatccttatctgaatgatacggacccctcctacatcagccagggtaatccggagctggacagcgagaagagccatgctttcaacttgagttacagtaacttcacacagaagttcaacatcaatatctcggcccgttactcgtttaccaacaacagtattgagaatgtgacaaggctcatgcccgatacggagattgagggattgaagaatcccacgggcaaggatgtgctttattctacctatgccaacatcggcaagacccgttatgccagtgtgaacggctacgtcaactggaatgccactccacgtacacgtatctacatgaacatgagcggcaattactcttatctggagggcagtgaaggcatgcgtaacgatggctggagcctctttgcctacggcggtgcacagcagacgctgccccatgactggcgcatcagtctgaatgtcttcggacagacgccgtggattatgctgcaaggtaagggcagcagcttctttgattatggcttgagcgtcaacaagtccttcctggacaagcgcctcaccttgtctgcctttgccagcaacttcttcaagaagtatatggaccaaagctccaccaccgaaggcagcggttttatacgggaaagcaattataagtacagccgccaacgcttcggcataagcgtcagctaccgtatcggtgagttgaaggcaagcgtgaaaaaggctgcgcgcactatcagcaatgatgatgtgaagagcggtggcagtggttccggtggcggcggtgaataggttgtaaatacatccccttctgaaacttgtacctcgctattcatcagagaatacaagtttcagaaggggattttttatgatagtaagttacttgctgactgttgagaaccccaactccttcaaccctttctgcacatccggatgactcatgaagagcttccacagcagtcccgaccgataattctcgagcatgacggctatcgggccctggtcaatggcgaggtagcgctgcggataccagttgtccgtttcgctgaaagcatcgtagaagccataggggccgaagaccttatctcccatctcgtagaggtggtgcatcacttgcagcgactgttccggggtatagacgatggatgacaaggcggcagttggagagatgactccctggtcgtcgcgctcgttgggagcgtgggcggcatatccgttgacggagtagctggctgtcagtccccagcagtcgggcccgaaacctttgtagtgcttggggttgcggacacagtaggcacggttcacaagcgtcaggttacgcatctcgtcgaagtagttggcgcagtattcatccttcagcccgatggggtcgaggccgagaaacgagtattgtgcccagaagagcggtccggcttctgtgccttgatagcgcagatgcaactcgatattctccactttatggggttctacaatggccccgttctgcgcccagccctcgtgatagactgctgcaggcacgccgtgggtaggcgaggcggcggcaaggatatacatgatgaggcattcgttgtaaccgtgtacgggaaagttcatttcccaaccgtattccggactccagtgccaatagagcacgttctggccgttttggcggtagaagttccagtccacttcgcgccacagcttgtcgatgcgggcggcgagggcttgctcggcgggcgaaccgtcgatgtagtactggtggacggagagcagggcctgcatgatgaaggctgtttctaccaggtcgccgccattgtctttctgcccgaagggtttcaccttgcccgtatcgccataccaccagtgcgggtaggcaccgtggaaacggtcggcggtttcgaggaaggagacgattttctccatccgttccagcccttcctggcgggtgacatagccgcggtctataccggcaagtatggccatgatgccgaagccgcttccgccggacgtgattacgttctggtcgttctccggatagacaccgtccatgtggatgcgttcgcgtgccagtccgctgttgggctcggcaccttcccagaagtagttgaaggtacggcgctgtacggtgtccatcagggcatcgtcgctcagccggtcttctttggcggcggggcttttgcattgcgtgaaaccgagcaacagcaggaacaataataaacagtattgtattttcattgtaccaatgcttacttgtttttttatcatttacttatctatattcattgcacggtcaattcaacaagtataggacagtggtcggaaaggtagctgttctccggtttgtcttggataacgcggtagtggtctatctttgcgcctttggtcacgaagacatagtccagcagtacgcgttcctccaccggcagacggccgaagtcatggaaagaccaggacggaccgtaggtgacggcagctgtctttgcggcattttccattcctcccttttccagcgtttgcagaggttcttcaccgggcgtacagttaaagtcaccagtgatgatggcgggcatgtccggtgctatctccttgattttgtcgagaatgagttgcacgccctctttgcgggctgtctttccgtcgttgtccagatgggtgttgaaatatacaaacttttgtccgttgttcttttcctgcagtatcgcccaggtggtgacacggttgtaggaagcgtcccagcccttgatgccgatagtttcgggttgctcgctgagggagaaattgccgtattccaccagtgtaaaccggtcggtccggaagaatatcgggcagtattcgcctgcttccttgccgtcgtcgcgccccacaccgagtgctgtgtattgcggcagcccgcgttttaggtcttccatttggttgtgaagcacttcctgcatgcccagcaagtcggggctgtagtaggctatcatacggcaggcgtcacccttgcggtaattccagttgtttacactgtccgaaggaatatccaggcggacattgaacgtcatcacttccagcggctgtccgttctgtgcggagggctggctcttgcagctgccaaggagcagaatgctgcaaaaacaaaggagtaaagtagtatatctcatgttttcttgtttttagagtgcaatattaaatattttattttatttcagtgtcagtcgggctgtcttttctgcctggctgctgccacctatcatcacatcgaaatctcccggctcggccacgtggttgaggtcgtagtcgtagaagcggagcagctcaggggtaatcttgaaggatacggtcttactttcgcccgctttcaggaacaccttttcaaagcctttcagctcgcgtacggggcgggtaatgctgcctacgaggtcgcggatatagagctgcacgacttctgcgccgtcacgcttaccggtattggtcacggtgactacggcagtggtggagccattttgtcccatgaccggggtactgagggcgatgtcgctgtactggaaagtggtgtatgagagcccgtagccgaagggatacagcggttcattgtccacatccagatagttgctgcggaacttctcgaaccaattgccggcagccagcgggcgaccggtattcttgtggttgtagaataaaggtatctgccctacgttcttcgggaaagtcatggtcagcttaccgcttgggttcacgtcaccgaacagtacgtcgccaatggcgtatgccgcttcactgccaccgaaccatacgttcaagatagcgggcacatgttcctgctcccaggtgagcgtcagcggtcggccggtgaagagggtcagtacaacgggctttccggtcttcagcaaggcctccagcagggtgcgttgcacgtcggggatgccgaggtcggtacggctcgagctttcaccgctcatttcggaagactcgcccagggcggctacaatcacgtcggcaccggaggccaccttcaaagcttcgtccagcagttccttatccgtacggttgtcccggctcagcgatcggccgaatagggtggcgcgttcctcgtaggctacatcaccgatgaggttgctgcctttggcgtaggtgatgttcacccggccggctgtcatctccttcagtccttcgtacagagagggatagtcatccaggcgtgcggcaacgctccaggtgccgggcatgttgctgcgggtattgcccagggggccgatgacggcgacggtgccttgcttctctaagggaaggacgggacgagaagactgcttgccttgtccctcaaaaggttcgttcttcagcagtacaaagctttcggcggcaatccggcgggcagcggcgcggtgctcgcgggtgaagatgtcgcgtgcgggacggctgaggtcgcagtatttgtaagggtcatcgaacagccctaacttgtatttcgcttcaaggatgcggcggcaggctgcatctagtgtcttcatggttattttgccttcgatgagcgactttttcaacgtgcccacgaaaccttcgctcaccatatccatgtccacaccggcgttgagcgcacgagcggaaacggtctgcaggttgccgattccgtgttccaccatttcggagataccggtaaagtcggtcaccacaaaaccgttgaagccccattgtttgcgtagcacgtttgtcatcagccagtggttggcggtggcgggcacgccgtccacttcgttgaaggaggccatcacactacccactccggcgcggacggctgcttcataggggtacatgtattcgttgaacatgcggttgcggctcatgtctacggtgttgtagtcgcgtccggcttctccggcaccgtacagtgcgaagtgcttgacgcatgccatgatttcgtcgttccgtgtcagttggtcgttcaggtcttttccctgataccccaacaccatggcgcgggcgatggcgcctccgaggaacgggtcttcgcccgaaccttcggatacacgtccccagcgcgggtcacggctgatgtccaccatcgggctgaaggtccatgagatgccgtcggcactggcttcgatggcggcgatgcgggcagactgcccgatggctgccatgtcccacgtgcaggagaggccgagggggatggggaagatggtctcatagccatgtatcacatccatgccgaacagcagggggatgcccaggcgggagttctctacggccagtttctgtacgtcgcgtatcttggccactcctttcagattgaaaagccctcccacgagcccctgctcaatcttcttggccacgtcgctgctctttgcctgaccggtggtgatttctccggtcacgggcaggttgagctggccgattttctcttccacagtcatccggcgcatcagtgcgtcgatgaagcggtccatgtcctgcggagacttctgcgcctgcacggtgacgcctattaaagcggtcgcgagcagcagacttgttctcttgaaaattttcttcatattcatattgaattaattgtttgtaagtatgttcccttcattgtttttagattgccgtaactctattgcagtggcgctatgacttctttgcaacggtgctgcaatttctctgcagtgatactgcaaacgatttgcagcgctactgcaactgctttgcagcgacactgcaactgttgtgcagtgctactgcaacacttttgcagtgccactgcaaaaagtttgcagctctttgcagtagcaatgctttgattgaaagcaagttatgaaatagaccttttgccattgattgggtcggctgtttcctttggccgggtatcaatagtcggggttctgtaccagtactccgttcgatttgtctatctctgtctggggcagaggcagtagtgcattcttgtcctggtaattctttccggcagcttgcagcacttctttggcaatgccccagcgcacgaggtcgtagaagcggtcgggttccagtgccagctctacgcggcgttcgtggcgaatggcgtcacgcagcacagactggctggcagattctaccttcggaagcacgtctgccagtgtgccgcgggcatgggcgcgtacttgttccagatacccggcggcttcgcctgtcagccctttctcgttggcggcttcggcagccatcagcagcacgtccggatagcggatgaggcggatgtttacccagaaacccatacggctgtacttgcggcgcagtgtcgggtccgtgtaggccttcttgttgaagtaggcacccatggcggtggatacgggtgactcgccataaggctggttggtattctccggtgtgatgggctcgtccgtgctgcggcggaagtagagcaatgtggcgttccggcgcgggtcgcccggctcaaaggcttctcccatcagtttggtggccatgtgccagccccatcccaggtcccactcgccggctccgcgcaccccttgcacctggcagaactggctgccgatgctggcatcctctttcatggcatcggtggcttcgcattgcagttcgaagatgctctcgccgcagttttccccttctacggtgaagactttgtcgaccggtgtattcaggttgtagatgcccgactttatcacttcggtggaggctgtgtacatattgtcccaatcgttccgcatcatataggtgcgtgcgtgcagggagcgtgcggcgccccaggtcagccgtcccgtatagtcgctgtcccaccgcaggggcaggcattcttcggcttcggtcaggtctttgtcaatctgttcgtatatcttttccgccgtggtcttgggcacgttggcatcggaggcttccactaccttgatggtgaccagcggcacttcgccaaaggcgcgtaccaggttgaagtagcaccaggcacggaagaagagcgcttcgccgcggttgcggatggcttcggtgtcgtccttgtgtccgctcttctcaatgtcgtccaggatttcgttgcactggtagatgattttgtagttctgtccccaataggcgctgagcggcccgttggaggcagtgtactcgaagtcgtcccacatggcggcctcgttgctgccgtcgccggcgtcactgcctttctcggagtcctcgctgcgcaccatgtgcaccataaaagcaggaataccggcagtgatgtcgtacgagcgcatcaggtagtagacgttgaatatcttcccgcctacaagggcgttgggagagtcatcttccgtgaactgccccagcggatcgcggtccaggaagtcgttgcaggatgtcagtgagagggctgttgcacccaccagcaatgtaaatatgtattttatcagtttcataaatttatatttttcattccccgttccctttgaaggagtcgggggaggtttgaagttactcttttttaggggagaggcttttagaacgtcagattaaatccgaacgtataaatcgccggcatcggataactgccgtcgtccaccccgaaggcgatggcgcttccgcccagttccggggtatatccggtgttgtgcttccacgtcttcaggttctgtatgttcacgtagagcttcagcgcctgcatgcctatcttcgaaatcagcgccttgtcgaagttgtatgccagcgacacgttacggatgcggaagaacgagccgtcctctatgtaatactcggagttcagattgttgatggtatgcttggtgttcagcagcggctgggtgttgctggtcccttcaccgtgccagcggtccatgcgttgctccataaagttgaactggctccagttgtagttgtcccaggtacggtaaatctgattgccgccttgtcccatcatgtcaacggcaagctcccagttcttgtagcccaggccgagcgtgaagccgtaggtgacatcgggtgtaggattaccaatcatcgtacggtctgccgtggtgatttctccgtcaccgttcacgtcgcggaatttcaggtcgcccggggtgacggttgccagtgtgttcttgggagagtgctcaatctcctcctgggtctggtagacgccttccaccttgtagccgtagaagtagccgatggggtatcctgctattgtgtagctctgctgcttgtctccggctatgatggagtagccttcctgcacgaggctcagtaccttgttcttgatggtggcaaggttcataccgatgttgtagttccagtcgcctatccggtcgcgccagctcaaggcaagctctacgcccgaattctcgatggatccaaggtttccgatacccggtacggtgcccgagatgcccggcacttcggccagcaggtctttggttttcttcttgtagtacaccccttcaaagtgcaggcggttgcggaggaagttggcttctgcaccggcttcccaggcttccaccttctcccagcgcagtttggggttgggcaggtaggcaagctggtagcccggatagatggcagacggggtgccgaacacggcggagtaggcattcgtcagcaacggttcggcgggataggcacggtccaggttctggttgcccagtgtgccccatgaacctttcagtttcagcatgtccagccaggtgatgtccttcatccatgcctcttcgctcatcagccagcccagtccgacggagtagaagttctgccactggttgccggtgtaggagaaggcggaagagccgtcccggcggtaggagccgttgaacaagtacttgcccttgtagttgtagaggatacgtgccagtacggacacggtggaacgttcccactgcgtgctgccgttggtggcggtggctgcgtcaccgatgctgacgtaccatttgtcgggattgtccggaatgaccaggcctaccccttgggtacgggcgccgttcagattctcgagcttgttgtagtaggtggtaaaaccggcagtggccgtcaggctgtggtcgccccaggagttggtgtaggtcagcagatagtcgctctgtaccttcatttcagtctctttggcttgggacactccggttttgccgttgcccagcgtggctatgtttccttcgacgcttgcgtcatatacctggataatcggggtgtatgtccgtgtgctgttcgaggcatagtccagggagaacatggccttgaactggaagtgtttcaggaaatcccattgaccgtacacgttgcccgagccacggtagttctcggctttcgtggtattcgccttcaggtccacgtccaccatcgggttgttcatctgtgccttctggaatccgggcagtgaggtgtagaggccgtactcggagttgaatacatgcgccaccggagctgcgcgcagggctgtagccacactcttcgtgtcggcgggcagcatgcgtgccccgttgaattggaaacctaccttgaggttgtccgtcactttatagtcgttgctgatgttcagcgtgattttgctgtacttctcgtgcttgatgttgccttgctcgtaagcatagcccgcaccgagatagaagctgttcttgtccgaggcacccgtgatgctgatgttgttgttggtgatgaacccagtctggaagatttcatcctgccagttggtgtttcccgtccagtccgagaagttgtattccgggttgccttcattcctcaactgttcgttgtacagcagtttgaagccttcggcatccgtcagtgcaattttgtcggtgacggacttgaaaccgaacgagccgttgatattgacgcgtgtctgtccctctttcgccttcttggtggtgatgataatcacgccgttggcaccgcgcacaccgaagatggcgagcgacgacgggtctttcagtatctccatggattcgatgtcctgcggattcaggaagttgatgttgtcgttgaacagtccgtccaccacatagagtggcttgtagccgttgatggagtttgttccgcgtacacggatttccgggtcggagcctgccttgccggagtttatcacctgcacgccggcaatctttccttgcagtgcggatacggggttgaccaccggcttgttggcgatttcgtcgcctttaatgttggtgatggagcccgtaaggtctcgcttcttggcgctgccataaccgatgacaacggtttcggccagcatctgcgagtcgtctttcatctggacgttgattaccgactggctgcctaccttgacagcttgcttcaccatgcctacataggaaaaatccaatgtgttctccggggtggcctggatggagtaccggccgtctatgtcggtaatcacgccattggaggttccctgcaccaatacggtggcaccaatcagcgggtcacccagggcatcggtcacggtaccggttactgttttctcctgcgccgatgcggcgacacttgccagcaggcacaccgtcagaaataggtttctcagtcttccggttttcttcttgggaaggtttaggttcttcttcattacattgattttttagtggataaatcattcagtttctcctctgaacaatcaaaatgcaaaaaagatttggtgacggtgttaaaaaagggcagcccggtttttgcggactgccctcttacctaaaagcaaaactatacctatttcaactcaaaactcgtagtctttacatcgcggctgttgggtccaatcattacatggaactcgccgggttcgtatacatactgtatgtcgtagttgtagaacttcagcaattcgggggtaatggtgaaggtcacctgcttgctttcgccttttttcaggtggatgcgctcgaagcctttcagctctttcacggggcgggtaatgctgcccaccaggtcgcggatatagagctgtacgatttcatctgcatcgtagttacccgtattggttacggttacggaagcggtcagcttgccgtccgcattcagttgcttggagctgagcgtgatgtcactgtactggaaggtggtgtagctcaagccatagccgaaaggatacagcgggtcgttgctcacatccaggtagttgctgcggaacttctcgaaccatttgccttctttcagaggacggccggtattcttgtggttgtatgccataggcaactggcccacattctgcgggaaagtggtggtcagcttaccgctggggcaaacgtctccgaacactacgtcggcaatggcgtcggcagcttcactacctccgaaccatacattcaggatggcaggaacattttcattctcccaagtcagcactacgggacgtccggagaacaataccaatactacgggtttgcccgttttcagcaatgcttccagcaggtggcgctgtgcgtccggcatttccagttcggaacggctgctgctctcaccactcatctcggaggactcgccgagggcggctacaatgacatcggcttgtgcggctactttcagggcttcgtccagcagttcttggtcattgccacggggcagttcacggccgaacatcgtggcgcgtgtctggtagtcggcatcgtacatcaggttgctaccttgtgcatagagaatgttggccttggagccgacagaattcttgaaaccttccagcagggtgctgtatttgtctgctgtggctgccacactccaagtgcccggcatgttggcacgggtgttggcaagcgggccaatcaaggcgatgttgcctttgcgttgcaagggcagtaggttgtcctggttcttcagcagcacgaatgtctctgtggcaatctggcgggcaatggagcggtgctcgggagtgaacacttctttttcggcacgcttcacgtcgcagtatttgtacgggttggcaaacaatcccagcttgtatttggcctccaggatgcgtcggcaggctttgtcaatgtcggcctcggtcactttgccttctttcagagacttttccagtgtgccgataaatccgtcggctaccatatccatgtctgttccggcggtcagggcacgtgcggatacttcctgcaggtcaccgattccgtggtctatcatttcggagatggctgtatagtctgtcaccacgaagccatcaaagccccattggttgcgcagaacgtcggtcagtagccagtggttggcagtggcgggtacgccgtcaatttcattgaaggaggtcattgcgctacccacaccggcttctacggcagccttgtagggagggaagtattcgttgaacatacggttgcggctcatatccaccgtgttgtagtcgcggccggcttctccggcgccatacagtgcgaagtgctttacgcaagccattatctcgttgttggcactcatatccttgccctgataaccgcgaatcatggcttgtgcaatggctgaacccaggaaggggtcttcaccgttgccttcggatacacgtccccaacgggcatcgcggcagatgtccaccatcgggctgaacgtccagcagataccgtccgcactcgattcaatggcggcgatacgggccgatttctctatagcctccatgtcccagctgcacgagagtgccaagggaatggggaataccgtttcgtaaccgtgaatcacgtccataccgaacagcaaggggatgcccaggcggctgttctctacggcaagtttctgcacttcgcggatgttcttcacgcctttcaggttgaacagacctccgacttcaccgttgcggattttaccggcaacgtcgctgctcttggcttgtccggtgacgatgtttcccgttaccggcaggttgagctgaccgattttctcgtgcagtgtcattttgcccatcagctccgtaatgaatttatccatctcctgcggattgccttgggatgtgttttctttgggcgttgccgtcacggtgagggcagagaaagccaaggctgctaataatgtgtatttcttcatatgatataattttgattatcccctccggccccctgaagggggaggggaatagtgatatagaaattcaacttaagcttagctgctccatcatgtcgcatactaacttcaatcgtaaatcgtcaaatcgtaaatccctaagccttaaatcccagcttctgcaatccttcttgaacctcgggacagctcatgaagagtttccacaacaagccggaacgatagttctcaatcatcggggcaatggtgcattggtcgatggcaagatagcgaggcaccgtccagtcacttccctcggagaaggcatcgtagaatccgtacttgccccaaatccagtcgcctttggaatagaaatacttcagtgcacgcatggattcctccggtgtgtagggaaaactggacaaggctgctgtcggtgtgatgacaccatggtcgttgtcgcccgggcagtgggctgcatagcctttggtagagtagctggcggtcagtccccagcagtcctcgccgtaacctttgtattgtttgggattctccacgcagtagcggtagttggagagggcatggttgcgcaccacgttccagtagttggcatagcggtcgctcaggttgcgcgggtccagaccgatgtgcgagtattgtgcccagaacaagggaccgcccagtttctcggctccgttgtgtttcaattccaaaggcaggccgtagggggcagagtcggacttgatgccgccgccgcgtgcccagccgttgtggtaggctgaagccggaacgggataagtgggggaggaggctgcgagcacatacacaatcaatgcttcgttgtagccttccagcgggaagttcatttcccagttgtattcgggagaccagtgccagtagatgacatccttgccattctgataccagctgaactccatctctttccacaattggtcaatcttctctaccagcgccttttcctgctcgttgccgtcgcggaagtattggcgtacgcaaagcaagctttgcatcaggaagcagctttccaccaagtctccgccgttatctttttgtccgaaaggtttcaccttaccggtagggccgtacaaccaatggggccatacgccgtggaagcggtcggcgcgtttcaggtaatcggcaatcttggtcaggcgcttcacgccttcttccctggggatgaagccgcgttcgatgcctaccagcagtccggctataccaaatccgctgccgccggtggtgacaacattctggtccttttcgggataatccccatccaggtggatgcgttcgcgtgccagtccggaggtcggttccgcaccgtcccacatgtagttcaaatgtaccttctggatgtaatcaagcatttcgtcatccgaagcgaatgattcgggacgtacttcctctgtgtcgggcttttcctcttttccgttctctttcccgttttccttcaagtcggaagagcaggatgcacagcccgccaatgtggaaatcaggaacaaagccagcacatgtatcattattggttttttcatatctttatttcttgtgtttaattttttgtcgtcttgcacaatggcgagcggccgttttcgttcagcgcctcgatagtgaagtaatagtccgtgtccgcatccagtccgcggaagtcatattccgtctgtcccagtaccgtgatggcattgtacatcttgccttcggcggtgccgtagtagatgttgtagccataggcgcttgcttcgggttgccaggagataagggcattccggcggtctttcctgtcacgtttcacagtcagtcctttcacggcttgcgggacatcgccgtcaccgttcccgaagacgcggaagccggacaaggcgacatttcccgtaggcatgtgcacattctcgtatttcagataacgggcacgcaacggctcgttgagctcgatatagtcgtgcggacaatccttgtcactgtcgctcttgtctatgaccaatgtccattcttttccgtcttcggaagcaaaaatacggtattggtgataaatatccatggcacggttgtattgaaccgctttatggtcgtagaagttcaactgcacggcacgtacattctttgtgctgcccaggtctatccccgcccattcgccggggttgccggaacgggctgcccagtaggtgcgcatactttcgtccgtcaggttggaagctgcatggatgctatccgtagatgatacctccaccggtttgccgtaggacagaagcatccatcccgtgaaacgctctgcagggttctttacgtccatcggttctgcccagttgggataatcgccgaaggcagtggacgaatacatgacaccatccttgtcgaaagccaccggataaagaccgatgcggcgttcgaacttgtacttcagggagagcatgcaggtggccacgtgccagtaattgcctttcacgtcgcagaacgtgcctccatgaccggcaccttgcacataaccgcccggcttgtagcacatcgggttatgcttctggtagacaaacgggcccagcggggaatccgaaacatatacgccatcggcatagactttgaattcagtgcccggagcaccatattggaaataatatttgccattgtgtttggtcatgtaagcgccctctgtgaatgggcggagtgtcacttcatcgtcattgttcatgccgaaacgttcccagccgtgttcttcggggcggagcatcatcacgtcgtgaatcttgctgatgggatagaaatcattccggtccagttccaccgcctttagcggatattcattgctggagccataatacatatacagtctgccgtcatcgtccagaaacatgcaggggtcccatgtgggaagcacattcttttcgatggcacgtttgaaacgtcccgttttggggtgtgtgctgtaccacacggcaaggccttcgtaggtggagccggtatagaacagcgtgtcaccgcttacataggctgccggtgcgcactggtcgtcgtccgtaggcttgcgttggaagccggcaggaacgaaatcccaatccaccaggttcttggaatagtgaaaaccgccctggttggtggagaacagaaagtattctcccttgtattccaccgccatcgggtcggcagaggaacggaacgaaccgttgggacgcacattgttgttgaaaggctcgaaattgtaactgatgttcatcggattgcagaaggtgcgcgacagaggcgcctgtgggtcataccaccgggtcgcctgggcgggacggcggattgcggttgccttgtgtacctcttcttccatcactacctcaatatcggtttcatccagtgccaggattctgttcactatctttttcccgggatagtagacatacaggtgcacgtcgttcttcgctcctttgatggcaaagctgccgtcgtgggcagtggtattgtgcatgggacttgcgaagaacatgactgtggcgcctgtgagtggctggcggttggtgtccagtacgtgtccttttacgatacggtcttgggttacagtgatataatagtcactgacttgccccttcaccactttgatggaatcgtcaggggttgcctttgccgtcagagctgcaaaggctattccacaactgattaggaatctttttaccatattggagcggatttattcggcaattccgtcaatgggttccagcttcaggtcgggaaggtcgtccaactggttggccggtatgggccaataagtcttttctgctgtccatcctttgggaccgagtacggtggcggcatcgccggtacgcaccaagtccacataacgggcacaccattcgccgcaaagctccatccggcgttcgtccatcacgtctttcagggtaacaccggttttggtgctcatgcctgcacgccggcgcacttcgttgtagcctgcgtctccatccttgcccagtctgactttggcttcggagttcatcagcagcacttcggcatagcggatgatacgcacattgttgttggctccgtaggtcgtacgtggaagagtcatctgattgtagggaaggtaacctttgccgttccaacagtcggtcttggtggccgatgtgggacctacctgccaaccctcgcgcgtcttgctcagggctttcaggaaagaagtttcggcacgcacaccttcgccacgggcttcggcccatgccacgaactcgggttcatagcctatgaaattccagccgcctatggacttggtgccttcggcttgcttgtagctgatggtaccgtctgcgttcactacttcatcatacctctctgccatgttcggaccctggaaattgaaccattggtctacgcccaggtaatcgccagaaccattgccgtagtctgttacctggcattcgaacaaagattcgtcacacaactttccgggaattttgaacagctggtagaagtcgtcgtagagacggaatccaccgttcttgatgatgtcatcggtcagtgtctccacttgtgcatagtctcctttcagcagatagatgcgggcggccaatgcttgggcggtgaaggctgtcacggctcccttgtgttccatctggttgggacgcatgcggggcagtttgtcgatggcgtagttcaaatcttccagcatataattatatacggcctctacggtagaacggcgaaaatcggtctgcaggttgtcacggtagatgacggtgggaccgaaattggtcaccagacaatagtaggcccatgcacggatggtacgtacttcgccgcaataggattcgtaggttttgtaatcttcgcttcctgcagcaagatattcggcataaccgtcgaggctttgcagggcggcattggtgatgcggatgatgtcgtagaagttcatccatacctggttcagtgcccagaatgagttgttgtagttgaacttgcgtccgaaggccacggcatcgccctggtcatcggtacggcccgaccacacgtcaccgtcgcgggtgaacatcaatagtgcgttgcaccagtgcatgccctgtgtgcgtactttggagtaggcacccactacgggttggtacatattgttcttgttggtaaagtccacgccttgttcgggaactttgttctccggatcgatttctatgaaatcggtgcaagcggtagctcctcccagtaccatcatggccggaagtatatatgcgaatgttttctttaagaatttcattgttttacgttttagggtttagaaatctatttgcactccgaaagtataggttgaagtcagagggtatacttcggtatcccaaccttcggcatccgacacttcaggtgtgaagctgttggccttgaaggtagtgaaggggcggtcggccgtcaatgagaggcggagtcccggcatcacgtagctgcctatcttcaagttcttgaacgagtagcccagcgtgatgttctggatgcggaagtaatcggagctttctacgaaataggaagcgttgttactgtctgatttgttccaggttttgagaagagccttggccgacggatgttcgttggtagagcctgcacccgtccagcggttctcatactgtgcacggtcaaagttatagtagtcggctgcatagcgcagggcacgcttacggttccacagttcgccgcctgcttgtccgtaggtagtgaggctgaagtcgaagttcttataagagaatccggcattgaagccataagtaaagctgggcacgtatgagcccaacacctgcttgtcgtttccgtctatcacatggtcgccgttcacgtcctcgtagatgaagtcgccgggttccagtccgttggccacggcgatggggtcggcagcacattgttcaggagtctggtagatgccgatgaccttgtagccatagaatgagttcatcgtctcgcccaccatattcacggtctttccgcctttgatgattttcatgtttccttttaggcttttcacttcgttatgcagataagagagattgacgccgatgttgtaattgaagtcctggccaatcttgtcgttccagttcaaggagaggtcgataccggtattcagaatctgtccgttgttgccggccagcagctcgccactcatcgggagcttgggtgaaatcacggcgttgtcagtcagacggtagtaccagtcgatgtcggcgttcaagcggttcttcagtgtactgaagttgacgcccacgttggtttcgttcactacttcccaacccagccagctgaagttggtggtgttgatgaatccgtcgatggcggtattgggaccgaatacggactgtacgttctgtatgcttgcgaagcctgcactggcagcaatcttgtcgttacccagcttaccccagctggcacgcagcttcatgtagtcgaagatgttctggttcttcatgaacggttcctgcgagatgacccatgcggcaccgatggaggggaagtagccccatttgtcgttgtacttggacgagccgtcggcacggaaagtgaacatcagcatgtacttgtcgttgtagttatagttcagccgggtgaaataggagaggccgcggtatttccagccgtcgtctttcaccgtagcgccttccttgttgcccagtgcgatgtatttccatacgtctgcaccttcgggtacgttggtggcagtaccttcgagcaggcggtattgctcttggcgcatggaagcgcccagcatgccggtaaaggagtgcttgccccacttgtcggtgtaggtggcaacgttgtcccatatccatttgtagtagttggtgttcttcttggtgagttcggtaacctctttcttctggttggtgcctacatagtaggtaggggtgaactcggaaccgcgaatcatcgagtagtcgtagctgtagctgctgcgtatgttcagcttgtcggggatgaggttgagttgtgcatagaagttgctcagcacttggtaggtctcgttccggttgtcgtaatagttggcagtggctatggggttgttgaagttgttggtcaggcccacttgctcgggtgatgtgtactttttggggaacaccgtgtcgtcgcggcggtcgtcatacaccgggatgatggacggtgtgttgtatgcctgttgccatgcggcattcttgggcagttgctgctgcgagttgctgaacacgccgttgaaacctatcttcagccatttgcgggcttcgtagtcaagggcggcgcggaagttcagacggcggtagtagttttccacgtccatgataccgtcttgtgccagatagctcatgccggcagagtaggttgccttttccgtaccaccggagacgttcaggctgtggttggtcatcatggctgtgcgcagcagttcgtcataccagttggtatcggcattgaattgcaggttttccatgtttccgccgaattcggccactgaattctcaaaaatcgcccggtaagcttccggattggcttcaagcatcatggtggcatattcgtgggagttacacatctccagcaggttggtggctttctggatgcccacataaccgttgtaggtgattttggcatcctggttgcgggtacctttcttggtggtgatgattaccacaccgttggcggcacgcacaccgtagatggccgatgcggatgcatctttcaggatggtcatgtcctgaatgtcggagttgttcaggaagttgatgttgtcgtagaacatgccgtccactacataaaggggagaggtgtcgccgaaagaacccataccgcggatggtcactttaggaccgtcgcccggtgttcccgaattgatgatgttgacacccggtacctttccctgcaatgctgccatcggggaggaggtgggaacattgatgagttctttttctttaacgacatcaatcggggctgtcaggtcttttgccttggccgagccgtaaccgataaccacgacttcttccagcagttgtgcgtcttcacgtagttttacgttgatgacggattgccccgcagcgcttatctcctgcggcaacatgcccaaatagttgaatacgagagttgcgtcttcggggacgccgttcagtacatagttaccgtcgaggtcggtagctgctccaatagtagagccttttactacaaccgtggctccaataatcggttcgttgttctgatcaacaacagttcctttaactgtctttgttccttgtgccaaaactgtcagtggcaatgagaacaaaatcatgaatagaagaaataaagtttgccttctcataaactaaatttaagagttaataattctgccggcaaaggaagtaattacggtaagtaaggcaaaaaaaaacactaccacgataatacgtttagggtaaaaatgggtactgttttactacgttttcgtgttacttgtttctaataatcagtttgttatgattgaatgatttgtagccgctttatttcaagtcgatgagaaaatccactaatcccgttccgtcggggatatccagtttcttgcgcaaacggtagcgtgctgcctctactccccggatagtgaggttggtcatttgcgcaatgtctttcgtagaaagattcaggcgcagcagcgcacaaaaacggaggtcggtagcggtaagactgggataacgttcgcgcaaattacggaagaatttctcatgaatcaggtcgaaattgttctggaatacatcccaaaattcctgtgtctcgatgttttcgttgatgagcttcagcagagattcgaggttcttgcgtccatattgccctttcaccagggactcttgtacgacagtacgaagtttctccaggacctcgttcttggcaaatacacccagtgccatgctggcaaggtctttactctttgccgacaactcggcttccagcaattgctgttgctgcagagttatcagatgctcctgctcgcgcatcttgatgttctgctgcacctgctctgcctcatactccttccgtttcttttccatggcacggttggcgcgccacttggagaaaaagtagacaagcgctgtgagaactatgagatagagcgcaaaggcataataggagaggtagaaagggcgggctatggcaaaatgatattccacctcaccgattttctgtcccaaatcattataggcttctgcctggaatgtgtattctccgtaatccaggctaccgtagcggatttcgggctctttcaggtccgatgtcagcgccatgccttgtcctccttgcaggacataatggaaatgtacggacaatttattgtaatgcggcaggcttactgagaacagcaaatcccggtaattgctttccagttcgacatttccagacagaggcaggcgtttctcctttttatcggaagaggaagcagtgaccgagctcagtgagagggcggactccagagtaggactgaggctgtctgtgtttttgctgtaactggcgattccgttgttcagattaaaatagacaacgtcattgtcgacgaacacattgttgtagttctctatgcatggagaatcaaacagttcgatgaggatgcgctgcttcacgatgtactctccttctgcgtactctaccagtacgtactcatgtgaaccggacagccagaagcggtcgttcgtgacggataccacagaatgagcattcctgatgtaaggcagaatggcattcagcttttggaaggggataatctgccgggtgatgtcgtcataggtatagaagccgttgggactggaaaagacgatacgtcctcgcattttcattacttggatagggccgatgatatattccgagcctaaatgggagatgtgccgtacgctttttacagccgacaagtcatcgctcaagactattttatagactccctgatacatgtgtgaagcccagatgacaccgctttggtccacctccaagtgcatgaccggtgcaatgaagccgtctatgacatgcgaaaaggtccattgcccgttcttctttttatagatacgcaaattggcgtaggatgattccaacagtatctcttcgccatagagggtgcactttatcagacacgtactgctgttggtattgcttatgacggaaacattccctttttcgcctattaataaggtatgggcattgttgcctgcaaagagttgcccgtcaatgtccttcacataccagttctgtccttcagtatggggaagcaggcgcagattctcggtaacctggtggtattcgtacaagccctggttggtggccagatagaaacagtcgccccggtgggctatgtcgtacaccatgcccagtttggtttcatggttggcaggagtcagcagcatgacgggtgagttgtggtggatgtatgcgatgccgtcgtccaatgctgcccatacgttgttgtctttgtcacagaacaagcccaggactgtgttgttgtccagacggttatccagattgaagtgccagaggcaatgtcctttgcggtcgatggcgtatatgccattcaagactgtacctatcatgaatatggaatcattggtcatgacggcgcggttcacccgctgtttcttcagctctgcatcaatgtctgttttccagggggtgatgtcaccgttgtagcggaacaatccgttattctctgtgaccatcaggaagctgtcgtccccgtcgggcagtaatgccactacattgtcatcgttcacttggctgcgggggaagagatgaaggaaatccttgccgtcgaattcatagaagtcctcatcaatcatctgtgtgtagatatgtccgttttgggtgtagaagtagagcggctgttgctgtctgttgcggaaagcgtgtaccatcttcccgtcgtaggagaaccaggcgctgaacgactggaagtagatgcgaccgtccagctctacaatgttccatatctcgttgttctccatggggaaatttttcaggaatttgctcaaagaatggtaccggagagtgcctgcctccgaatacttgaaatagccgaattcctcgaatgcccccacatagatacggtcttctttcacatacaccgaacggacaatatggttccccggcactttgtggagagtccagcgataaccgtcatataccaggagcccctggctgttgccgaaatacatttcgccgttgctgccttgcgcacatgcccagttctgataaccggcttcatagtctttggcaagatagttggtgacggcgggcatgaaggaagaagccctggcctggatgaagaggatgaacaatagaaggcacactacccaatacttgaaaagcatcggtcttatcgtattttgtttcattttttcaggttaatcgaagtgtttcttggaagcaaagatacaataagtattctaaatattgtgttttgatgagataaaaaaggtacttgaagcggttagggaggatgcttcttaatgaatatcctcccctcttagttgtttgtcttttgaaatttattatagggattgtgcggatgataggactcgaacctacacgcctcacggcaccagatcctaagtctggcgcggctgccaattacgccacatccgcggaataattccgattagcgggagcaaagatagaaagaattttcgttttggcaaattgttttgtagataaagtcgttttagaaagtcactttcagtatttttcttgcttcctcaatgatggtgtccaagtcattgttctcatcttctttgctcatatccactttcttgtccgggtcgatgccgaactcgatatgctgtttttgggcatcgaggtgcgggctggcagaaaagcgtaccccccatccgttgggcagttccgaagagaatggcaggcccgacccgccgccggttttgtcaccaaccagggtgacattgggaaaacagcgcatggagttgacaaaatcattggttgcactataggaatgacggttggtcaggacaattacctttttttgccagcggatactgttggaaggttccacataaatgggagtcggatctgaaaaatcgctatggcctttgccggtcttgtgctgaatatatcccgtcagtactttttcattcgtgaagcgttgtgccattcgggtggcgtttgtcaggttgccgccaccattgttgcgcacgtcgataatcaggccgttacaagcggaaaggtataacagaatctcatccaggttgccgtttccgatgccgctggagaaatcaccgtaatagatatatcctatgttgtcctccaatatggtatatttggcgcctccagcaatgcggtagtctcttcccaggtacttttcaatgatactttcgttgaagttacgaggataatccagataccagtcccagtagcgcgccatgttggaagaagagtacaagttgacatgtccgtcttttaactcggcaagcatgttacctaatatttcaaatagaccgtcgtaactcattcccggggtaatgagtggctggtacttgtcatggatggcatcccagtctatttgcttgtagtccaggaagcagtactgttcgtctattattttccacaaggcttcgaaattgccttgtggggtattgtcgaactcttcctcacgaatacatccgttcaataggggcaataacgtgagtaggatactccaaattattaaaatatatcttcttttcatgcacattatccttatcatcttatcgtttatcaccttgtcactttttactttctcttgttaggaaacagatagagttcctttacgaaccccaccatgaatacgtgcgagtaagtatgtgtctttatttcatttactttggactgttgtgcgtcccatatgtaagcgaaacgcatccgggcacgtcccaccggaaagtctgcggtcagcatttgtctcagagagggctggttgtgcagggaggtgaagttcactactccgtcccaatgtcctaacgtaaatatctcgtagtaggactgtccatagttgggcatgaacatgatacctgccaagggaagatttacctgatagcgtagtgtgatgggacggttcttgatgcgcaagtcccaaatagccattcccgatgcggcaaggttgatataggcacgtgcttgggcggggttgtttccgttgcgcagattatagacaaagccaccgttgaagtcgccgactcctccggcaagcagtttgaaattgcccgtgattggaaaattataatgcaggccgtagttccagttggccagtccggagaatgtattgttattgtctactttgttgtgtgtatatcccaagtctgcctggaagaaagtttgcagagacacgttgccgtccatcaaccgtgtcatccgcatgctttcgcgggagatacggaaatcgattcccttatactcctgaggtgaaagataagtgtcgaacacgttggtgaagccgacaccatacatggtggcacgggtgataatacggttacggttggtggagtcagcccgtagcttccggtcgatgctgcattgtgcttcttgtgctttcagtccgacacttcccaagagcagtccgcataggattattatcttgtatatgtacatattaaattatcaattacaaattagtaatcgttagccactaatacttcatttccgtccttcatcaaaagagtttcatctgtcctgtcatctcgtccagtatgtccccttcgcttttaccgtggtcggggtccagaatttccggttcttcatccgtttcctgctcttcggttttctgcgagggttccggttgacgggtaggctccagctcgttgatggtttctatagtataggtggtcaggcgcttaccttttgctttgaagcctttcacggcgatgaattcgtcggcttccaccaccatcggctctcggaaattgtcgtggccgccaaacaccacctctaaacgcgggtagcactcgtctgtcagcagaatgaggctgctgttcttgttttctcccaagtagttttgcttgcgggcggttgcctcgaagcagaaacgcttgatgtaaggatagttctgctggtcggcatcgtagagtacggcggtccatactttgttcggatcgtatttctccaatacgcgtatgccatcgtcatagtgattgttcaagtcgaagttggtggcatagaactctccgctgttctgtacgacaaggatggtgtcttcgctctggaattctccgagatattctccgcgcccgtcgtagttgagacgtagcacatcacggtcgaaccagactttccgtccacccagcgtggagcctccacgttgtttcaaggctatcttgtgtacggggagtttcgtgagtatatttcccatggcctgccgtcccttgatattgatgttgctgaaatcctcctcgaagataatacggcgtacacggggattgggtttcagggttaccttgatgatttcagcttctccattgggattggcggtgaagtaggtgatacgggagtcgggagtaccttgcgtcacatcgtattcgcggtcacgcaccacggaagtgacggcaaaacgcttgatatagcttgtcccctccttgccgtcacggtagcagacattgtagatggtacgtttgtcgttcttcttaaaaatgttggcataaagtatattcttgcccacgaacttcttgtcggccaccggtgtgatgatatattttccatcgcggaagaagataatcacgtcatctatgggcgagcagttgcctatgaattcgtctttcttcaatccagttccgatgaaaccctcttcgcggttgatgtacagcttttcgttggcttcgatgactttggttgcttcgatggtgtcgaagttacgcagttccgtgcggcgggggaaggctttgccgtacttgtccttcaacatacggaaccagtcgacggtatattccacgatgtttgccagatggcagtctatctcctctatgtcctttcgcatgcgtgctatcagttcctctgccttgtcggagttgaatttgaggatacgtgccatctttatctccatcagccggaggatgtcttccttggtcacttcgcggataaaagtcgggtagtagggagtcaggcgctcatcgatatgttcgcaggcggcatccatgtttttggcttgttcaaactccttatccttgtaaatacgttcttcaatgaatatcttttcgagtgaagcgaaatgcaggctttccagtatctctcccttacggatttccagttcctggcgtagcagtgccaatgtgttgtcgactgatttgcgcaatacatcactcacggtgaggaagtggggcttttggtcgtcgatgacacagcagttgggagagatgctcacttcacagtcggtgaaggcatagagggcatcgatggtcttgtcggatgatacacccggggctagatgcactaatatttccacactgccggatgttaggtcctctaccttacgtatcttgatttttcctttttcgctggcctttacgatggagtcgcatacactggccaccgttttcccgtaaggaatttccttaatggcaagtgtcttgttgtctatcttttctattttggagcgcacgcgtatcgcaccgccacgttcaccgtcgttgtatttggatacatcgatactgcctcccgtctggaagtcggggtacagcttgaattcttcgttgtgcagatagctgatggaagcatcgcacagctcattgaagttatgtggtaatattttggatgacaggcctacggcaataccttccacaccttgtgcaagcagcagtgggaattttaccggtagtgtaaccggttctttgtttcgcccgtcataagagagtttccattcggtggtcttggggttgaataccacgtccagtgcgaacttggagagacgtgcttcgatataacggggggcagcggcgctgtcacccgtcagaatgttaccccagtttccctggcaatccacgagcaagtccttttgtcccagttgtaccagagcatcgccgatagaagcatcaccgtgcggatggaactgcatggtatgtcctacgatgttcgccaccttgttgtagcgcccgtcttccatgcggcgcatggagtggaggatacgccgctgtacgggtttcagaccatccatgatatggggtacggcacgttccaatataacgtatgaggcgtagtccagaaaccaattctggtacatgccgctcagttggtgctttatattggcatcctttgcgtccgcaggtttgtaatccgagtgttcttcgctcccggccgggagttccttgtccaaatcatctttcggtgcttcaaaatcttcgctcatatttgttcgggaattgtctattctatgatattactgatttttcagtcgcaggcaaaaatacaatttttgttcgataaatgagaatttgcgcggaactattgtgccaaatccttcccattttttaaaacttctgcccgttaatggaaccaatctgtctctttcccgttagcggaattatattgaggacgtgcttccgcctctttgcggacagcgatgttgcttttgtctttcttgccgacaagttggcaaggttttgccaccacattggcaaagctttgccaaaggcatggcaaaactttgccaatatggtggcaaaacgctggcaaagtaacttgctggcttgttgtgtgttggctcgaattgtgcagcgatatcatcacaagggtgaagagatactgggcagattctgccgacggattcattattttgtgaatttccattcgtcaaataagaactttccgttcccgaatacgaagtaaatgtcgtgtttgccttttatccgtttgtccaacggctttgtcaatgtttgccacgtatcggtatcaaaggtcaaggtggataggagcggaccgtctggactgtccatgtgtatttcgatggagcctttcccttttatcttcatctgtatggcttgaggtgattgcgggaattccgcaccgcggacacagatggcctgtccgctcttgtttcctacggcagacatgttgcctgtctgtccggtaggttcaaaggcaacgccgcgtgtggcggctgtggtctcggcctgttgctgcgcaaacgggtcgagaggcttgatttgtgaaacgcccttggctgtggctgtgcccatgtggatagtgaggtccttttcgtccacctctatttcttccacgcagatactgcggacacccactttgaggtcgcggctgtcctgcaagcccagtgagtggtagaagagatagtacttcccttgaaattttaccagatgtgtatggttgttgctgtcggacatgccatagtcgccgggatttttgaagtagttgtcccgataggtccagctgtctgtctcaagtggcgtgcgactcgtcatgtagctcatgcagcaccggctcggcttgtctatatccttgtggggccatgcatcccggttcttccagttggtgttgtaggtgtaaatccaagtgccgttcagatagttcagttcgtttgcttcaaagtggtatggcgcttttatttcaactatttcgctgtccagcgtcttcatgtcatttgccagccgcacgatgcgtgcgtctccgggaatgtagtcgtcgctgtcgcccccgccaaaggagagccagccgatgcccttgtcgtcgatgactactcccggatcgaagggagctttacacttgccgagtcctggagtattaccgtctaccacacatttgcccaatgggtctgtccagggccccacgggggaagtggcagtcagcatacctacaccggaaccgctgttggagtagtacagatagaagtgggttttgccgtcggcctccttgcgcgaagcgatggaaggtgcccacgaagccattccccagggagccagagcctttacattgattactccgtgataagtccagttcaccatgtcgtcagaagagaccatcgtcagcgaatggatgtgctgataggtgtttttcccgttacggcccactacatcatattgctggtggtcgttagtgccgtacacataaatgcggccgtcgtgcaccactgctgtggggtcggccatgtattggaagtcgagaaggggattggcattgccggtagagaacttgggcgagaattcaaaagattcttccaaagcgctgtctgtagaaaccggaatgttttcagaagaggcaatgctgtctgcccggaagggggctaaggggatgccttccgttgaaaaaaggttgccttgagcagcgtcactgaagcagtagcgaatggaaaccgggctttcgattccttttaccgggacaatcagctttcccccgtctatcctggcccgggcctcttgccattcctggcaggctgcggccatcatcagcccctctatccttttcccgtgtacggccagtccgttctttatgtctttgaaagagattgtcacatggttgcctttgcggcaggcgctttcaaagaccgggcttttataggggcctgcatatatatggtatgtatcgtccagtgcaagattggcgagacgtttgcctacgcttcttttgtcacgtggatggatgtcctgcacattgtccaccaaatctgacacggtaatcatcttgaccttgtccagcatttcgggcaacatggcctgctgctcgcgtagcagtgccggtccgttgtctttggagtggtattggaagggggctatctggaccagatagaatgggaattccttgttaaatccggtacgccacgagcctatcagccgctgcatcacccgggcgtaggagctggcacggccttggttggcttctccctgataccagatgcatccggcaatgccgtagggcatcacgggataaatcatgctgttgtacaacgtgcctgtttcagccggaaaccaaggattggattcatacggatagtcgcacaagaccgggtcgctcattacgcattcgcggggcgtccatgtctcggcggtggttccgccccatgcggctacgatgattcctaccggcacgtccagctcttcctggatgttgcggccgaagaagtaggccagggcactcgtgctgcgcatcgtttcgggcgtgcactgtgtccattgcgagaaacagttttcttgagggaacggggcggctattctggccacgtgaaaaattcggagattgggacaatgggcatttgccgtttcctcgtctccgttctttatgccgtggttggcgctccattccatattggattgtccgctgcacagccaaacttcgcctagcatgacatcggtcaaggttacttctgacgagccgctgaaacgaatctcataaggtccgccggcttcgccggaaggtacacgggctgaccatttccccgtattattgacttgggttttgattatttctcctttcatccattcgggggcgatggaaattgtttctcccggaataccccatccccagaaagtaagttctgagttacgttgtagcaccatatggttggaaaatatggcagggagttgtatcgctgcttgcaatttcaggatgccgagcagcataaataaacttaaaagggtaagataatgatggtattttttcatacgagtatttatttccataatgcaaattaatagctgtttttagaaaccattacattttaaccgttacttttttcccattataagccactgccttttttgcgccatcagcagttactatgttgaatttccgttctttcaacataccggaaaactctcctttccgattttcaatagtgagcatgcgagtacggtcattccatttcatcgtaatggtgctgtacattcctttttcataattgtagttgtcattctcgtcttcgtaaagtgtgaattcgccgttacaaccgggatacacttttatctccaagttgtcccatgatttttcggtgctatactgcacttcgggacctattggcaggatggaacctgctttcacataaagtggtaaaatgtcaataggggtatctttcacgatatattgtccgccggagtgtttctgattggtccaaaaatcataccattccgtatttttaggcagatatattcgtatagacttaacggtactgaaatcttctacacggatggtgtccgaaactgtttgggtatacatgggttgggttacagggcataccaatagggatttgccaaacatatactgattgtggatgttccacacgttgcgatcgtgggcaaaatccattgccaaggcacgcatgaagctggactgattggcagttacctcccaggcagttgtgtagatgtatggtaacaaactgtagcgtaaccgaatgtatttctcaatcgcatcgtatattggctcgccttttttgccgaattgatagatttctctgggagcaccttccccatgtgaccgcatcatgggacagaatgtaccgaactgtatccaacgggcataaagctcgcgataatccgggtcatccagcatcaagggatattgccataggaagaatccgccgatatcgctgttccaatggggaatgccacatagtgagaagtttaatcccgcaggtatttgcttctccaaaacttcccatgatgctgtgatatctcctgtccatgtattggcaccataacgttgctggccggcaaaggctgagcgggtaaggataaatacgcgtttatctgaagttacggcacgctggtggtcgtacactccacctacactcattaaagggtaggcattgcgtactttacggaatgaccccaaataggtgggcgtgtcaaaatcttcaggaatggggtgaaaatggtcgggttcggtagagtccatccaccagccgtctatacccacagaacgtaggttctcgttcaggtacttccaatagatgtcgcgtgcttgcggatggtaggcatcgtacacgcgggcaccggatggatagtccatattgggaggccacttctcggaaccggattcgggccatgtgcggaagttgaagagcatgttccctttgtctaactcgcgatagggtttggtatgtggtccgaaagctgaccaaatggagataataatgtgggcgttcattccgtgtatgtcttccatcattttttgggggtcggagaattcttcgttcaaaaaatccattgcgttccacaggtagttgcttccccagtatctccaatcctggataattccatcgaggggcacacccagttcgcggtatttttgcactacgccaacaatctctttttggcttttgtagcgttcacggctttgccagaatccatatgtccataatggaaacatgggcacttgtcctgtgaggtagcgcatctgggcaactactccatcggcattttcgccgtacatgaaatagtagtcaatgcagtcgccgacttcagaaaggaaggatgtctcttcttgattgtctttgaagatggttggcgaatagttgtcccaaaagagaccgtagcctttgacggactggaagaagggaatcacatcttcaagattgtcttggataaggcgtttggtctggttacgttgcgacattttgccgttttgcaattgtcccaatccataaatagcttcgtctttctctaaggtgaacgattgataaacgctgaaggtttttgtgccggcatcgttgaaatcatcaaaacgtgcacctttattttgttcttgcaacagcgattttccatcggaagaggcaaaagttatttgtccggtctcttcgttgagatggactgtaagctgatggcttttgatagtcaatatgccccctttcgaagagacggatagttttactttttccggttgcccgatgaccgacaagctttctttggtatacttccagccgtcaggcgattttaagattctcactgtgacaggagagaagaagctaatatctatatttataccttgcacagtgctttttatgccttgtgaggtgcgttggtaggtttgtgctctgccttgttctgctatgaaaaatgtcagcatcagcaggacaaataatcttaaaaaaaatccctttttcatacaatatcagcagtttaacggttagtgattttcagtaccaaagaaataggattgggtgtcttgtctttgggaaggtcaataagcaagcctttggaagttcttctgaactttgcctttccgcctcctaataattctaccttttcgatttctcctttgcagtagggactgccggtagccagtgattttatctgtatttttccgtctgagggccatttcatgatatgggcatacaagtatttcccttttttcacaaaccggatgtcggcagaagtgtagggtgcgttcttgccttcgttgaatcctgctccgtccaaaggtattgctgtttctgtggagggaccttcaccataaatacaccagggacgtgtgtcgaatattccttctccgttcacctccatccaggcggctatgtcttccagaattttttcttccttgtcgtcgatggtgccgtttcctttcattggtacgcttagtaataggttgccatttttactgacgatgtcaatgagcatgtggatgacggtcccggctgatttataccagttgtcttcgtaagcagagcggttatagtgccaagtaccgaggcaactacaggtttgccacgccttgtcctggcattccgatggaacccctttttctacatcccatacgatggcctctttatgtttagcttccagcttctttccgaagactacagcattgagattgcccttgtgaagcttcatgttctggttatagtagtgcgacacgactttcagccccgtatcgttgatgggccagaaggggagtacgctgtcatcgaaatagaccaggtcgggatgatatttgtttatcatgtccactgtgcggtcgaagaagttgtcgtagtaactctgcggggggacagaggttccttcgggccagtcccatgccacccaagcatgtccgctcagggcatgattctgtacgtatagctcttgcgggtcgtagccttcccaccattttcccttgccgtcttccttagtcactacgcgggcatcgtaggagattcctgcgtatgggcctttcttgtcggctccttgtgcagtttcataccatgtccaagcatgggaggagtggatgctgacaccgaagggcagtttgtttttgcgggccgctttctcccattcgcccagtacgtttcgcttggggcccatgttgacggagttccatgattggtatttactatcccacaagtccatgttgtcgtgatgattacccatggcaaagaaatatcgggcaccggttttcttgaaaagggctaccagcctctccggattccatttctcggctttccattcgttgattacatccttgaagccgaattccgaaggatgtccgtaatgctccaagtgccacttgtaggcagcaccgccctcttcgtacatgccacgaccgtaccagtcgccggcttcgggttggcattgcggaccccagtgtgcccatatgccgaatttggcgttgcggaaccattcgggcacttcgtattgggacaatgactcccaggtgggtgagaacttgcccggttctgctttctcttgttgtgccaatgcactgcccccttgcaggatgcaggcagataggagaattgttttaaagatgtttcttttcatacctttattgttgtttacaaaatgtttatttcctttttgaatacattgatgaacggattattctgttttgtccatatactccatgataaacccatatcggtaggagcgattgccgtcaatggtgtatggcttcatggtctgtgcgccccatccgtcgtttccacctactccgtgtatgttggagtcgatattcaggttgatgaagtcgcgttcgggcagttcgtgcgcatgttctttcccttccaggtcttcttccccgtagggccatatacggaaacataggggttgcaggcctttgacttgtattttccatcgctcactgtctcccagcatgaaccagcgtgtatcgcaccggttggcattgtcttgcggtacgatgtagttcgtgataaattcgtgtatgccacactcgtagactcccaggaaagcggagctcttgcggtcgggatagttctcgaacttgccgcgtccgtaccaggctatccggttcagcgccgagggcattctcatgcgcataccgaatttgggcatcagcggaatatcttccttttcaggctgataggttgcttctacttgtatgcggcctttgccgtccacagtgtagcggagatggtaaccggctcctatccgggggagggagagactggcatccactatcaccataccatcgtttacggttgcttggtatgcctttacgatacgtttttgctctgcatttttccaagcgctcaaacgttcattgtagccgttgcggacctgaatgtcatttgccggtttccaaaaatagggttccaaggcactgtgcaacaactcttctcccttgactcgccaactcaccaaagcaccggtacctttttctatggtgaacaaggcatcggcggctataatttccaccgcttcgggtgtctccttaaacgtggccttcccgccgtcatccttcaattgtgggaattcatagtcatgatacgtaagttgttccttggcaactttgaagcccttctctgcccacgtcgtggattccttcaacgtggcatatacattgaggcaaagttccccacacttatccggtcttgaaggtacctccagcagattcccttcggacaagtggaggtcgccgttgcgtacagcctttccgttgcatatccactcatagctgtaatcgaattcatccaaatcggaaaacgcatacccgttggtcaatttgatttgctgtgttcccttcttttcaaacttgatgtattgatatactttttgtacttcatagtaatgggggtgaggcacccggtcgggagataccagcccgttaatgccggtgggaccgtcgttgggatagtccccgaaatctcctccatacgcccagaattcatcgggcagtaatgggagtgacgaggggctctcgccgaaacttaacggtgcaccgttaagctttttaggaatgccttggtctacccagcaccaaatggcagctccgataatactttcgtccttttcaatcacatcccaatactccttgaggttgccgatggaatttcccatggcgtaggcatactctctcatgaatacggggcggtcggttattttctcgccaagttccttcaaagcgtcgggatgcagataagcttcgtcatagacatcggatacggtgcggtctgtatcgtcgtatatcggtctggtggggtctaaggcacggattgtgtctgccatagctcgcaaattggcaccgcttccaccctcgttgcccaatgaccagaataggatgcacggatggttcttgtccctttccaccacggctactgcccggtccacatgggccagtgtccattgagggttgtctcctaatactttgttccccaaaccgtaggcatgactttcgtggttcgcttcgtccattacgtagattccatacttgtcacatagctcgtacagcaatggcagatgtggatagtgggacgtgcgtatcatgttgatgttggcttgtttaatcagccggatatctctctccatcgtccggctgtcgacaaagaatcccatacggggatggaagtcgtgacggttcactcctttcagcttgacggctttcccgttgactttgaagacgtctcccgcgatttctattttccgtatgccccaatggtattcgaacgattccaaaagttcattcttcctgcgaagcttgatgtggatgtcatatagatgcggtttttcggcagaccatagttgaggctcccggagcatttcggacagtgtgacgctcgtttcagaaaaggcctgaatagtacctacgggagccaccatttttttgtcgagtttatttcctctgttgtctttccccaccaggtttatttctacggtcaggtcttttactttgcggtcggtctggtttcttatccaaatttcggttccgaatgtagctgaacgcatgtcgtccgacaagtcgctgctgaacctatagtcccggatatttgtccggggacgtacccatagctctaccggcctgagtattccactaagccgccacatgtcctggtcttccagataactgccgtccgaccaccgatacacttccactgccagacgattggctccgttcttcacaaattcggttatgtcaaactcggcaggcgacatcgaattctggctgtagcctacccgctctccgtttacccagacatacatggccgattttactccttcaaagtgaaggtataggcacttgtctttcatatcgggcgtcacttcgaacgtggtgacataagagcctgtgggatttctgtgcccgtaactgtaatattcggcgggaggctcgcttgtcactctgggtgcatccttctggaagggatagtttacgttggaatagataggtttcccataaccttgcaattgccatgctcccggcactgtgatggtatcccatgtgtcggtattgaaatcattcttgtagaagtcggccgggcgctttcccgggtcggcagaccattggaatcgccacttgccgttcagggatatgatttctttgcaatcgactttttgcgaaggcaatgtcagtgtggcatgatacggctctttgttgatgccgactacaataggattctcccagtccggagcttcttgggcgccggcatatagggcacttagcaatagaaaggcaaatatcttttttctcattttttctcatgttttctgatggtcaataaacttccatgatgagaactccccaggggggcaatgttacatggtctccttcttttacagtcttgccggaaatcagctctttggatgtcggatagttatgagtgatttctttactctcgctgctgtaattgaagaagtaacggatggcttttccggctttgtttattcccgaacgctgtatgatggggaacacgtcgctctctgaagagatgataccggcatggatggctgcctttcgcacgatggcattcagcaattcctgcgaagggtaggctcctatgtaggtcagtttgcctttgccatacttgttttcggtgacaacgggccatttgccgaagaacggatgctctgcataagccaacggggtggctgtctcgggaatcaggaattcataccagtcgcttatctggttctttccctctaattgaaaggggttatcctttaatgataagtcaccgatagtggagaattcctggtaatggaagccgcaggctttgcgtagcggcccgggagccaaggtggcccgaactgcggagtgctcattgcagtaaccgcttttgtgcatcattaccacgtgtccgccggactgtacgaattcatcaatggctaatagcaattggtcggtagccacatacaaagggggaatgacaagcatgtcatatccgctgaaatcggttgtcttgtcacaagggatgatgtccgtttctatgttttggaaatagagggctttatgcaccatatcaatgggataattgctcttgtaagtgtagggcatgaagccgagagcatgataagaatcatgactgtagaggatagctacccggtttttctttttcaagttcacgatgtggctgcctattctttccaactctttggcggtggtggtgaattccttgtatatgcggttgggctggaggtcatggcccagcacgcctcgccagtatgtctcctgcccgtagtgcagggtagaccagtgccagtattccaccatattggctccggaagcataatgtgcgtacacattctgccgcaactggttgtcgtagggaggaaactgggtgcgggcatcccagccgatgccttgtgcgttggtttccatgacgatgtaattgttgtcggccacggtgcgcacgaagtcaccggcataagcgatgcgctggccgtcttgtttatcctgtacatcgtgatagacattgatggcaggatattgcatctgcctgaaactttccacttggtctatattatggaagtcgggcataaagcagtgggtgacaaattggtctttacgcttgtattcatttacaaggtcgcactgccaattcagaaaatcggccacttccttccggttatagcgttcccattcattcttgtacgaggggcttgtcactccatcgcgcggatagaactcttcccaggtgttgatgttcattccccagtagttcattccccattccttggcaagcagattcaggtcattgttgaatttctgtttgatgtagttcctgaatccgaagaaatagtctctgttgtttactccgcgcgcttctgtttcgttgtccacttgatacccgatgactgccggatgctgtgcatatctttccagcatcttgcggataatccgttcgcaatagaattggtaggtcgggtttgtaaaatccatgttctgtctgattccataataggctttgtttcctttggcgtgttctgccagcacttccgggtgtttgtatgccagccatgcaggaatggaataggtgggagttcccaagatgactttgattcctgctgcatgcatcttgtccagaatgcggtccatccattcaaattcaaaatttccttcttgcggctcaaatactccccaggcagattctccaacgcgcactactgtcaggccggctcttttcatcagccggatatcttcatccagtcgctcatagggcatatattcatgatagtaggctgcaccataaagcacgttgtcgaatgaatactgcgcttttatttgtaaagcgcttaaaaacaacactaatagaataaagtaatttttgtttttcataatcttaccagtccgatacaatatttttatttcatcataggtcttatgctgatggttctccgatattcctgcggcatcgccttgtaagcaccgaatacaccgcgggccgtacagccgaccccggtagtggcataatcgagattcagggtcatgcctttctgcttctgcaattggtaggtatacatcgctttcgtcagattgtctgtgctgtacggataaatgttgaagttgaaccattcgttcatcttgaattgaaggccgatgcctttgtccgtggtcagttgcagccagcgtacatctgtccgcaatccgtaatcttgtggcattagatagggctcgtacatagcttgtacggtagaggcatatatccccatcggatagccggttttccggtccggatagttctcttgcggtcctcggccgtaccatttcacttggtcgagcgcatcgcttacggtcagcgtaagtcctatgcgaggaaaccaaagcggcattttcccttcaggcttcaatacatggcgtatctctatcgtcccttcactattgataatatactcatagtggttgatgatgccgttgttctgtactccttcgatgtagaggtcttttttctctttttctcctttgcccatcaattccgcatcaatgatgtgtatatgtacgccttcggtggtttcggacaccgaaaaagagaggggctgatgtgtcaggcggtcaatccctgcagaatacatttctgtggctaccgtgtatccgtaaccttctttccagttggaggagcgggcgctggaggcattccagttgtccagctcattggccagcggggcacgccaaagattcagccggagcggtgattccagcagttccatatcttgaacaaccatcgacgtcagttgtccgtcggtacggttgaatacatatttgaagccatctccggagacaaccaattctttctccgaaagtgaataggaaggtacgccttgagccttttcttccgaagagcatggcaggctccaaggcagttcaagttcttcccatgccacctcatgtccggcttttgcccacaattcatcttttttcaggacggcatgaagcatcaggcggtattctttgccgggaatcagggttggcttcttataaggtatgtgcaccagctcttggctaagcggcgctgttgagagtgccaagtcgcccgattgaataaccttgtcatcttctttcaattcccatcgtatggcatatcgggaagcatttgtataatgattgcgattccataactcaacgactccctctgtcacatccgacatggaaaaagaaagaggttgtccggttttcttcatttgccacatttcgggctgtacgctacggtcgggccagatgctgccgtacgtacgtgcaccgatgccgtaactgtagaatgtaccattttccgtctcttgctcaaaatctagccacagagcggcttcttccgggtgaaaagaggaagtcagtgccttggcgaaaatgccgacttcgtccatttgagcatcgcagatgtagaccgaagtctcttggccgtgtgtttctgcattccgaccgatgttgacggggtaggggaagttccggatattgcccgatgcttgtgtggaggccttttctgctccgtctatatagatggacattttctgtccgtcgtagacgcacgtcacttgatgccagttgtattcccagtcagtaggcaaggaggcgcatacggaatgctttttatcagtatagatataaaattccagtttgtctttaccgcgttgttgcagcccgaactgataattgccttttgtgatgaatgagccgcaactgcttaccagtttccgggggtagattctgcaagtgagtgtcagttcattactgttcaactccacattgtctgcacgatagacctctacccattggtcgtgaccgttcaagtccagcaccgtgttctttccttccttcaccaagcgggcatttcccatcagatgggcgggagtatggaagggcgaaaggtcgtccacttgccttatccgttcggtcagtcccggacttacaaaatcccagatggcccctcctatcaggcggggatgtcggtagatggcttcccaataatcgtccagggcaccgccggcattgcctgcaaccgataagtattcatccataaacgatggtcgggaatcctctcctatgcctacctgcatttccagttccataggagtagggtaacggggtccgataatatcttctgccggatgggagaatgcatttccgccatacatccagaagcgggtggggtccagcgatttcccttcttcaatggtgtgggtaatgttgataccttcaccgctttcgtttcctgcgctccagaacaagacgcagggatggtttctgtcccgtaacaccattctgcggcatcgctcgcgatacatctcttcgtattccgggagacttgaaatccattccgaggcatgggcttcatcgcccacctcgtctatgatataaagcccgtattcattggccagttccaaatacttattcaccggaggatagtgagaggtacgtacggcattgaaattaaactgtttcaacaattcaaaatccttgcgtatggtggcttcgtccatgacatgtccctcttcgggatgctgcatgtgcgaattttgtgcattgactttcagtgggataccgttaagataaaaaacaccgtctttgatttccgtctttttgaatccgatgaccgtttctatcttgtctttctgcagaccggccggattggataattccagaccgagcgtataaagctcgggtgtctcggctgtccatttccggggttcttgtaccaaggtatgcaactgtattgtcttttccgcagcgtccatttcaaatggagctgcggaaaagttacagataatcttgccgtttttatcctttaagtaagctttcaatccataattctcatttggcttcttttggtagtccttgatttttacctgaatacttaactgcgaatcggtatacgtattatcaaactctgtgattacttgccagtcgaatatcctgacagcaggtgtggcgtacaaccatacgtcgtcaaagattccggccagtcgccaataatcttgtccttccaggtaatagccgtccgaatactttagtacacagacagccagcgtgttttcgcccggcttcaaataaggagtgatgttgtattcggcaggttcttgtgctccttcattgtagcccacttcatgaccgttgacccatacaaaagaagcggatgccactttctcgaaccttaaaaatatctggtcttttgctgcccaacttgcaggtaccttgaatgttcgccggtatagtccggtagggttatactctttgggagcatgtggtggattcaccccgaagggagcagatacatttctgaacagcttgtcaccataaccttgcatttcccagtttgagggaactttgatgtcgccccattgcttatccgggaattcggggttaaaaaagtgtgcaggtatcccttccggtgtatcgcaccagaaaaacttccatgtcccattcagtagcatgctcttttcgggcatatgccaagcgtgtccttcctcttgtcctttttcaaatacagaagggttgtctatataccagagcatatccttaaggaaggatttgtcttgtgcataggattgcaggcacaaggctactgaacacaatggcagaaacagttttctcagattcatttttttgtaattcgtgctgtccatccaccgccgggtgccagttgtacattgagtttgtctttggcagtgacgatgcgtacttcttttttatagtcggtagcttcacggtcggcattgatgccgtcggcaaagatttcggcttcgtagttgccttcgctgaggaaggagaggtcgatggtgcagctacgcggagtccagttggtcatgctgcctacaaaccaagtgtttcctttgcggcgtgctatcgtgatgtattcggctattttaccatcaagagcaatggtttcgtcaaaggtagtgggaaccttggcgatgaagtcggtgcattcctgttccttcatgtatttgctgggactgtcggcaagcatctgcaagggtgcttcgaagacggtgtacatagccatctggtgtacacgtgtaccttgactcatggggtggtcgttgacggagcggaacagggaacgggtggcatttaccatagctcccggcgtatagtccatcggaccggcgagttggcgcagatagggggcggtaacgtcgtagcgcgggaagtcatgcaagggtgcaccgttcacgatgggctcccacttgctgttttccagtcctttcacaccttcaaagttgaggatgttgggataggcgcgctggatgccgaagggtttcagtccgtgtaggtcaagcaacatgtgatgcttggcggcacatgctgcgagttgttcggtagaagagatggcgagttggtcgtcgcggtcgaagaagtcaattttgaaacctttgattcccatttgtgcgtagtggctgataacttgttccacggcaggggagatgtcgcctcctcccgtaagattgcgccagcttgcccagaggatgatgcctatgcccttttggttgccgtatgccaccagttcttcgagattgatttcgggactgatgtcttccattaatgattcctttccgctccaaccttcgtcgatgatgatatactccagctggttttcggcggcaaagtcgatgtatttcttataggtgggcgtattcatgcctgccttgaagtccacgccggtcaggttacaagtattccaccagtcccatgccacttttccgggtttaatccaggatgtgtcagcgatgcggcattcgggtgcgaggcgttgcatcatgtcgttgttggcgagttgtgtgtcgtgggtaacaacaagcacggcacgccaaggataggtctgtttccctgtgggacgcccgttggggcagaagtagggggcattgttgggcttgctgataacgtcggcacgtttggtagggacgaggttcaagcggtcatagcctccgatgactgtttccagtggatagggggcgaattctgccttcactccgtggggcatctgtgggttggcagtgaggaacatgccgggatagttggacaatccggcttccataatgacggctttctttccgttctccagttctaccatcagcggagtaatggcaagcgagtctttgtacatgcgagagaggggggcctcatcgtagtaggactcgaaggagtagcagtaacgctcgccggcgcgattgtcgttaatatagggcacgaaagcgtggtaatcgcggtcgaagttgaactcggcaatctcgtccttcacgcagaaaggtttgcgcagttcggaaacaaaacgataggcggctccgtcgtcgtaggcgcggaactgtatgctatagccgttacggcatttcagcgtgagttggttataagtgtccttcacactcgcctttttgtagaaaggagtggggaaggaagtgtcgacggaagtgcgggtagctttggtcaccttcacatctttgccgaaggtgaaagcaatgggctttccctcagattcagtgcattgcatggcaatgtctgaaggcaaaagaacggtggtaccgtcgtgggcaatcgcccagttgagggcttgtccggcttcgatgttgacaattagttttccgtccggtgaattcagttgatattgctgtgcttgtgccgtcaatgcacaagaaagcaataggctggcgaaacaagtgctgattctgttcatttttatttgattattgattatgaatatttgtttaattccgtggatatttaaccggaatagccatcatttcttctaagaagagagggtcgtcgaactggcaagtctgtcggttgtattgtccccccggagtgtcccatagcattgggcacatgccgcgcgagtagatggcttcggttacggaaacacagaagagtcttatcacttcctttgttctgtttctggagtcggcgcaatattcgcctatgatgacggggattcctttgtctacgcaattcttcttcagtaggtccatattgtcgttcagttccttgaagtcagcttccgttccccagctttcccggcctacaccccaatcgacaacctcgcctccacccagtatggcaaagtttgcgggagtatagtaatgcactgtaagagcaagtcggtttgcgggatcattcggcatcttgaacaaggggtcgtaagcatactccaagttggtgttgtagatttccaccaacagatgacgtttggcgttgttgccgccactgtttcttactatgtcgacaaagagctggttgaggtcgttcacgtatcccagtgcctttgccttgtcggcttcactaccgccccacggagtccaaatctcatcgtatccgatttcattcattggctcgaacagtaagtggtcaccgtacttttcgaagcgttcacatatctgtttccagatggaagtgaatttttcttttgctttgctgtcggtgggtacttgtttaatccattcgttttcgtggtggatattgatgatagccaccatgccacagtcgagggtccagtttaggattttctctacgcggtccatcaggtcaggatgcactttgaagtcgtcggacagcagattgccccagctgaccggtatgcgcagagatgagtagcccgctttggcatatccttcaatgatttcttgtgtgataatagggcttccccatgcttgttcgtaattgagaatgttgcttgggtctatccagtcgcccacggcatccagcgtgttgcctaggttgatgcccagtcccatttcgttaatcagttggtgggttgtgagattctcgcgtacagtgtatttttccggttcatcgctttggatataggccgcctgctccacgttgatttcttgtatatgctcctttacgctgacggtgatgatggcgttgcgcacgtcgggcgtagtgttgggttctacggttatgttatagattgcctgtacgggagtgctgctttccgaggttactttgcaccatgcttccgaactttggaaagtggctggttcattgggggtgataccgaatttcttgctaccacccgtttgttcaaaatggaaagaagtaggctctacgatgattttcagctcctttttatcgtcagagcaagctgtcatcagaaatagaaccaggctggttaataaggttttcttgaagatttgtgtcatggtatcggtaaaatttcgttttaataatttcggtgtatttatttttagacgctgattcaattgaatcagcgtctaagagtttaaaagaaggtgtcactttgtgtaatcctgtgccagaatttaattcaaattattgtatcttgacaactcggaaattatcaaaatacatttcgatgttgtatggaccgttttcgctggggtttgtcatctggagtgccaactcgtcaccgtcacgtttttggaactcgccccaagtggtttcgtctaccagttcggagagcggaatgctgcactgcatccattggcctacttcggtttttccggtgaagtcgctcaccggacgatagttcgtgtagttgtgagcctcattccctttgaggtagatgcggaatacaggaccttcgccatattccactgccacgaagcattcgaactgcaaagccagttcggaagtcggtgtatcggtaggcaggaaggctgtgtcaatgccccatacggcaccgttctgcaattggccccaccagtaattccatgctgaaagttcccctgatatgctgtagcatttaccatccgagaagaaaggagctgctgtaccgtcggcagtgacgggtacagcttgcccgccccaggagaaccaaccgatgttgtcatagttcaatactatattctccaaaggatagaagcccggaacttcggcagtaccgcccattgtggtaatggcgagtgagcaagtgccttgcggtgcacgcggcatggtaaaggtaagcatatcgttagcttcgcttacggtaacagtagagagatctaccgagcgattgcccattgtgatggaggcgatatccataaaattctgtcccagtacggtaactgtggtacccgtgataggcatcatggagcttaccttgctgatacttggtgggagggctgtgcgacggaagggagtaaatgcggatgcggtatagcactccactaccagactgccttcatcaatcaggcctgcgggagcattgaatgatatttcgtcaaagttcttgtttaccgtgtagtccgttacttctaccgaaacaggtgcattggtgatgtcgtccacggcagtggtgaaataaacgcgctgaatttcgtagaagttaccgcccacgatgcgcagaggcgtgcccgtctccacggggaaggttgtggctacacgggtgatgtagggtgcgggtgagagtacatgcatggagtacgtggcaatgccgtgcgaggtctcgatacgcagttcgcctttcagttcggggttggcacccgtcagttgcaattcgccggggatagtgaggatgagactggtggaagtgccgtagttgctattgaacgaaacttcttgttcgttgatgaacactttccgcacatcattcagattttcgccgatgactacaatcatggtgcccggatttacatcggtgaacgtactgtcggccttctctgggtcgacaagacggatgtggtggattacgggaacaccgccgccctcgtcatcgttgcaggcggtgaaaaggttgcatgccaacaggatggtgagcaacacaaaaggaaaatgtatatatttcatattaaagtcgttatttgagataatgaatgtataacttggtttattcactgaattcgtatgctaccggttcttcgttcagtagcggattctggatgacatcgctttccggataaggcatcaggatgttgccgtggtggatttcgatgttctcgcccggttcctgccaattttctatgccttcgaggaaagtgtcgccttctttcttgccgaagtggaggtaaccgtcttcgtccttcacgatgaggtctaccgtgtagccgcggtgttggttctggaagtaattcagcatgtagtcgggtttccagtgataccacgataccatgtcataccagttacaatactccatcgagaactctacgcggcgttcgcgaatgatgtcttcgaaggttacgcgttccttgcgggggatacgtgcacggtcgcgcacctggttcaatgcttccaggccgggaccaccggtcagttcttcgctgttgcccagacaagcttcggcataggtcaggtaaacgtcggcaaggcgtaggatgtaggtgttgagcggagagttcatggactggatataaccgtcgttgtcgtcgtccggaccgcccggtacaccttttttaatgcaagaggtggcgccgtcgtaagtataaccaccgtcggcaatgcagatgtatgaatagtatgtacccggtgtgcagaaggtggcgttgcggcggatagtgtcgcccaactcatattgctggagcatatctatacttgcctgatagctgctccatacgtttacaccgccggtcatcttgctgttgccggcgaggtcggcaagcagagtgttgcatacgccccaatcacccagtggcacccactgcatggcaatgagcgattcgggattgttgttgtgcttatacttgaagaggtcttcatagttttcgtaaaggctgatgccgctgttgtttatcacgtcggcggccagttccttggctttctccaggtcggcgttgtcgcgtgtgcctcctttccagcctgagcgggcgaggtagactttggcaagcatgccttttgcaccccatgcgttgacacgtcctttggcggttgccacttcaggaagattctcgactgcataagtgaggtcacgaataacgagttccagcacatcttcttcgcggtggagcggttgcatgggattggcaaccactttgtcgttgtcttcgatgatgataaccggtccccagaggcgaaccatgtagaagtaggcacaggcacgcatcaggcgggcttcggcaatggctgtgcgcttggcacgttcgctcacgctgttgctacatttggtctgcacatcactgataacggcattggccattgtaatgaccgagtagaaatctgtccatgcattggcaaggttttcactcagggctgtcaccttgaagttggtgaactcgggagctccccagcgactgaagttatcgttggcacggttactgcccagcggcacgatggcgcgggagttgaggtcgaaccatgcacggttgtaaagcggtgcagtggcttgttcgagtgcatcgtcggaagtgtagtatgtcacatctacgtagttcccttcgggagcacgttccaaaaatgagtcgctgcatgccgtaagcagaaggagcgatgatataagggttagaaatctgtgtttcataactatattgagattttaaatgataaatgatttgtctggctcattagaaattgaagttaagaccaaatgtatagatacgttgcgaaggatagcgcgcatcgtccacaccacgtagcaatacattgtagttcaaagcgcctatttcgggatcgtagcctttgtagcctgtgatggtacagaggttctggatgttgacgtagaggcgcagatggtctatctgcaaacggcgcaaccatttctgtgggaaggtgtaccccagcgagatgttttttatgcggaggtaggaagcgtcttccacaaagcggtcggagatacggttgttgtcgttggcgctactggtggtgatgcgttgtactttggctgcatcggcgttggccacgtaaacattggaaagtacctcgtcgcccacttcggggtcgtgcatggcgatttgggcaatgccggtagcttctttcagcaggttgctgttacgcatgggatcggtgaaggtgcggcgaatcaggttgatagccttgttgcccaccgagccgttcaggaagatgttgaggtcaaatcctttataagaaaggtagttgttgaagccgaacgtgaatttgggtgccggattgccgaggaacgtacggtctttctcatcaattacaccgttgttgtcgcggtcttcatagatgtagtcacctacccagatgcccgatttgccgatggtctggtcttttggtatggctacttggatacggttgcccgtttcgtcaagcaggaagttgccgtcggcacctttcttgtagaaccttaattccgcaacactattacaaatataactttttaagtacctgagcaacaaaaagttgctcaggaatttgccatgtcagatttttcacctatcttagtgttgcaaatcaaaatatgtatcaaacccgacagacatggcaaaggtagcaattaaatccgagaaactcactccttttggaggaatattttcaataatggagcaatttgactccagactctcatctgtaatcgactcaaccctcggtatgagatgcaggctgtatggttatcaatacagcgaaatcatccgttcgcttatgagcgtttatttttgtggcggctcatgcatcgaggatgtcaccactcatctgatgtaccacctttcgcttcatccgacacttcgcacatgcagtgccgacacgattcttagagccataaaggaactgacccaggataacatttcctacacatccgacactggcaagacctacgacttcaacacggcagacaagctgaatacactgctcctcaattgcctattgtccacagggcagctgaaagagggcgaggggtatgacgttgacttcgaccaccagttcatagaggctgagaagtttgatgcgaagcctacatacaagaagttccttggttatcgccctggcgtggcggttattggcaacttgattgtcggcattgagaacagcgacggcaacacaaatgtccgtttccaccagaaggacacgctgaagaggttctttgaaaggtttgaacaaaacaagcttattatcaaccgtttcagagctgattgcggctcgtgttctgaagagatagtggaagagattgctaaacactgcaagaccttctatatccgtgctaaccgatgcagttcgctctacaatgacatctttgccctcagaggttggaagaaagtggaattgggcggcattgagtttgagctggcctccattctcatcgagaaatggaaagggaaggcataccgtcttgtgattcaaagacagaagcggatagacggcgaactcgacctgtgggaaggagaatacacctaccgctgcatccttacaaatgactacgagtcttccgagaaagagattgtcgaattctataacctccgtggagggaaggaacgcatcttcgatgatatgaataacggattcggctggaacaggcttccaaaatcctttatgggagaaaacacggtgtttcttctgcttatggcactcatacgcaacttctataaattcatcatggcgaggcttgacgtgaagaggttcggactcaaagcaacaagccgcatcaagacgtttgtctttaagttcatctctgtgccagccaaatgggtcaggacatcaaggaagtatgtgctgaatatctattcatgcaacaatgcttatgccaatgtgttccagaatgactttggataacaccgacaacttatagtcgtgattttgcgtattgcctcaagtcgcatggtggggtaaggggcatttatatgtctttatggtgacattcgatgcactgtgccccctttttactaacgatgcagattcttttcgcttctgtatcatattaggcgcgtagttgcggatttgaggtaaatgtatctggcagaattactgatgagcttaatgaaccgatgattggtgtaagtgtattggaaaaaggaacgacaaatggtgttataactgatttggatggcaattatgccttatcagcgagcgagggttccactattgtcttttcgtatatcgggtatgtgacccaggaaaagaaagccgttgcaggtactatgaatattatactgaaggaagatagcaagactttggatgaagtggttgttgtaggatatggtgtacagaagaaaagttccgtaacaggggcgatttcttccgtaaaagcagaagattttgaaaatcgtaccataaccaatgctgagcaggccctgcagggtaaaacagccggtgtgcaaattatttctgcatctgcggctcctggttcgaatcccgccattcgtatccgtggatatagcagtaatgccagttcagatcctttgtatgtagtcgatggcttgcgtacgaaagacatcagtaacctcgatccgaatgatattgagagtatggaggtgttgaaggatgctgcttctgctgctatctatggtgctcaggctggtaatggtgttgtcttgattaccacccggaaggcaaaaaaaggagttcgtcgtatttcttatgatttccagttgtcctctcagtctttaggtcgtactcctgatattctgaatgctcaggaatatgtcaattatatgactgaaggtaatcttattcccagagaaacaatagataggtattgggatggaaagacaaataccgattgggtagaagagacatttgaatcatccatgatgcagcgtcacaatgtcaattttcaaggtgccaatgataatggctcattattcgcttcactctcttatttaagtaataatggtcccattgttggcaataaggatgtttttgaccgcattaccggtactgtcaatgcagattataaagtaaaggattggttgaagttcacgacaaacaattcattttcccgttatcatgtacagtctgtaagcgaaggctcagcaaccggttctttgatgctgtctgccattcagcttgaccctcttactccagttacctatacaccggataaactgcctgacactatgattaattatatgaaccaagggcataccttgcttcagaatgccaatggtgattattattctatttccccttatggtgactccaataatatcaatccgtatattatgcgtgaccgtggtacaacgaaaagagatggttttgtgttcagcggttccacttatctggattttactctgattaaagaacttgtcatcacttcacgtttgggatatcgctatacttatagcaactcctatggctatactatgcctaacattacctgttctgatctttatcaagattatgtatcggtaaatgctacaagctctaatacaacgtattggcaatgggaaaactttgctaactacactaagacatttgcagataagcacaatgtaaacgtgatgcttggtatgtcttattcttccaatacctcttttggagtgacaggaggaatcaatggtagccgttctggtgacaaggttgatttaggtattaccaagttggatcccaactatgcctattttgcgttccaaactggtactgctacccgtacggtaagtggtggagagaaaaggagatatgcaaatctttcttactttggtcgggcttcttatgactatgcgggtaaatattttgctcagttcactcttcgtgcggatgctgccgacttgtctattcttcctttgcagaaacgttggggctattttccggctgtatctgttggctgggtgctttccaatgagaagtttatggagaatctcaagtcgatttctcatttgaaattacgtgcaagttggggacagaatggtagtattgctggtttggcagactatatgtatgatgctacaattctgtctgaaatcaattatccaatgtccggagatgtatcttatgaaacgggttcactgccctctgcaacaggcaactatgatttgaagtgggaaacttccgaacaaatcgatttaggtattgatcttcggatgctgaacgaccggttgagtttcggatttgactattatgagaaaaaaactaaggatttaattgtaaccggtattactccttcgctgattgtgggtaacacgacttcacctatgaatgcaggaaatgtcaagaacagcggatttgagtttgaactttcatggcgtgataatattaaggatttcaactatagcataaaaggaaatattgctactttaaagaataaagttacttatctgcatgaaactttggaacgcattgagagtacgacaagtgcaggcatcggtgttatgaattattttgaagaagggcaccccatttggtacatgcgtggttatgagtgtacgggcattgactcacaaacgggtgacccgatattcaaggatatgaatgacgatggcattattggagatgctgatcaaacggaaataggttcagccattcccgactttacttatggtattactttgactgctgcatggaaaggtttcgatttgacgatatttggttccggttctcatggcaatgatgtgtttgccggttataaccgtacttcccgtatgaaagcgaataccttgaaggaattctacgatgggcgttggacaactgcaggagacaatgcaaaatatgcccgttccaatcctagtaattatgataagtacttgaaaagctccaagtttgtattcgacggttcttactttaaaatcaagcagatacagttgggttataatttaccaaagaatttgttgaagcagattggtttgagtaaccttcgtttgtattgttctttagacgacttctttacatttaccaagtatcctggatttgatcctgaatttacaagtacaggtagtgcaatggggttggatatggggtcttatccgtccagcaagaaagtcgtgttcggtcttaatgtagcattttaatctttaattcaatacgaaatatgaaagcaaaatatattttatcaagtttgttgcttgccagttgcactttcttttcctcttgtgtggacaatctggatatctcgcagcatggagtaagcactttcgaaagtttctataaaacggatgctgatgcggaagaagccattatagcctgctatagtaattggaaggatacttatgcacctgcattctggctgaagaatcttctttcggatgattgctattcggcaggggagagttggacggctgctagtgcgcaattgctgtcgacttatacattcgactctgatttttctcatattaaaacgttgtatacgaatctttataaggtaatttatgccgccaatattgttttgcagtatgtaggggatgattctgcaattaaacttcgtgcacgtgcagaggcaaaggttttccgcgcgatgtcctacatcgaattaattagtctttgggggactccgccattggtggatcatccgttaacgccaaatgaatattcccaggccaatggtgatactgaggcgctatgggcattggtgaaccaagaccttactgaggctgtcaacagtggcgatctggaggaaaagacaagtttggatgactttacctatcgcatcaccaaacaatttgcacaagctctgttaggtaaggcatatgtattccagaagaattatggtgctgccgccgctgccttggatgaggtgattaatagcggaaagtacgacctttacaatgattatgaaaatattcagactactaaaggagaggcaaattgcgaaagcttatttgaaagtaactatgtctacgatgccaataatgctactggtattatgagtaacatgatttgggtatatgtacattggcgcggagatatgcttgcatttaatgagcctactcaaatctattctcacggaggttggggattttttaatccgaccaaggaaagctatgatgcatttgttgagatgggagatacgtatcgcttgaatgcttccataaagacataccagcagatggaaagcaccggtatatctttgagtgatgccattgcatatatgcctgacaatgccggttactttagttggaaataccgtgtttatgaagccgatgtcattaattattattggttgcgttgccctaacaatactcgtgctatgcggtatgctgaggtcttgttacttgctgctgaggcgagtctccagtctggaaatgcaggtaaagctgtcgactatgtaaatagagtgcgtaaccgtgctcagttgcctgcattgggtagcgtttctatggatgatatcaagaaagaaaagcgtttggaactctggatggaaggttgtcgttatcaggatttgattcggtggggcgatgctgctacggtacttgccaaaagaggacaggaaaggccggctctttataaagacggtcgtgtcagttggaatgaacagaaaaatgcttctgctggcttcaaaagtggtaagcatgaattgctcccattccctgcaactgaaatgaatgtcaataagaatatgacccagaatccgggttggtagttaatcaataaaatttagtgtatgaataaatttaaatgcttattcttctcaggccttatggctgtgatgccggcttgtatgaatggacagcagacgtccagtgaagattcgtcaaaacctcgtgttattattacttgtgatccggaacttgatgacctgaactctttgatacgtttcttacttttcagtacggatttccgcgtggaaggtttgatttatgccagcagtcagtttcattggaaaggtgatgggtacggtactaagtggtatgtacctggacgggaatattctcgcaatggtatagactacgggcctatggaaagttggcgttgggatccggaagaacgtttcattgacgatgctgtggaagcttatgaggaggtatatcccaatctgagggtacatgatccttcttatccgactcccgaatatctgaaatccaaaatacgcatcggtaatatagagttcgatggtgatatttccaaggatactccgggatcggagctgattaaagccgtactgcttgatgattgtacagatccggtatttatcaatgcttggggaggtgccagcaccatagctcgtgctttgaagtccattcaggatatttatgagcatactgatgcctggaaaggcattcgggaaaagataataaaaaaagtggttctttccctttctggtgatcaggatgatacgtatgcacggtatatcaaacctttctggccggaacttagacaaatggagatgggcggcatgacagtcgggctggcttataatgcccagttgagggcttccaaagaaaaccaggttttctattctccggaatggatgcaggagaatatccgtagtaaagggcctttcggtgaaatgtatcgtgtctggggggatggaaaacagatggtgaaagatgataagttcgatttcttcggcttgtcgggctatacagttgatgaactgaaggagcaaggctatgtagtttggactggagttcagccgaaaggggcttatctggctgagggtgacacttactgttttctgaatttgatcggtaatggtctgcgtggtcacgagaatcctacttatggtggctggtgcggtggaaggactcttcttcccgattcagtgaagaatcttcctcgtatggaacagatgaagtatagagctgagcactatcctttacccgattttacggctccggtaatgaatggattggctgcccgttttaaatggtcagttactccaagctataccgatgcaaatcatgaaccggtgataaaaggtgcacttgccatgaatgccaaaccgggtgaaaagctgaaacttaaatatacagtaaccgatccggacaagaatgtacttgccattaaatggtggcaatatatgtcagccagtacatatcgaggtaaagtggcagtggatgattctacttctgcaaatactacttttactgttccgactgatgccaaaccgggcgataccattcacttgattctggaggctacagatgatggtgaaccacaaatgaaccgttatcaccgcctaattattacagtgatagaataaactagaatcaacaaactttaaattgaaaaactgaaatgaaaaagattttattgacagtatttatggcagtctgtggactgcaaatgtctgcccagcagaatttgtttgttgcgcaggacctcgagtctgcaattgtgaacaaagataacacagtgacttttaactttaaggctcctgatgcccaaaaggtgcagattgccggtgactttgccgaaaaggcggagggacaacacattggaggtatggtgggagcaggtttgatagacatgacaaagaattcagaaggaatttggacctatactaccaagccgttggattcagatctttatagctatgaattcatggtagatggtgtgccgactatagaccctaacaatgtttatgtctatcgtgactttgctaccacaagcaatgtgtttattgtagggaatggtaaggcagatttatataaggtaaataaagttcctcatggaacattggcccatcgttggtatcactctgatggtatgaaaatggatcgccgtatcaatatctacacgccggcaggttatgaacaatccggtgataggaagtatccggtactctatttattgcatggtatgggaggggatgaagatgagtggacaacttttggacgtgctgcacagattctcgataatttgattgcacaaggcaaggctgaaccgatgattgttgtgatgcccaatgggcatgctgccatggaggctgcacctggtgagagtagtctgggatactataaaccttaccatatgaagaatggaaccatggacggtgcttttgaagcctatttccctgagattatcacgtttgtagaaagtaattatcgtgtacaagcggacaaagctcatcgtgctattgcggggctttcaatgggtggttttcattctgccaatatttctttgaactatcctgatatgttcgactatgtaggtttattctctgcggcccttaatgtccagagtgcaggtcagaaaaatagtccggtttatcaggatatggataaaaagttagctgttcagtttgataaggctcccaaactttactggttgggtatcggtaaagacgattttctttatagaaacaatgcagcttatcgcgctgatttggataaaaaaggatataaatatgagtttatggaaactcctggtggacatgtatggacctgctggcgtatttatctctctgtatttgctcccaagttgtttaaataaatctgactaggctatgaaaaaacaactgttttatttgctgttggctgcaggcgtgttgagcgcttgtggccctgcggctcctcaattgggtaaagattctgttgaggatgttattggtgccatgactttggaagaaaaggcacatttggttatcggtaccggaatggtgggtacttcgggtgacagtacggtgattggcactacaaagaagttggttcccggtgcagcaggtactacttatccgataccccgtttgggaattcctgccattgtgttggctgatggacctgcaggtttacgtatagatcctatccgcgaaggggattctgctacttattattgtacacattttcctatcggtacgttacttgcttctacttggaatcaggatttggtagaggaagttggaaaatcaattggtaatgaagtgttggaatatggtgcggatgttttactggctcctgctttgaatatccatcggaatcctttgtgcgggcgtaattttgaatattattccgaagacccgttggtgtctggcaagatagctgctgcatatgttagagggatacagagcaacggagtgggaacttccatcaaacattttgctgttaacaaccaggaaaccaatcggaatgctaatgatgctcgtatcactcctcgtgccttacgggaaatctatttgaaggggttcgaaattgcagtgaaggaatcggcaccatggacagtaatgtcctcttacaatcatattaatggcacctatgcttctgagaatacagacttgctgtccactttattgcgtgatgagtggaatttcgagggtatggtggtaactgactggtttggagggaaggatgccgtggctcagatgatagcaggtaatgatatgctccaaccgggaagggctaaccagtatgatatgattatcgaaggggtgaaatccggaaaattggatgaatccatactgaatcgtaatgtgaagcgtgttcttgaacttattctccaaactcctcattttaaagaatacaaatattccaataaacctgatttgaaggcgcacgcagcagttacccgccagtcagcgactgaaggaatggttttgttgaagaataataacgaaaccttgccatttgaaaggaaggtcagaaatatagctcttttcgggtgtacttcctatgatttcatagcaggaggtaccggctcaggtaatgtgaatcgtgcctatacagtctcattattggatggtttgaagaatgctggataccagatagatgaagcattgaaggccgattatgaacagtatattgaggccgagaataagaaaaatactcctgactcgtctcagcctttctccagatttatgccggtacctcgcccgacagaacttatccctactacaaaggtgttgtcagaacaagttgctaaagcggatgttgcattggttacgctgggacgtacttccggtgaatttgtagaccgtaatgtcagtgattttgaactgagtgaggaagaattgcaactgctgaagtccgtcagccaagctttccatgctgctgggaagaaagtggtggtggtattgaatatcggaggtgtaatcgaaacagcttcttggaaaaaactaccggatgctattttgctggcttggcaggcaggacaggagggtggaaatagtgtgacggatgtgttgagcggtaaggtatctccatcgggtaagttgacaatgactttcccgaacaagttgatggacgttgcttcttcgaccaattttcctatggatgctagggctaatacagatgtgaggaataaggaggacaaaagctcttcagtgaagaatgtagactatacggattatgaagaagatatttttgtcggttatcgctatttcgatagtttcggaaagcaagtgtcttatcctttcggctatggtctttcgtatacaacattcgagtatgtcaatccgtctgtcaaagttgataatggtatatattctgtttctattgatgtgaagaatgttggtaagtttgcagggaaagaggttgttcagctttatgtctccgctcccaataggtttcagatgaacaaaccggaaaaagaacttaaagcttttaccaaaactaaggaattgaggccaggtgagactgttactgccactttgaaactgaacactacggatttggcttcttatgatgaagcttcttcttcatgggtagtggatgctggaaattataagtttttgattggaacctcttccaaggatattaaggctgtacttgatgttgatgtggtatcagttgtggaaaaaacaaatgacatattgaaaccacaagagactgttaatacgataaaacgctgaaggtgagtataatattattcttggttgtgattaggttgatttgtagtgcttaggtaaattaattgtaattgggtaaaattgggaaagaagctgcctcggagttatgaggtagcttcttcttttatttggtaataagataaattaataccctccgtgtcctacttacgatataaatccctatctttgtggcgctttttagctgaaaataagattcaaattaatttagatacaacagaaaatggcacaagaagacgtttttaagaaactcgtatcacactgtaaggaatatggttttgtgttcccttccagcgagatttatgatggactgggagctgtgtatgactatggtcagatgggtgtggaactgaaaaataacatcaagcaatactggtggcagagtatggtgctgctgcacgaaaatattgtcggtatcgactcagcaatctttatgcaccccaccatctggaaagccagcggacacgtagatgctttcaatgaccctttgattgacaaccgcgattccaagaaacgttatcgtgccgatgtgttgatagaggaccagcttgctaagtacgatgacaagataaacaaagaagtggccaaagctgccaagcgttttggtgaggctttcgatgaggctcagttccgcagtaccaacggtcgtgtgctggaacaccaggccaagcgtgatgccttgcatgaacgcttttccaaggctttgaacgataataatctggacgaactccgtcagattatccttgacgaagaaatcgtttgccctatcagtggcacaaagaactggacagaggtgcgtcagttcaatctgatgttctcaacagaaatgggttccactgccgatggtgccatgaagatatacctgcgccctgaaacggcacaaggtatcttcgtaaattacctgaatgtacagaaaaccggtcgcatgaagattcctttcggtatcgcccagattggtaaggctttccgtaacgaaatcgtagcccgccagttcatcttccgcatgcgcgagttcgagcagatggaaatgcagttcttcgtgaagccgggtacggagcttgactggttcaagacctggaaggctactcgtctgaaatggcacaaggcgctgggcttcggcgacgaccattaccgtttccacgaccacgacaaactggcacactacgccaatgctgctacagacatcgagttcctgatgcctttcggtttcaaggaagtagaaggtattcacagccgtactaattttgacttgtcccagcatgagaaattctctggtaagaacatcaagtatttcgaccctgaaaccaacgaaagctatactccgtatgtcatcgaaacctcgataggcgtagaccgtatgttcctcagcatcatgtctgcttcctactgtgaagagaagctggagaacggtgaaacgcgcgtagtattgaaacttcccgctgccctggctccggtgaagctggccgtgatgccgttggtaaagaaagacggactgcccgaaaaagcacgcgagattatcgacaacctgaagttccacttccattgccagtatgacgagaaagattccatcggtaaacgttaccgccgtcaggatgccatcggtactccgtactgcgtaactgtggaccatcagactttggaagataactgtgtgacactgcgtaatcgtgacaccatgcagcaagagcgcgtggctatctctgaactgaataatattattgcagaccgtgtaagcatcacatcgttgctgaaaaccttgcaataagaataatattaattacaaattataaattatgagggtgcgtagtgaatgccacttgtttcttgtaatttataattcgtaattaatgaataatttgtaattaatgaaaatgagaaaaagatttttgtttttgcctttcctgctgttgcttgtaagcggactagtgtcttgcgaagaagtagaagatgagggaaagtattatgattggcaggcacgtaacgaagcatacattgattcgataaaaaatgttgcgggtgatagatatgtagctactgaagaaggtataagggctgtggaagtcggtgaaatgtttattcttcaagactatcttgttagcactgataagcatcctcggtatatatattgtaagaaacttgttaagaatgcagagggtgaaattcctgtatggacagaagctgtgaatgctttttattacggtacacttattaccggtgagaaatttgatggtggttttgacggttatggtgcattggatcaaaatataccaaatccacctgggcgagaaccgactccttttagttggtctactgattttcttataacagagtcaacattgagaacgggttggaaaatctttttgcaatatatggctgttggcgaacgttggttagtgtatcttcctacggattctgcatatggttctgaaggtagtggtactattcccggatattcagctttagtctttgatgtagttttaaataaagtgatagaataactcctaaatgttgatataatgagaaaatatgcattgtttagttgtgtatcttcttcttatatcatgtgtagcagaacaagaaaaagatcttattgtttgagcgcctcttccttaacggtattgtcactaagggcaaaaacaacaagaagaactcatgagtatggtcgataaaattctgcttagaatgggacattaattgaaactgttaatgacgaaccgaagaatatcgcacaaactgaacattcaagacgccaatcgttcaataactttatgggtaatgctgtgtcagctatctatagcagtctattgtttctttgagaagaaactcaccattgaacttaatttgctgaatatttcaaggataaatgaattataaaaatggcatgtgaaatgaaaaacttaaatcatttacacatgccaacttgtttttaaaggatttactgaacatccctatttattttgtgattatatctcaaaaagtgatgagaagatttattcagagacttttaaaatcaaggttagttatagcttaggatagggatctcttactttatataatttgaatgaactaactttgtcattaaaatctattttcttaaaattagtatgtgatatttcttggtgatccacattgagtataaaggccttactactagatttataattagagtctctataaaaaatcactatcgcactcatttctgcattctctggtgtgccaactctgcgagaacctgtaagtttaaatgaagtaattatgtcattaaaatccttaggtatcattgggactccatagttgtatgcatttttcatattaggaacttctatcggcccattatatgttaacacttctcctccaaagtctttgtgttcatatacttttaaagttatagatgtaaggtaagccattgatagcctagtttgggcattatcactacgttgaaatttttcttctacaaacaattctagttctttagtggaatcaaaatattcaattgtaccattggaataagtaagcgtagaagtgttaggattattgttcaatttggataacatattacctatttcaggatttataaatactatcgtggaatcttgcagctcatattcggctgtatattctactccttggtatctaaatctgaaggaatcactatgtactttgttttctgccggtagcatgttttctaatgtattttcattagaacatgatgtgatggagacgaagatggaaataaatgccatcatttttaacagtgttttcatgatttaatagtttaaagtttcttttaccaaagaaaagaataaaaaaattaaaaaacaaattttcaacaaaatattgcatatgtaatttttatattttcttcttgatgctctttacccaaatcttgtatccatcctcattcaaatgcaacccgtcgttggttagttcgctgcgcagtacattcgttcccttctctgtaaacaaggggaagaggtcgatataagcgatgtttttttctttggcaagtgcttccaaacgaaggttgacttcagggaccatatcggtttttccggtcaggcttttatagcgtccgaaactttcattgaaaggaagcaggctttgcaggtagaacttcgtatcgggagattctttctgaatacgttccacggttgtacgaatcatacttacaatgctgtccgatgtcaaattgtgggaaatatcgttgactccgataagcaggaacagcttggcgggatgtccggggagtatctggtgcagacggtcgtagatacccatcacttcgtcaccgataatgccacggttgcgtacgttcttcttgccgaggcgtgccgaccagtcaccgccgccttcagtcaggctgttgccaagcatgacgatgtctttgcttgtaatggcaggctcatccataaactgtaggaagcgtttgtagtaatggtctgtatagatgcgcggaacgggacagatggaagctgccacggcattggcaaccaatgaacgcagacgaaccacgctatgcccgtcttccggatgcacggcattgataagcaatatgacagaagtgtcattgtctgggtcgataacgatggaagtacctgtatatccggtatggctataggtgttcgggccgaacaagtccccgttgttggaggcgtatgctgtaaagcagtcccagccgagagtacgtcccagattggctgtggcgcgtggcacggtacgcatggtttttacacccagtgggctcaggatacggcggccgttccattcgcctccgttctgcagggctgcgcagagcacggcaatatcttcggcacaggagaatactccggcgttgccgctgatgcctccgttcatgatacgggccagcgggtcgtgtacttgtccgcagaggacttgcccgtcaggttgtttttcggttggcgcgatggcattgtgccagtctccttcggtgatacctgcccagtttgcatctgttgtatttatccatttgccattcttgtcatgttggcagggcagatagtcggtatgctccatgccgagtacgtcaaatatgttttcacgggcaaaatcacgcaaactttggccgcttattgtctcgatgatatgctgcagggtgatgaagttgaggcaactgtattggaaatctgtctgtggcttgaagtcacgtttgcaagtagcgatgtattccataagaccatccggattgggggaaccgtattgcttttcaagttcgcccaccggtgcgtatgggggcagtccggaagtatgtgtcatcaggtcggcaatgcggattaccttcttctctttgccgtctgcactctcccaattcttaaaattgggtatgtagaggctgacggggtccagcatacggagcttgccgcgttctgccagtatcattgtacatacggcagtcgacatggatttgctgcatgatgccatatcaaagatggtattggtagtcattggctctacactggggtagatgcgcttgttaccataggctttcaagtatgccattttcccattgcgcactacggcaagtacggcaccgggaatatccttgttggcgatagccgtttcaatcgcttcatcggcatacatcagtttgcgggagtccattcccacctgttcaggagctacacgctgcaaaggctgcgcagtggcaacttgcagacaaagagaaaagagaaaaaaacagattgctttcataataaaaagatttgccccgccccctatgaaaggggttttgacacactcttgaaaggggaaggggataattaatcgggttaattgttcttgaaactattcttcttcctctttagtggcacgaggagctctgtacgcatccactgccttcttcaccgagccgtgcattaacagcagcgccttggctttgccatagtccagtccgagttcctctacaatcatacgggtaccacggtccacaagctttttgttactgagttgcatattcaccattttgttgcctttcacgcgtcccaactgtatcatgacggaagtggtaatcatattcagtatcattttctgtcctgttcccgatttcatgcgtgagcttcccgtcacatattcaggtcctacaatcatttcgatggctacatctgcctctgctgccattggagagtccgggttgctggtgatacagccggtcagtatgccgtgttcgcgtgcctcgtgcatggcaccaatcacgtagggggtggtaccggatgcagcaataccgatgaccgtatccttatctgtaatattgcgttccgtcaactcttcccaaccgcggtgaatgtcatcttcggcattctctaccggatttctcaatgcagtgtcaccaccggcaatcaagccgataaccagcgtggggggcataccgaaagtcggtggaatttccgaagcgtcgagtacgcccagacgtccactggtacccgcacccatgtagaagatgcgtccgccttgtttcatgcggggcacaatctgggttaccaacttttctatttgagggattgccctctgtacggcaagcgccactttctggtcttcggtattgatgtcttccagaatttcacggactgatttcttttccaagtcattgtagagcgatggttgctctgagatttttacgaacataaggctatttactatttgacgatttactatttacgatttgtcactttcagttgtgatatttgatgagtccttccatggggctcttgatgattgcacccagttggatacccatttctttggcagcttctgccagaacttccttgtaatagaaggctacggaaccgatgaaatgtactttttgatgctgatagtcttcatattgcatgacattgcgtttaaggaatgccttaaagctgttcagtaccagagcgcgtacacaaggttcacccagattctgtgcaagaaatggtgacaagcttgccaggaaacggttggggaaaggtttacggtagacacggtcgatgatatcagcaggtgtcaggtcgaactgtttgaggaatttctctttcagctcgggtgtcatctgatttttcaagatatcgcctaccaacagtttgcccaagcaggctccgctgccttcgtctcccaagatgaatcccagaggagatacattggtgacaatgctttttccgtcataataacatgagttggagccggtccccatgatgcaggcaatgcctgagtcatgtccgcagaggccacgtgcggcagccagcatatcggtattgacttccacttcatttttcacactgaggtgtttggttatggcacggtgcaccatacttatcttgtcgggaaatccgcatcctgcaccataaaagtatacggcatccagctcacttgtcttcagctgaggtaatagcgctgttgctatttcattactgatttcctcttccgactgaaagaaagggttcgtccctttcgtgaatatctgttggagaagtactccattctctacaacacaccaatcggtctttgtagagccactgtctgctattagaatcatataaataatgtttaatgattagggattaggggttagtgattaaggattagtgattaatggtaggtgatactgtttcttaattataggcaacgtattaatcactaatccttaatcactaacccctaatccttatattttgatatatatttttcgtttgtacaactggtagccgatacaccagttaatggcgataaacagcagggcaaaggcaagggaaccggcggtttcaccgaaaacgggcatgaggactatattgtataagaatccgtgtatgctgatgctgctgtttccccacgggaaactgatactaccgaaaagtatgctaagtacgccgcccaatacatacatgaacagcggattcacaccgaatgcctcgaaaaacatgctccacttcttatagcctttcacatcaataatccagataagcaatgccagaaaactggatgccagtccgcaagtgacgagtacgtaggtaggagaccatattttcttgttgatggggcaaccgtagcttagcaggaaaccggagaaagtaaggataacacctaccagcaacagtgtgataagctgcgaattgagaaatgaggcacggtcttccgacttgttgccatccagcatcagccgccctacacagaagcccagcaacacatgtgcaatggcaggaatggtgcttaacaaaccttcgggatctatgccgttatccttgtacatgtgtgcaggggtcaggatggcacggtctaccacggaaagaatgtttgtttcattataggcgaaaccgttgccgcacatcaacagtatgaagtagcctgtcaataggccggctatcagataaggtatatgtttatgcttcatggttagtgcaatgatggaggctgctccgtagcaaagggccagccgttgcatgacacccagaatacggatacggtcgaatgtccagacggaagcccatagcttctctccgaaactgaggtcgtccggagcggaggcccagtaatagcagaaacgcgagaaccagccgatagccatgcctataaggaaaatgacgatggtgcgtttcagtatcttcatgccggcggcgtggctgaactcgaagttgtatttcttcagggaaatgtatgtggaaattcccatgataaacatgaagaagggaaagacgaggtcggtgggggtcagaccattccactctgcatgccgcaagggggcatagatatgtccccacgaaccggggttgtttaccataatcatacctgcgatggtgacaccacggagaatgtcgagtgcaaggatgcgtttacttacttttgtactgttcattgtaatatttgtgtgttaagttaattatcaatcctaattatcagctgcctttgtacattcgtctaccagataggcaatggatacataggggatacctgagtttgttgtcaatccgatttcacaagtacggctgttagagtagcctatattcactccggacgcttctatttgcgggcggagtttgcgtagggcgtacgagttcagctcaggataggtgaatccccggtctccggcaaaaccgcagcaacctacttcttccggcacgatgactttactggagcaaaggcgtgcaagggctataatggtatctgccagtcccattttccgcatggagcaggtgatgtggattgctacggggcggttaataggtgtgaaaatcagcttctcacgtaagaatgtatagatgaattctgcaggttcatacagtttcatcttcttgatacattcgcgcatgcggtgcagacaagggctttggtcacagaggacggggtatttgccttgttcgctggcttcccaaagtgcggcctccagttcggctgtcttgcgatcggcaatgtccagcatccctttactttcccaaatggtgccacagcaaagcttgtccatatctttcgggaagatgatttcgtaaccggctttttgcaacaaggacaccattttatttaccaatggctgctctacgggagacttctttgccagacccatagtctggttgatgcagctggggaagtagacgactttgtagttacgagttacagagctacgagctacaagtgctgcgctattatgctgcatagtgcttgtagcttgtaactccgtagcttgtaactgataacttttcggcatagccggcgtccatagaggtatgcctaatgcattgtgcagccccttggtaatgccgctcatcgcctttgtccctaatagtgaatgtccgaagttggctaaggacaatacgggacgcagtgcactcttgacaccagcgaaatgattggcgacaaagtctccggctttgtatcccagactgcctttgggtaatgcttcctggcggattatatgggtaaggtcgcccgtattgatacccatcgggcacgacatggagcagaggccgtctccggcacaagtctggttgccgggatagcggtattgtttttcgagcagtgcaaggcgtgtcgggtcctcgccgctttgtttcagccgggatatttcgcgctgcaacacgatacgctggcgcgaggaaagggtaaagccgcatgagagacagttgacttcgcagaaaccgcactcgatgcatttgtcagctacgagtgacgtagcttgtctcttgtcactcatcactaataaaggcagcggcttgaagttcttgatatggcattgcgggtcatcattgaaaatgacaccggggtttagcaatccttgtgggtcaaacagctctttgacggctttcatggctttgtaggcgtcatctccccattcatggcggacaaagggagccatattccggcccgtgccatgctcggcttttagggaaccgtcatatttatctactaccaaggtcttgatgtcattcatcaagtcttcgtagcgtttcacttccgcttgggtactgaaggactggttgatgatgaagtggtagttgccttcgagagcatggccgtagatgcaggcgtcattatatccgtggcgggctatgagctgttgcagttctgccgttgcctccggaaggtcttcaatgtggaaggcgatgtcttcgatgaggcaagtggttcccggctggcgcgtacctcccacagaggggaagatgccggaacggatggcccagtatttggaatattcctccggacggtcggtgaagcgtaccggaatataggtggtgaaggcttgcaggcaagcttcaatggcagatatgttctgttgcagttcttccggggtacgggctttggtttcggtcagcactgctgtcaacccggtttcgtcgccgggctccacgccggggagggcagaggaggcaacttcgcctttgtattttaggaatacggggtcgttgacggaagaaaggcttttatagtctagcatttcagccccttttactgtccattcgccggtttcgtcgaccagcttcttcatggctaccacagcgcggctcgcttctttgatggtcttgaagtagagcatagcgctggccttgtagggataatcatattcagtcttcatcgtcacttccgaaaggaacgccagtgtaccttcggaacctaccatgaggtgggcaatgatttcgaatgggtcgtcgaaacggacgaagggcaacagattgagcccggttacatttttgatggaatatttgtaacggatgcgttcggccagtttttcgttggtacgtatttcatcgcgcagttcgcagatgcggcgaatgaagtcacggtgactcacttcgaaggaggcgcggctgacgggatttccggtatccagcagggtaccgtccattaggatgatacgggcggaaacaagcaccttgtcgctattggcgtgcgtaccgcagttcatgccggaagcattgttcatgacaataccgcctaccatggcgcttttcaccgaggcggggtccggtgcaaacttacggccgtagggagccaacagttcgttcacacgttgtccgatgatgcccggttggagggttatctgttcgtagtcggcggatatgctgtatttttcccaattcttaccggctacgatgaggatggagtcactaatggcttggcccgacaaactggtccctgccgctcggaaggtgacgggcagcccgtggcggctcgccagtttcaacagttgtgaaacttcatcttcgtctttcgaacggattacaatctggggaatcagtcggtaaaaaccggcatccgtaccccaagccagccggcgaagttcgtcggtgtaaatcctttcctgcggaatgaattgttttgcttcctgcaggaaagccatgtaactatgctctttcatgttcacttttttttattgcatcacttcgcttcaaagtgctctgtaaacgtgtcttacgagggggtacattcagtcgtatactgaatatatttaagtatacgactgaatgtggttctgtatacgactgaaatagtctccgtatcaggctcttttcccttccttatttatctgtaaatttatttatataaataatactttttcgacaacttacggaagtcttcggcatctttataccagtagtcgcgtatgtcctcccaacggttccgtttcgagaagcgctcgcgtatctgccgcgaaccgcttactttgtcgaacatgttgaaacgtcccttgtcggcatggtcaaacacggcacggtcaggatagagggcggcgacttcctgcatgaccaggaattgcaggtcgctcaacggtgctttgccgaaatccatgatgtgcacttgcacaccttgcagcaactcgcctttgcctacactatagaacggctttaggtacatcggtctgaagatgacccccggtacgttcagacggttcaggtttccggccagcttttccgcttccatccatggtgcggcaaacatctggaacggaatggtataccccacgccgatagacatatatcctagttcgcccagaatgccgctgacggggtagaagaatgcagaatgaggatgtggaatgtgtggagaggagggaacccattgcagtccggtttgggtataatccatcttgcgtttccagcctttcatcttcactatgtggagattacattgttccccatccttcaacatcttctcgccattgagcatcagtgccagctcaccgcaagtgagggcgtaaaggtacggaattttaaactggcttacaaaagaaatgcaatcatcttcaaccaagttgccttcaatcttcaatccgcctacgggattgggccggtccagcacaatgaattccttgccgttttcggcagcggcttccatggccagtcccatggtgctgatgtaggtaaaggaacggcaaccgatgtcttggatatcatacactaatacatccacatctttcagcatgtccggcgtggccttgcgggtctttccgtaaagcgaatagacgggcagtccggtagtcgcgtctttgatgtccgtcacatggtcgcctgcgtgcacatcgccgcgcacgccgtgttcggggccgtagagtgccacaaggttcacgttgggcgcctcgtgcaggatgtcaatggtggacctcatccggttgtccacccccgtcgggttggtaatcaatcctacacgcttaccttccaggcatcggaaattctgttctttcagtacctcgataccggtctttattctgatcttctgtgcttgcatcgcacctccgcaaaggaggcagagcaaggatataataatagtcctcttcataaccaatcactaaatattactcacaaaacattaatcattaaccattaatcatttttttccatattccgggtctatccttctgtctgcaaaaatggtgacaacaaccgtggcgaaacagcatatcattaccaaccagaagaagtccgtatatccgatagcctcctggatatatcccgcaaacatacctggtatcatcatgcttagtgccatgaatgcggtacagatggcatagtgggatgttttgaattcaccttcggagaagtacatcatgtagagcatgtaggccgtgaaaccgaagccgtagccaaattgctcgatggcgatggcggttgagatagcaaacagattgtcgggctgggcaatggcaagatagacaaacgtcaggcatggcagagtcatgcatcctgccatccaccagatggattttttcaagccaatgcgtgatgcgaacaatcctccgaggataccgcccagggtgaggaatatgactccgatggtgccgtatacgatacctacttctgctgtcgatagttccagacctcccgattctttggaggcaaccaggaaaggcatacacattttgatgaggaatgcttcaggcaggcggtacagcaacatgaacacgatggccagcaatgcgcccggtttggtaaaataggtggcgaatgttcgtccgaattctctgaatatagctcctgcagtggcggcatcggcagccagtgttgacttatctgaggtgggtttggggactgcaaagaggtgatagaacgtcaccaggctgaacagaacggctgtaaccagcatcgtgatggtccatgacagcggaatgttttcggttctcagttcgatggcgccggcaatggctacgagcacgccttgtccgaagatagaggcgagccggtaaaacgtgcttcggatgccaacgaaggctgcctggtcactctgtttcagtgccagcatgtagaagccgtcggcggcaatgtcgtgtgtggcagaggcaaaagccgtgatgatgaacagcatcagcgtgatgctgaacatgctgatgggggttgttccggccgccatagtcgcctcgtccggccgtggaatggacagcgtcagcaggatgaatgccacagacatcagaatctgcatggaaagggtccaccatcttttggtcttgatgatgtcgacaaacgggctccagaagggtttgatagtccaaggcagatagagcaggcttgtgaacaaggccatttctccgttcggtacgcccattttggtaaacatcatcacggagatgttgtttacgataaaatatggaatgccttgtgcaaagtacaaggtgggtacccatgcccatggcgatatgttttttgtatggttcatgatattgatttattgtgttctattcgattattcatacagcttgtcaatgctggcacctatatagtagtgcaacagtattgcatcatacttatacccttgctcgcccatcacggctgcacctatttggcaaagtcccacaccatgcccccaaccggcaccggtgaggatgaagcgtccgggaatgccttcggcggacaactcctctttgtctaccacgaaggcagagctgtagaggtgtgaagtggagagcgtgcggcggatttccagttccttgccgatggtgagtgtgcgtttggttcccacaatcttcagtttccagaggcgtccgctggttccgcgggctatggggataaggtcgatgatttgtccgtagtcaatgcctgaacgtttcagaatgagggatgaaagctcttcctgggtatattccactttccagcgatagaagtccgtagtctcctggtcatagttattgagtacctgcgagaggattttcttgtcggtggtgttgcagaatgcttcgggggaggtacgaatccagcggtccgcttcgacttcctgcgtcaaatcgggcagtgtggcgtgcgttttgctgtctcgttgttgggcaagataggggtatttgatgtcttcccagcagtattggaactcctcgaaagcaccgccgcagcatttggagaaacgggcgtcgcaaatcttaccatcagatgtcagtacctggccgcgggtagcggagatggcttgtttcacaatatcggtagaggcacgtgtaatgccctggtagcgttgacaatggtcgtcggcgcatacatcgaaacgtgtgtggtcttctcggtcgtaccagcgaatcagctcttcgtcggtctgcgtaaaggccgagtagttagcttgggcttcggtgatttccttattcttttgtatttgtgccagtagccagcttcgggagatgacagcgtgtgccttgagcagctccagagaagcggtggcactcatctcggaggagatgacgctggtcagataatcttctacatggatgacgttgatgccggtgagctttccattctcaacgatgattttgagagcacccagaaaacgctggtcttccttgcgctcccaatggaaattgatgccgatggtaacgtccaatagttcgaaggcatcggtctgctcgtgttgcggttcaaacagcagttcgtcataccggcgtccattccagagaatcttgccttcgtcgtagatcactacctgcttgccgctgacttccgttccgtccatgcgatacggattcagcaaaacgaattctatctgcggttcaaacagaatgcctacttgtactttgggctctttcataatggtatttctttaaaattagagttcttggatttcagaagtcatattttttccctgatacgctgccgtaccttgtggaaatctgtggcagagaggcatacttcacttaatatctgcgccacgtcttccgcagtgattttcaagaaatccttttctacgggggtgataaagacacctcccaagtcgacggatgccgggctgctcaacagattggcttctccttcggcagtatagcaggcggggcggtgtttctcgcgcgggaagacaaagaccacccaacggtcggcctcgtataggaccagtacgttcatcatcggctcgtcttcttcgggtttcacgtccagagaacggtaaatgatgtcgaacaagtctgccgcgtcctctttggaggtggattcaatcacaagtgtggcacggggagcgtcgtcaagataccacagtgctgctttcctataatcggctattttcccggcagtctgtccgcgccagtccttttcaataggcatgaaccctttgtttcctgcctggaaatgagcatggtcgggggcggaagcaccacatttgggaccgttgtagaagatggtgtaatccgtcagcgcctcggccagctccagcatgtcggtgaagcgggtggctatgcgttgaggggtatgtgccagttccggtactgtcaggtggcgggggaagatggggaacggattcaccagaatattgtagtgtcctccgaacgggatacctttctgtaccggcggcaaattggccgggcacagaaagcatttccgttccaggatggacttggcatccactttggcaccggaggaaacgatgcgtgccgggttgaactgtaccttataaggtatcccgtttacattcagctctttcacccgcacaccggagagggcggcatagttgttgcgtgccgtctcccaggatgccaattgtccagtcagaagatggtgtatcgtttgattcatatcacttgtttttgttcatcgctatgcgtgcctgaagttcccaggtacggatgcggtctttgtagaggttgtgtccgttcattttcacgatgtccagtgaggcatcggagttgtcgtcccagcggcggcagaggtagaccacgtcgtacacgcgtcctatctggtactggcgggagaagttcagtcccagtgcatagtcttcgccatagctggtattgggtactttcacttcgcgcagcaccggggtatagaaggcgcgcggggcacccagaccgttgatgcggagggcgttgttgcgtccgtttgccggagtccattccttgtggtcgatgatgcccggagcaatcatgttcatgttgaagtccgtcatcatataggtgcctactaccatggcgcagttctgctcgtagaaggcgcggaccatgatggcgagtgtattttcgtctttgtatacgtcatcgctgtccagctgcacggcaaacttgccgcacttggggtggtgtacccccatattccagcaaccgccgatgccgaggtcggtacgttcggggatgatatggatgacgcgttcgtcatccttgaattcatcgatggcctccgtagtgccgtctgtggaatggttgtcgatgatgataagattatatttaaagtctgtcttctgcatcagtaccgacttgatggcatcgcggatggtacggatacggttgcgtaccggaatgatgacggaggcctcatattcgaagttaccggcagagaactcaatcttcttgaactccggtgccagatatcccccgatttctttcagatgttcggtacatgcctgctccatctcaatctggcggtcacggtttttggggtctacatagtcgaaaatcttttcgccgctcttgcgggtatcgttttccacctcgctgtataagtattcgttgatatgtaccaagtttgaatgttggctcaatttcaagcgcaggtcgtaaagtccggcgaagttgtagtcagacttcatgtgtccggcggcttcctttagtttttcggtgttgaaaaggagcagggagccaaagttgaagtcatccctcaaggaaccgaattggtagtcgattaccggagcgttgctctgcttgccgtctgctatttggtagtggtcggcatataccataccggcgcttgaatcttcaaggatgtgtatcatacgttccagtgcaaacatacccatttcgagcgtagtctctttggtataaagcaatgtgtattctcccttggctgcattagcaatagctttgagagttgcactgctgtagggcatgtcaacaaacaatatttcgcagtccgggagcgattccagagtggcatcggtcgtgattaaccggatttcttctataagtcctgtcgcctgtaggctattcactgttttttctacttgttcttttcctgcgtagggaagaaagcaactgattttattcatgatatatcttttaatttttaattctcaatttttaattctcagaagtcccacttccccgctggttgccgtgaatagaacttcgtggccgttcaacggaactacggtactgatgagtgaatttcctattttatgtttccacagtactttgcctgtttttccttccagtgcgaagataagtccttctttggtactgccaaacattaccccctctttttccacttgcatggagggggcatgctcataaccgaaacctacattggttgcccacaactcccgcggagtatctccttgagctgcatagcaaacaatgctgtcgttcatcgttttgctatagatacgttcaccgtcttcggaaagtccgatggtctcgcgcaccatggactggaaggtgcgccacacggtattgcccgtatggatgtctatggcggtcatggcgcgttgcgggtcggtaatgaatactttgccgtcggtggctaccggccatacggcggctggagagaagtgcatacgggtcagtccgcccgtccatttccatagttcatgcccgtttgccttgctcagggcatacagtgtattgtcccatgcgccgaagataactttgtcttccgtcaccaacggcttggtctcgatgtagcccttcacgctggtgtaggcccagattacttttcccgtatggatgtctatggcacggaaagtggcgtcactggcaccgatgtatgctctgccgtctgcgatggtcacggctccgagcaccggttcggcggcttctaccgtccagagcaggctgccgtctttggcgttcaatccgtagatgcgacggtcagcagacccgaatacaacgataccctcgcttacggccggagtaccgacaatgcgcttgccggattcaaagctccatagctttttaccgtttttcagggcgtaggctgtcagctgtcccatatcgtctcctacgaacactttatctttttctacggcgggagagcagtaaatgcctgcgcccgtctgcaccatccattgctcctttacttgcggatactccttgttgaccgagaagtcaggatatttctctgcctttccgttgcggtcgtaatactgtccggtcagcgagaatgctgtccactgcttcttgggctcgccgatacgttgcgtgtatacccggatggaatccccggttacttcatagatgccgtaacccggtttcccttctttgtcgcacaggttgctgcgcatcagtacgcccggaatgccgtcgtaacgtaaatcccggttgctgtggtagtgtccgccgataaacaagcgcacgttgtaggggcggacggcatccgtcacctcataccaattgtccacatcaccttccattagcgggtagtgggtgacaagtatcaccggtttgtctttgccgtttttatccatttcttccgtcatccaacggatatcttgcggcactacatgcccgtaggccatacgcatcagcggaccggagttgaagccgaggaaaaggaatcccttatgctcgaactcgaagcgttcgccgccaaagatttctccgaaagcggtacagccggagtcgctccatttcgtttcatggttgcctaggactacgtggtaggggaccttcagcaagtcaaggcacgatttcactttttccatggtagtacggtcgccttcttcggtcaggtcgcccgtcaccaggacaaagtcgatactgtcggtggcattaatctgtgccacggaacgcagcaggtcctctgtgggattcggattgttcggggtcagatgaatgtccgtcagttgggcaaaacggaatgtcccttgctgtgcctgcatccccagggggagcaggcaagccatcaggacgattattaacagtcttctgttcatagatgatgattggttgatattacttgttgtcattgaagaatgtcagtacagcattcatgaatgcctctctttcagaatcagtacgtatggattcaaaagggaatcccaatacaacagtcttgtagtcgccttggtaggccacaccggcactcaggttgttttcagaataccgcatcacggtgtgtgcatctttggttgccggttcaatggcgtccggtgattccaccacatacgaatcggcattcagctcattgtgataggtatagtttcctgaaagggcggggaacggagaagctacgcttttcaccttacccattgtagccgcttgtcccacacgccacttatatttcagtacttccatcgcaaatttcttgtcggcttcgtcggcggttgcaaggcggttgtcccataaatccgttcctacaaaagcgcccgaaacaaagatatttccaccttgcttacaataagccgcaatagcctcctgcatcggtttgctgaaagtcttgaactccaacggttttacgcctccccgtcccatcttggtctggcattgcttcccaagtatcaagtccacatacctatactccctcatatccaccggaatattcttctctccctttcctacgggggagagactttcattactaaccgatacaaacgaatatcccgctttcaggatagcggcaccatgtatggcaggataatcgaacgtatttcctgcgatgacttgggtctcgtaatttccataactgtcgccgaaaccggaggcgtcgtcgtccatccagggaatggaacggcggtattccttcatcttgccaatgtagctgatgtcatggatataggggaccccgtggtcctgctcatccagaaatccggcaaggagggtgtcggcgggggcgggggccgtaaagtcggcaggggcactgatgcggtcgaatccgtttatcaccaatacggtacctttggaattgaacgcccgtccggcggaaagaatttcggaagggaaactctcgccgcccttgttgacagcggtaaccttgtagctgcataccatgccggcgaggagcgtggttcggtaactgttgccgtccaccaatactccgttgtcgaaatccccgtcgccgatacgggtataaacaatgtatttctctgctacggcagttggttccaacgcatccgctacgggttgccaggtcagttccacttcgttctcgctggtcatgcgcaaggtcatgtggtctaccggtaacggttgcactacataatccatgttgtattgtgagcagaggaactgaagcatacctttgtagatggcgcggcttacggtgaaacggaaacgcgggtccagtccgtagcgcatgtctgcaaagttttgatgggaaagtagttcgagtagcatggtaggtacgcggggtacacgggcctcatagtaggattggttccatttgccccggcgtgtccattggggttcgtagagggtacgcacgtcacgcacgatgttggactgaatcaagtctgtcaggtcgtggctcaagtagcgggatgctccgttggcgaatttctcattgtaggcgttggtatagtagatgccgagtgtcccgatgatggaatcgttcagtgtagttcctgcatcggagtggaaggcaaaggccatgttgacagggatgttcagccctttttccgtcgggttcacggcagagcctccggaaaggtagttcacccagataccacggcatttatagtcgtcggtatagtcattcttgccgttgctttctgaatatacgctgtccggtatgcctgcccattgcagccagtagcgggcggcttcgcagaaacggggataaccgctgacttctccccgagctatgtttcccatgccgccgcctatcttcacggcgtcggcagtgatgattcttcctactttggaggaaaggttgttcagaacgactttgcattcattgttccggccggcattgaagccgaaggtgccgaggtaaatccaggtgccgcctcccatttgctggtttaccttgaactgcgtggtgccgcctttgtgatagacggtgtaaagggcatcgtccgcgctgtttggcaaggtttggtaagagacgtatacggcgtattgtccggtcgaagggatttcgggaatccattcggcggtgcttgcgtttcctttcttgatggtttctatggcgcggtaggtgccttccttgaaaggattctcaaagtctatgtattgggggcgcaggtgggcgaagccttgtccttctccctgactccagagcttgtcaccggaattttctgtatagacggaacggccggtcaggcaaccgtcattgtctacgatgacttctgccgtctggcaatcgcgttcgcggggaagcagcacattggcaccggcattttccaacatcggtacgaggaagggcaatacgtagctctgggtgtagaggtcttccactgtctggaagatacgcgcacgctgccattcccagcggtcgagttttgattcgtagtaccagccgtggctttgccatagggcgatatgccggttatgcaagccgttggtgggggtgtagggggaggaaacttcggtaaccagaggcttggaagcgacggggctgaatgtcttcgtctttttgtcttttttactgcgcagggcttggggaaccagttcttcgatactgcgcttgttggtacggatttgcagcttgtatttggcaaactccaccggcagcagggcgcttacgccttggtagatttcggccacattgtcctcacggaaaggaatataggcacagttcatgttggcaaacagttgcagtgtatttccttccacagccactgagtcgatgctgatacgtcctacggaaacttcttttcgtgcggtggtatccaagaatttcccgattgcctggcggacatccgtcggaagtccttgcgcgcctcccgcgtgggggaagagggaggcggcaagcagactaagtaaaaactgacgtcttacattcatagatgatgtattaagttaattgttctttttatctttcttaatcaatagacagagaccgatgaaagtgaacagtgcattgaaaatcagcaattcgtagctgaattgataacctccgaaccagacttcggaattcttctgcagaatgaagcagagaaccggggaggcgatggcaactaacgggatgtacttgtcacgcacttgttgtttcatgaaaatgccgaaagcaaacagacccagtataggaccgtaggtatagcttgccagaatatatacagcgtcgatgacactggtgttgttgagaagattgaatacgaaaatggtgattcccatgacaaccgccatgccgatgtgcactttcttgcgcatcttcacaaccgtctcttccgacttgcctttcgttcccagaatgtctacggtgaaggaagtggtcagcgcggtgagtgccgagcctgcggctgaataggcagaagaaatcaggccgatgatgaacagtatgcccacaatggcagggaaatagttgccggtggcaatcagcgggaacagttcgtcactcttctccaccgcaatctgctggttggcggcaaagatgtagagcagcacgcccagcatcaggaaaagcaggatgacgaagaactgcgaaatgacactggtaatcatgttcttctgtgagtccttgaagttcttgcagctcaggttgcgctgcatcatgtcctgatccagcccggtcatggcaatcatggtgaaggcaccggcgaggaactgcttgaagaagtactgcttgctgttcacatcgtcgaagaagaagatgcgggacatgtcactgtcggcaatggtgcttaccataccggtaaatgacagattgaggtcggaagcgatataccagatgcagagtacgaccgacaccaccaagcagaatgtcttcagagagtctgtccagataagagactttacgccaccctggaaagtgtacaaccagaccagtgccaccgtgatggccacgttcagtaggaaaggcagtccgaaaggttcgaataccagcagttgcaacgtcaggcatacgaggaacagacggacagcggcaccgagcattttggagatgaagaagaaccaggcacccgtgcggtaggaagacatgccgaaacggttctccagatattcgtagatggataccaggttcattttgtagaatagcggtaccagcagataggctatgatgagctgtccggcaatgaagcccaacaccatttgcagatagccgaagctgctggcggcaaccatgccgggtacggatacataggtcacacctgaaatggcggaaccgaccatggcgaacgccacgacataccaggatgacttgcggttacccacaaagaagccggcgttgtctgccttccttcctgcaatataggataccgtgaacagtatcgcgaagtaggcggctatggtgatgattacggatagtggagtcataatgtttatttacaatttgttcatttacaatttacaatttgccatgcggcgtttctttagtataaactgttgtaccttcccatttacttttgaattgtaccttctctgaaattgtacattgtaaatagtgaattgtacatgtctttattcttcgtagagcaggtagggcttgcgctgtaccttgaatttctctacgtcgtctttccatcttgccttgatttcttcggcgcttttcccttcctttatcattttgcgcacgtagtcggtgcctatcaacagctcgaagaaggaacggaagaagtggtcgtccatgttcagattccggtaagcgtctatcacgtaactcaggtcaataccgcgtttccagatttcctcgtcgctcatgttgctcaggttcacgccgtggcaaagcttgcccaactggggcggattcttggctccgggaacactgcgcggggtgaagctgtagctgtagcccgtcatgttgggatgcccgtagacctggaaggggaggtcggttcctcttcccagactgaccggagtggcctcgaaatagcaggtcgaggggtacagatagatggacttcatgttcggcagattgggggacgggggaatcggcagcttgtatagggtctggtgcgtatagttcttgcagggaatgacggtcaggtcgcaagtgcgtgacgccggcaaccagcgttcgccgtttaccatcaggcccagttcgcccagcgtcatgccgtgcaccacgggaatcggcagccaacctacaccggatttatatttcatgtccagtatcgggccgtccacgtagtgtccgttcggattggggcggtccagtatcagcaccttgcggttgtattctgcacaagcgtccatcagccggcacatagaggcataataagtatagaatcttaggcctacatcctggatgtctaccacaaggatatcaaacttgcgcatggatgcttcgcttggttttccggatttcccgtcgtacagcgagaggataggtactccggtcttcttgtctaccgagctggacacgtgttcgcctgcgtcggcatctcctctgaaaccgtgttcaggggagaaaatggctaccacattgaacttgttttccagcagaatatccaacagatgcttgtctcctatcattcctgtatgattggagaatatggcaattcgtttatcttttaggattggaaaatactcggaagtctgttcatcacctaaaataactcgttcttcttgtgcccggcacagtaaagaactacatagcacaaaggctaaaagcagcagtttcttcataatagtattattaaggaggacgttgtttgcaacaaagatacgttttattttaatatcaaaaacacttatttgggtatttttagtattatcaatcataatttgcaaatagtcaactgttcaccttattaaataatggttgaactgcatcagctgcgtacggaaatactttttataaaaagagtgagggccaagtttgccctcactttggtacaatcggtgggagtgccggttcattcttctattcttaccagatgataaagtgttccccggttcgatttcttgttgaggatgtccagcttgcggagcgtgcgtccgaaagctgctatccggttgatggccaacttatccctcgttttctgttgcaggtcgttgaaaatctgcatggctgtgagccattcgccttcttcgctctcctccgcgccacggaaatggcaaaggaaaagttcttccaatgggtctacccgctcgaattcccggttgtactcctttacgattgcttcgtcagtgtcgtccagccagtagcgttcacccttcatgatgtcgtgcatggcttgggcatagagctggtgataattgatagtgacgtttgtctggataggaccggtcacttcgatgcagatgaaacggcgacttcccgacgggtcggtcagcaggtctttcagattgctggtcccgatgaaggaggcatagcggcgcatttcctgaatagtggtaccgtagggctttcgcaggttggcaaccggtttttgcaggaggtgcttcaagaagccttgctgattggcgtttatctggtcgaattcgtcgatgttaatcagaaaaaagcggccaaggctgcgctccgcttcctgcttgctcttgaagtcgatactgtcggtgtagccgaaacgcagttccggtggcaataggatacggcagaaagtacttttgcggtaaccttgcggacctacgagcaggggcgaggtattgttgccgtgctgtttgtcgattccccgccaatgtgccaccatgccaagaaaccaccggtagaacagttccctccagtggggattgtggcagggcacgaggtcggccaatgcgcggatgcggtctttgccgtcccagcgtccggtgttatagagatattcttcgatggggttgtatagcggcacgtagtccgaagacaggaagcgggtgatgtcgcggtcccacacacgtactccctctttcagtgccttcatggcgatgctgctgcgtacgcgctggtcggcaggttggaagtagaagtggatggagtcgcgctgccggtattccaagtcgccaagcacggtgttgtagcggaattcgtagcggcgtttcatgaactcctccagccggaaagcagtttcctggtctttgttcaggctgctgcgggtgccgaagcctttcaattccccgtaaaggttatgcagcgtcaggcgtacaaggggttcgtctgcctcccggtagtagtgcatcagtgtctggcgcaccgcttcttcttcaggaatgccggctttgaagcaatgttcggcaaggcgggacagcagcgggcgcaggtcgtcgccccgtcgccagttgtccaaatcgcggaaggcgcggtcgagggcggcctcgaagagcaggttgcatgtgtccgccacttcgtagccgggagtcattctcagcaacggattgctttcctgctgtttccgttggcggtagttgtcttccgagggcagggcgcagggctgttccaggcagaaggccacggcggtggggctataatagggctgttcgtccacggtcatccggcagctttgtaggagtgaaggagcctggagggtgatggggaaagggagaaggggttggtagcacttcactgccaggcggtaggcgtgggcgtggaataaggcgatatcgtcttcattctttggaagccctccgtcgggcagggtgaagcgtacccatattttggcgcttcgtccgctggagccacagaaggcggcaaaggtttgcggcagcagggcggcttgttgtttcaccagttcggcttcggccaccccggccagattgtttacttccagtagtaccagcccgttgtaggtctttatccggtgttctcctgctttggtgcgggtcatttctacggcgggatagagacgcggcagtctgtcgatatgctcatatcgggcgttggtccctttcaaatgcgggatgatgctacgcagctccgtaatgtatccggtcttgttctctgttttcagcttttccatcaacatgtccgtttcttgtgtgctgacggcctcttttccgctttcgcgttcctctctgatcagtgtgattttcattctttatcgtgtatgtaatattcttgtaaagatacgccgggaaagggggggatacaagcttttcaaggattattttccgattggcttcttttttggggtggaatgtctatatgtttcttttataaaaggtgtttgtttctttgcttatccccatagttttgtctatttttacaccagagtttatgaacagtccactaaagtggtctttcttgttcatattagtgaacggagcagctcactacagtgaacggttctgctcacgggccgggctgtgatataacctttgtacttcaacagactgcgtacgtacttcgcacgtgttccgtgcagtgctttatcgtataatgtaaccctttaacgcagtttgaactatggctattttgtttgattggtacgagaatccggactcgtacgacaaatctccggaagataaaatccttcatccccgtctccgcctaaatgggagcaggtctaccgatgaattgcggcgggacatccaggcacgttgctcattgacagaaaccgatgtgacggctgtgcttgatgctgtgtcgcacgtcatgggcagggaacttgccgaaggaaggcaggtgcatctcgacggcatcggctactttcgcgtgtcgctcaccacgatcgaaccggtagtggctgctaccaagcgtaagttgacgaaggtgaagatggcgggtgtgaaatttcgtgccgaccaaaaactgaaaaatgaaattggtaccatcaaggcaaaggctttgaaggcaaacgagcattcggctaaactgacggataaagagatagaccgtcggctgaccaactatttcgccactcgcccttttatgacacggaatgactttcaaagcgtttgcggcatgatgcgtactactgccatgcggcatatccgtcggctgcgcaccgaaggaaagttgaagaatgagggaacaatgctgcaaccgatttatgtacccgtttcaggatattacggtaagaatgagtgacttataactttgaacgaagaaatcttgtggtgagggcaaattttgccctcactttttaaatttgctctcacccacctcttgaatgccgatgaatagggcgatgcgtgcgaaaggtgagggtggtgagggtggatgtgtgaaatttagtttagtttgatgggcggctgaatatgggtattcccatacggtgtatatgttccaaaaggtcggcattctttaatttgccatagatggaaaggtctacgctgtaaggcaaaagcaggtcgtctatttcatcggaaaggctgcttaaagtattatacgtaagtctgtctcccatcagcgtgatgtctatgtcggaaaaaggcttgaaatttcctttggctcgtgagccgtacaaaacagcctgctctatttcttcatgtttccggaagagattgcatagcttttccagttcattgtcggtcaatccgtacatagctcaatcgaataaggatggtgtattcaaggattgcattttctcttcagagactacatcgttgtcatgattgtgcgatgtcagatttcgggcttctatagtctccgtccattgcttgtcatcaatcaatcccatttcaagggctttgcgtatggcatcacgggagctgcggatgtcggtatacccctgatattctgcatagtccttcatcactttccaggccagttcgtgggtatattcaaaacgctgtatccatcgtatgtcttgctgtaccatgatagctgtctgtttttaagtaagcaaatataagcttcttttgtgtaacgagcaaatggatgggggctttttcgtgaaagctgtctggggctattttggagaaaggctgtttttaggtgtggaataagttcctgaatttgttgagccgatgtcgaaatagttatatatgtatgttctggttccacatgcatttatgaaatcaaccgttacgcaaactcgttcaatttcatgactgttccgactgctgaaagtagtgaaataatatccttgcatgtctacctcccaatcgcagtcaacactccaatgaaaatcatgcgcaccttcaggaataggattcaatccgcattcacctccgctttgtgacagatagccatatataatgtcatggtcattttcttgtattcctgatacattgaaagtaattggtttggaaaactgaacagtgtattcctttgtgtgtactattgcggttaaggtcgtataaatggaactgcctccgggtgtccctaaattattcagggtgatagcaggtgatgcctgatttaattgcgaatataaatcgttgccaacaatccaatccactgttgcttttgtgggaaaattcttgatactgaatgtcccgttgtcacagattacgtcagggccaatcagttgcattgatgtcttagatacactcaaaggtagctcattggtaaaattatcggtttgatttttatatttgtagctcactttgacacttgcgttaccgggttgtgtcggtacgattgttaccgtagagctgttctgaccacttactatcttaatattcttcccggtccaataaaatgtatgtgccttgctgtcattgatggaatatatgtattctttatattgttcaatatttctgtagccatctatttgaggacccatattgggaaaactgatattgcttttccgagccatgaaatactcttttgctccgatagaatttatgtagaaatcatggacttctactccgacatcgctgttcttgaaggcttgctttgatttcaaatttatttggaatttgctttgtgtaacagatgcactttgagagatttcagcgaatagatttttatcgtaagtccactttatgcccgtatctttgtttatgggataattgcaccaaagtgttatcgtatctcccaattcaaatgttgaaggggcattgattggcataggtttcattttgacattgatgtttcttagatctgcggtaagttcgattgtacttttttcaggacgtaccatcagggtagaattactacctgctttagtccataatacatttattggaaaatggttttttactgctggaatttgggttacccatgtactctcgaatcgttcttggtagtttgttttgaatcgtgcttctccaccgactgctgaaattcttatacctacagattgtttttgtataggaatacttaaatcataagtgtagtaaccatcaccaacataggggttcatttcgcccgtaatagtaccgcttatgtaggaagcacgtgttgtgacatcagaatagaaatccttatcttgtaactcgtctgtttgttcttctttgttgcaactactattgatgaagcagattagtagtacgaaaaatatgttcttctttttcatgatatgtttcttgttagtatgttatgaacgaagggaaagtatatgatattgatttatggttccttttagaaggtgctattcgtgtttctatacaccttttaaagggaataacaaaagcgtccatacatttgtatttagatacatggaatgtatgaacgctttaattaaatccaaacgaggtacagcgcgatatgctgtttttagttgattaccaacccggattctgcttcatgtttttatttagggtcaactgtgtagttggaatcgggtagaaataatgtttggcttcataagtacggatttgtgcatcggaggcatctatatatccgttcttggtcgcttcttcacagtcaggcacattgcttacgttggcgcccaacatggtgttcgggtacttggttgaatccaatttgtcgagctggtgccaacggattaaatcccaatatcggtaccagttatccataatcagttcgcaacggcgacagcggcgtatctcccaaatcagattgcttactcccatattattggcaggatcggcatctggagtagttgtcatagccggcaggccggcacgagcctgaagcttgtttatggagttgttgagatcgtcttgtgtgagagaacccatttcggctttggcttctgcaaagttcagataaataactgaaatccaatagagcgggcagtcggtgtattggtagccgatgttgtttcggtcgctaacactcaattcttcggggttatcatacttggcgatgccataaccggtcgatgtggtgaaggctgctacaccggcacggctgtaggcgtggcctctgaaagaaagtaccgggtcaagaatttcggacaggcgcttgtcgcgtacggccaaaacctctcttatagagtaatttttgtctgcatccaatacggctgcatcgtccttgtttttcgaggttgttgccaacggttttccatcaaggaaaaggaaactgtcgaatgcgtcctttgaaatgccgtgcgtaccacttgtattgattgtgtagtcaatggtggagtgccttaacgaactttgtgcataaggcttgtagaaaatcatttccggattgcttgccaggctgacagaattatagttggctttgtaactgttacttagagagtagtttttggccataagatattcgcaggctgatacacattcttgcaagtatttgttggcgcggctctcatcagcggctttgccattctcggcttgagtgcgatatttgcagtatgtaccttcatataaggtgatgtctgctttcatggcatatgccatgtcggtgctgaaacgttgccgattgctgtttgcggtaatgtgttcgcacgcataattgatgtctgccagcacatggtccatcacttcatcccggtcggtgcgtggtccgtagagggcttcgttgtcggctgggtcgataactttgtctatccattgaacatcgccgtacatacggaccaactgatagtattcccacgcacggttcatgcgtgcaagaccttcatagtgggcctttgttgcttcatcaagagaggaagactgtacaccggcaatgatatagttggcgcgtcggatttctgtgaaaggggctgaccagtttgtggaagatgcgaccacgttagtgtaagtccagttatggctttctgcatctacctggtcatcgcttattgttttgaagtagaaccatcctccactggctccgttgccaaagccggtaaagttgttataaaaagtattgcactgattatccaaattatcggtgttgctccagtatgccggagtattcgtgaaggtatccaagggggatttgtccagcaaatcgttgcaaccggttaacatcgccagcgctgtgaccccatatataaataatttcttcattgttcttaagtttttgaggttgttataatgttacctggactccaaatgagaatgtgcgtgtaataggagctatacgtccccatccaccagctgtaagtccattgcctgtactgatttcggggtcgactggaaggtcattccctttgtggagcagaaagaggttgctgccactgaagtagatacgtgctttctcaatgtaggctttgcgtgtccactctttcggaagggtatatcccacagttacgttcttcagacgaagataggacatgtctgtcaaatagcgggattggggatagtagttgttgcagccgttagctataccggatacggtacctccactattatttgtaccacgataaagacgtggataacggttcccttgatttacctcataaccggtaatggcggtatagtctgaattccaaagcactttgttatagcttgtttggtgggaatagatggctacgtcggcatgtaccatggcgggaaggtttagggaagaagtcgtccagtcctcacgtttgcctacaccttggaagtagaggtcaaggtcgatacctttccacgctccgcctaaatggaagctgtattcgtagcgtggcatagagtttccgatgactttcaaatcgccgtggtcgtctgctgtgccttttccaccgtcaatcttgccattgccgtccaaatccttgaacttgacgtctcccgggccgtaatggaaattaccggattccagtcctgcctggcttgcaatgccgtttgcataattccatgagccgtctgcattttggctggtgaagtctttttcctcgaagtaacggtcggtttcaaaaccgaaaatgtcaccgtaggttttaccggtgtaataggtgctgagcagtttggaatcattgtcccactttgttactttagtcttggagtcaccgatgttgaagttggcatatacgtcgaagtcgccgaaggtatggcgccagttcaagttcaactcccatccacgtgtacgtaaggtaccggcattttcataaggagcagaagcacccagagtgttcggcaatacttgtgccggtgccagcatgtcacgattctcacgttggaaccagtcgaaacctatagtcagttcgtcattcaagagacccaggtcaagacctatattgagggtgcggatacgctcccaggtcaaagtacttgataccaaatccggcatgttatacatggtcaggagattagcgttggcattattgttttcaatccaatagatatagccggtacttttattgttcaaccgttggcttattaattgttcgaacatgtagtcgcccacagcctcgttgccgatttcgccaaaagaagcacgcaacttaccattgctgacaatatgtttcagtggggcgaagtaggcttcttcggagaagcggtagccgatggatgcagaagggaagaaggcccactggtcggtatgggggaaacgggaagaaccgtcgtaacgtccgttcagttccaataaataaatgcctttgtagtcataattgatacggccgaaataaccggcagaagcgcgggatgtatgattccaactcaaatcttgtccatccttgccagccatattcagttcggggtatccctcttgatcgtacatcacattgcgggtaccatacagatatttgtattcctcttcttctgcgttgacacctgccattacattcaggttgtgttttttggcaaatgttttggtatagtttacgtatgcgttggccgtccatgtgttctgtttggaaaagtctctccagataccgctattgcctttagtgacgatgtaagagggtaccggtttcccgctccaattgatgccgtaaacggagttgtcctgcgaaccgctgttcatattctgaatggcatatgtaaagtctgcattaagggtcagtcctttaacgatttcagctttcaagaaggtgttcatacgggtcaggtctgttgtcacttcacgatcggcagcttgcttctgcatggccatgacgcgtgtgtcatagccgtcgattgtgcccgaaggaatgaaataagaaccccaacgccacaaatattggtaggtgttggcccatgtgtccgggcgtttatagttcttacgactatagttgatgcgtgcacccacctgtagccagtcgtaaacattagtggtgacattgactgaggcattgtacttttttagttcgtccgggtgaatcttcatctgtccttgcttttcgttgtagccgaaagataggtagtaattggtcttaccagatgttccttgtatagaaacattgtggctcatggaaggagcagctttgttgaagtagatgtcctgtacatcccagtcagcataataaaaaggagtgccgtccaatacgatatagtcacccacgttactatcgctttggtagaggttcataggacggtagccggtcttgccgccgttctgttgctgccacttttcggcgtaaggtaacaatttgtcgaaatacataccgaacaattcaggcataccggcaccaccgttcatactggcttcgatacccatctttaattgtgtgggtacatcgggatagtccggcaggtaagtagcttgatcccatgcaaaattgttgctgtaattgatggtaaccttttcgctaggctttgcgctcttggtattgattagaatcacaccgaaagcggcgcgcgttccataaatggaggaagcggaagcgtccttcagtacggaaatattttcgatgtcttgcgtatcgaggaaagaaatgtcatccatcggaacgccgtccactacaatgagtggattgctgacttctccattactcaatgtccccaaaccacgtatacgcatggaggctgtctcgtcgatggcaccacttgtggtgagaatgcttagtcccggaacagccccttgcaatgctttggctacatcttgttgtggacgacctgccattgtcttgtttaagtccactgtagaaactgctcctgtcaagttagccttcttttgtacaccgtagcctactactactacttcatccagcatctcggtatcttctttcagagttattctcatcgttttggctgccttcacttcttgtgtctgatagcccacaaatgatatttttagtgttgctcccggtgttatggtcaatgtaaacttaccgtctaagtcggtaattccgccgttggtagtccctttttctactacgctggcaccgataataggttcgccggctgcatcgacaactaaaccgctgatggtgatagcttgtaattgttctgttacgccaagcgatttatcaggattggcttgtgcagccatcacgttgccgctacttaataacagtgagctgattgccactgctgtgaggagtttgctatgtgttagtcctcgttttttgtgatcttcattcataaatgattgatgatttgttgttaattaaatacttcttaaatttagggtaagggtaataagggccgaatagtgagactattcaacttgcaggattgtttctttttccataggcattttctctttttaaaggttcataactttatattatctcttgttttcctatttgtttgctaagttcagacggaacttagttataccttaattccgcaacactattacaaatataactttttaagtacctgagcaacaaaaagttgctcaggaatttgccatgtcagatttttcacctatcttagtgttgcaaatcaaaatatgtatcaaacccgacagacatggcaaaggtagcaattaaatccgagaaactcactccttttggaggaatattttcaataatggagcaatttgactccagactctcatctgtaatcgactcaaccctcggtatgagatgcaggctgtatggttatcaatacagcgaaatcatccgttcgcttatgagcgtttatttttgtggcggctcatgcatcgaggatgtcaccactcatctgatgtaccacctttcgcttcatccgacacttcgcacatgcagtgccgacacgattcttagagccataaaggaactgacccaggataacatttcctacacatccgacactggcaagacctacgacttcaacacggcagacaagctgaatacactgctcctcaattgcctattgtccacagggcagctgaaagagggcgaggggtatgacgttgacttcgaccaccagttcatagaggctgagaagtttgatgcgaagcctacatacaagaagttccttggttatcgccctggcgtggcggttattggcaacttgattgtcggcattgagaacagcgacggcaacacaaatgtccgtttccaccagaaggacacgctgaagaggttctttgaaaggtttgaacaaaacaagcttattatcaaccgtttcagagctgattgcggctcgtgttctgaagagatagtggaagagattgctaaacactgcaagaccttctatatccgtgctaaccgatgcagttcgctctacaatgacatctttgccctcagaggttggaagaaagtggaattgggcggcattgagtttgagctggcctccattctcatcgagaaatggaaagggaaggcataccgtcttgtgattcaaagacagaagcggatagacggcgaactcgacctgtgggaaggagaatacacctaccgctgcatccttacaaatgactacgagtcttccgagaaagagattgtcgaattctataacctccgtggagggaaggaacgcatcttcgatgatatgaataacggattcggctggaacaggcttccaaaatcctttatgggagaaaacacggtgtttcttctgcttatggcactcatacgcaacttctataaattcatcatggcgaggcttgacgtgaagaggttcggactcaaagcaacaagccgcatcaagacgtttgtctttaagttcatctctgtgccagccaaatgggtcaggacatcaaggaagtatgtgctgaatatctattcatgcaacaatgcttatgccaatgtgttccagaatgactttggataacaccgacaacttatagtcgtgattttgcgtattgcctcaagtcgcatggtggggtaaggggcatttatatgtctttatggtgacattcgatgcactgtgccccctttttactaacgatgcagattcttttcgcttctgtatcatattaggcgcgtagttgcggatttgaggttatatattatataaggctaaaattttgttaattacttaactctattggttgttttaagagataaaaaactcgttattaacaaaggtgagaaatgattcgttcatttcgtcctaacaaagatacattattatttaatatcaagaacattcctttgcatttatttaactttatattcatacatttgcaaaaaggaggttatacaccttattatataaagaatttaaggttcttctatatttaaagaatggaattcaatcagaccattcattggtgtttcttcaatgatttccagttcgatgccaaattcacgggcaacttcccgcaaaatggtcgcgtagctgtaagccaatgaacccacaaaacgaataggataatttttgtagtcatattggcagacattacgagtaaagaaatttctcagattaccggtaatcagctcaaatacatagtcatcattggtataatctgccaaaaaataagatatagtagacaaaaagcgattggggaacgggcggttatacacagattccataacctcattcgggcttatacggaacttctcaaagaaatccgccgttacatctttaggagccaaacctttcagtacatcagacaaaaacattttgcccaatacagcaccactaccctcatcccccaggatgtaacctcctgcccggacattctttacaacgattttcccatcataaaaacatgagtttgagccggttcccaaaatacaagcaatgccggcctcgcatttgaacaagccacgtgcagctgccagcaaatcactctctacctgaattggagttttgaattgtgctaccaatgaagctcccaatacatttttcttttcataagaagtacatccggcaccataataatagacttgttccaatttccttttgaaaaaatgctcgggtaatcctaaccgcacacttcggctaatctctcttctcgtttgaaagaaaggatttaagccctctgtgaaggctcgctgtatcagacgattatcttcaaccagcgcccattctgttctcgtagaaccactttctgcaattagtttcataggtagttagttttagaattgaatacaaatatatagctttttttaatctttccaaggctatttcaagaaaaaatcattttactggccatacatctcccttttgctcatatcctcaatcatccaacaaagtattcccacttttccaacgcaaccgcgttttagtcaaaacaagacgataacagactaacaataagatactatctgactgaattccaagttccgtctggacttggtaaataaatagaaaaaaagagagataatataaaagttatgaacctttaaataaagaaaatgcctatgagaaattaaagaaatcttcggaaatggtctgacaattccgaactatatgattcccttatcctaattttgaaaaactggtttaattaacaaaatcatcaatcacttatgaatgaagatcgcaaaaaacgaggacttgccaatggtaagttctttacggcggtggcaatctgtgctctgtttttaggcagtggcaacgtgatggctgcccaaacagcatccgacgactcgcaaggagtacaagaacagatgcaatctatctctgtgactgtcacagttgtagatacaaaaggtgaacctattattggcgccaatgtcattgagaaaggtacgaccaatggtggtattacggatttggatggagtttccaaattaaatgtaaagcccggtgctattctgcaagtatcatttgtgggatatactactcaagaagtcaaggcaacttcggtaatgaaggttgttttgaaagatgatacggaattgttggatgaagttgtcgtagtaggttatggtgcacagaaaaaggtgaacctgaccggtgcggtggcttccgtggatgtgaacaaaacaattgatagccgtcctatcacggatataggccgtgccttgcagggggcggtaccgggattgaccattactactaactccggtgagataggtggtgcgcctactatcaagattcgtggtagtatcggttctccgaatggtgactccaaaccgttgattctggtagataatgtggaagtaacggatatttctatggtgaatccggacgatattgaaagtatttctgtattgaaagacgccgcttctgcttctatttacggtgcccgtggtgcatttggcgtattgctgattaccacaaaatcaagaagtaaacatgaacgtctctctgtaaaatataccaataactttgcatggcgtacgccgaccaagacacccgaacaacttccgggatggcagcaggctgatattaacttgcaaggtgtaatcaatcagactaaggggtctaccgcattttataacgtagtgggtaatatgcgtgtggatgctacacatgtgcagaaaatgaaggattactgggacaaatatggctatggtgaccagtttggccgtgagatggaattgggtcgtgactttgagttccgcgatggcggtatgttctttatccgtacttgggactggtatgatgaatacatcaaggactgggctccgcagcagaaccatagcctttctatcaacggtggcaacggaaagactaattacaatatcgctttgggatatctgagccaggatggtatgatgaaagtcaattcggacaactataagcgttacaatgccaatatctctttgaactctgaattaaacaaatatgtgtctatccgtacaggtgtcatgttcacccgttctgactacgacaagccattcaactataatactgatctttacgacccgatgtactatctgtatcgttggcagccgatgatgccttacggtacttttgaaggcaaggagttccgtaacgccttgaccgaacagaaaagtgctcctattaccacaaaagaacgtgagtatctgcgtttgacaggtggtgcaactatcaagcctatcaaagatttaacactggatatagatgttgcttatagcagcgtggaaaatcgctataagaagtatggtacaccgagcttgaccagtggttatgaaatcttcactgcccgtccgtctgttgaggcattacgtgattcttatggcagttatctatctgctgctacttatgattatgtatatcaggaaaccggacgcacggagaatctgacagccaatttcgtggcaacttatgccaaacgctggggagatcatgattttaaggcaatggcaggttccagccttgaaaagagcgaatatgaatattactgggcgcaacgcaaaggtctgctcgaccccgcaaaaccggaattgaatctggctacaggtgaccagactacaagctcctcgcatacttggtggtctgtagcaggcttcttcggacgtcttaattattcttataaagaccgatatatgttggaactgaacggccgttatgacggttcctcccgtttcccctctgggaatcgtttcggtttcttcccatccatgtctgccggttaccgtatttctgaagaaccgttcatgcagtcactgaagccttatctgagtacgttgaagattcgcggctcttggggtatgattggtaaccaggatgtaggtaccgaccgttatatctccactctgtccacttctgtagacagttggattatcgatggaaagaaagtacagtcaacacaaaaaccgactattgtgtcttcaacccttacttgggagaaggttactacacttgaccttggcttggatgcccgtttcttcaatgacgctttgggagtaacgtttgattggtataaccgtactaccagtgatattttgactactgccaacctacctgccacattgggtgctgacgctccatatgaaaatatgggtactatccagaccaaaggatgggaacttgccattgactatcgccataccttcaagaatggtctgcactttggcgtgacggcttctgttgccgatgacaagactgaagtaaccaagtggacgtataatacaaagattccttcttatggagctaccggctggtgggataagagtgcttataaagaaggtatggttttgggagatatctggggcttgcagttcgaccgtttcttgacggaagatgactttaatgctgacggttctttgaaagccggtttgcccgaccagactaaagtattccctgccggttatcaatttgctcccggtgatgtgctttataaagacctcgacaacaacggtgaaatcgtaaaacagaccaatacaaatgacaagggtgaccttagtgttataggtaacgccctgccgcgtttacagtttggtttgaatctggatgctgcttggaaaggctttgatataagcatgttcttccagggggtagccaaaagaaaactttgggcggcaggtaaccaggtattaccaggctttactaccggtgaacccttctacaaaggtgctgaggattattggactcccgaaaacacagatgctttctatccccgtccgatggattacaagcagtctgcttcgggtaactatagcgtgaatgaccgctatttgctgaatatggcttatctgcgtctgaagacgtttactgtaggatattctcttcctaaggtttggttgagtaaattcaaagtgcaaggtttgcgtgtttatttcactggtgaaaaccttttcaccatcgacggtgtgaaacctgctatcgatccggaaataggaatacgtacggccagtggtaagagtgaccagcgtaactttggccgtagctatccataccagaagacagtgtcgttcggtattcagcttagtttataatctaatagtaattgcagttatgaaaaagaaaaatttattatacatcgtttgtgcgttggcaatgggctcgctctgcggttgcgacgattttttgaataaagacccgcaggacaagcagaccaatgacacttattggcagactgaaacttctttgcgtacttatgcgcaagacttctattcttcctactttacaggatatggtaccgactatactgtttttgccggttatttctctggagatgactatacggatgattttatcaatctgaataatgcaaatacaaacggttcaggatatatttatttctccacttctgccactacggactggaatagccagacaggaacttggtcgggcaattatagtgttatttataaagccaatgtcatgcttgagaagattcccggaatgaatatttcggacgaagccaagagacactgggaaggtattgcacgctatttccgtgcaatggcctatagtacgctggcaaagtattatggcggtgttccttactacgataaggtgacagacccggcagacccggctctttataaagaccgtgattcttatttgtatgtagcgcagaagatacaagaggattttcaatatgcattggataatgtacgtacggatgatacgaagcgccaagtcaacaaatatgtggttggtgcgtatatgtcacgcgaaatgctgtatcatgccacatggctgaaatatcacggtactactgtaggtcctacttcagagaaagtggcggatggtgatattaagaacttgctgcaaggtgccattaatggtgcggaggcagtaatgaactccggtatctattcaataggcaatacttataatgctttgtttactacggacgatttggctaacaatccggaagtcatctggtatcgtgaatatacaagcggtttgcagtgtaatgctttgatgtcctacaatggtccggaagatcagactcagggtggtgttacgcaagatgtaatcaacacttatctttgcagtgacggtttgccgataggtcagtctccgctgtatcaaggtaaggaagacccgagtattcagaagtcatttcaagaccgtgacccgcgtttgtatcaaacagttgccgacagtcttcgtatcatgagcgccatggggacaaattataccgaaggtacatcaccaacgggatatcctaccaaaaagttcttgaacgacgagtggtgggtggctggtctggattattgtaccggtagattaagtccggctgatgcgccgtgcatccgctatgcggaagtgctgctgaattatgtagaggcgcgttatgagattgcccaagtggggggtaacgctttctcgcagagcgaccttgacaagtctatcaatgaactccgtgaccgtcagctgacgaagtggggagatactgaagccaagactatgccgaaagttcaactgaatggcagcaacttgagtgtgaatggggttgttattaatgaccctgcccgtgaccctgatgtcaatccggttttgtgggaaatccgtcgtgagcgtcgtattgagttgattatggaaggccgtcgtggtgaagacctccgtcgttgggccaagtttgaatacttaaactcagaagatgtaaatggttatcctaccatgtctttcctaggtgcttatgtcaatatggccgattatccggaaatatcttcaaaagatgattccggcaagagagtgctctatctgttcgacccagagaatccgggtaatgaggatactgaaaaagggtatatttattatcttcgtgaaaaggaacttcgtatattcaaggctggtgaattgaattcggaacgctactatttgcgtgccataccggctgcacagttgactatttatgagaataaaggtcaggtattgactcagaatccaggttggtgacaaagttattttaattgttgaataaacgagggtgtgtcttcatttgaggtacacccttttgttctaattataaaaaaatagtcagaaatgcgattaaaaaggatccttttatttgggggcgtttgtcttttcgttttatccatacaagcgcagtcactttcctcatctttacatcctaagcgtgaatttagggcagcatggatacaaacagtacatgggcattttcgtgatatgcctacgaggcagttgcaggatactttgcttgttatgttggattctctgcggcaggttggcatgaatgctgttatttttcaggttcgcccggaagcggatacattttattcttcggagttagagccatggagccgtttcctcactggggagcaagggaaaaagccggaaccggaatgggatcctatgcgctttatgatcgaggaatgtcatcggagggctatggagtttcatgcctggattaatccttatcgggtaaagaataagttggatgatgaattggcatctacacacatctataatcggcatccagagtggtttgttgtttacggtgaccaacttttttttgatccagcgttgcctgaaagtcgcgagcatatatgtagggttgtgggtgatattgtgaggcgttatgatatagatgctatccacatggatgattatttttatccttatccgattaagggacaagatttcccagataatgagagctttattcgttatggtgagaattttaccgataaaggagattggaggcgtaataatgtaaatttgctgattgaaaaagtacataaaactatacgggagattaaaccgtgggtgaagtttggtatctctccgtttgccatttatcggaatgctactactgatccactcggtagtaggacgggtagtcttcaaaactatgatgatttgtatgctgatgtgcttttatggcttcgtgagggttgggtggattataatattcctcagctttactgggaaatagggcatccgcgggcagattataaagaactcgtagaatggtgggcgagacatgcagaagagcgtcctttgttcatagggcaatcggtggaaaattcagtacgaaatgttgaccccaataatccggcctttagtcagctggggtgtaagatgatgttacagcgttcttttcccgagataggaggtagttgtcaatggtcggcttttactttactggcagatacagctgggtatcgtgaacgtttgaaacgggagtatcataagtatcctgcattgccacccgtgtttacttttatagataaccaagcaccgggaaaagtgcgcaaactcacagctttgtgggtgaacggtgaatatatgcttcagtggcatgagccgaagtataagagtgaaatggatcgcgctgtgcaatatgtggtttatcgttttacttccaatgaaaaaatagatcttgatgatcctttaaatattgtatccatcgtatgcgacaacttttatagattgccttataaagatggggaaacggaatatcgttatgtagtgacagctcttgaccgtttacataatgaatccgctcccatgatgagccttgtgaaattatagacggagattgctcaagtagtgagaaatttttgagggtactgaaaatatgaataatttatactttcagtaccctcaaataattttatgtggtaatcctcgaacttacagtgccttttccttaatcaggtattctgcaatctgcacggcattcagtgcagcgcctttcttaatctggtcgcccacaatccagaacgtcaatccgttttcgttgctgaggtccttacggatacgacctacgtaaaccgggtctttgcccgcgaggaacaacggcatggggtattccttttctgccgggttgtccatcaacactagtccgtcgcctttggcaaatgcttcacgggcttcttcgatggagataggacgctcggtctctacccagatactttcggagtgggagcggagagcgggaacacgtacgcaggtagcgctgacttttacatcagagtgcataatcttgcgggtctcgttgaacatcttcatctcctctttggtataaccgttgtcggtgaatatgtcgatttgcggaatgaggttgaatgccagctggtaagcgaatttctcaacggttacgggttcgcctgccaatacctggcggtactgctcgtacaactcatccatggcagcggcgcccgcaccactggcagcctgataggtagaaacgtgtacggtctttatatgggaaagctgttcgatggctttcagtgccactaccatttggatagtcgtacagttagggttggcaatgataccgagaggacgttctttggcgtcggcggcattcacttcgggcactaccaaaggtacattgtcgttcatacggtaagcgctggaattgtcaatcatcactgctccgtacttggtaatggtttcggcaaattctttggaggtgcctgcgcctgcggaagtgaaagcgatatcaacccctttaaagtcatcattgtgttgcaagagtttcacctcgatctgtttaccgcggaaggtatatttggttccggcactgcgtttagaaccgaacaatactaactcgtccaacgggaaatttctttcatcgagcactcgcaggaactcttgtcccacggctccgcttgctccaacaatagctactttcatttttcttttgttttaaattaagtttataaaaaagtgaaatactatctctaaaaagatagaattggtcgcaaatttataacaaaatgctgtataacaccgcataaagtgaaaagtttttcgttattttgcattcaaaacctaaaacttatagcctatggattggtttgacttcagcttgaaacttcccatcaccgaccctacatggatattcctccttgtactcctcattatattgtttgctcccatattgttgaataagcttcgtattccgcacattatcggaatgatactggcggggcttgtcattggggagcatggtttcaatatcttggtgcgtgatagcagttttgagcttttcggcaaagtaggcttgtattacattatgttccttgccggtctggaaatgaatatgggagacttcaaacagaaccggggcaaagcgcttgttctggggctcttggcttttattgtgcccataggcataggcttggtaacgaatatagctttgttgaagtacggggtgctgacctctgtcctactggcaagtatgtatgcgtcacatacgctggtggcctatcccatcgtgattcgttacggtgtgtcgcggcatcgcagtgtgagtattgcagtgggggggacggcggttacggatacactcactttgttggttctggccgttgtgggtggtatgttcaagggggagtcggacggcttcttttgggtatggcttgtcataaaggttatcttcctgggtattttgattgtatatctgtttccacgcataggtcgttggttcttccggaggtacgatgacaacgtgatgcagttcatattcgtgcttgccatggtttttctcggagccggattgatggagtttgtggggatggaaggtatcctgggtgctttccttgcaggtttggtattgaaccggctgattccgcatgtctctccgctgatgaaccatctggagtttgtgggcaacgccttgtttattccctatttcctgataggcgtgggtatgctgattgatgtgcatgtgattttcggtcatggcgatgctctgaaagtagcggctgtaatgattgtggtggcattggcaggtaaatggattgcctgctggctgacgcagaaaatatataagatgggagggattgaacgggagctgatgtacggattgagcaatgcacaagcagcggcaacgctggcggctgtgttggtggggtacaacatcattctgcccaatggggaacgcttgctgaacgatgatgttttgaatggtaccgtcctgctgattcttgtaacttgcattgtgagctcgttcattacggagcgtgccgcacggaagattgccatggaggaggcgcatctggaagaaaaccgctccgtggaagcggagaagatattgattccgatagccaaccccgatacgattgaagacctgataaatctttctttggtgatacgcgacccgaaacaacgggataatctgttggcactgaatgtcatcaacgacgatagtagttctgaaagtgccgaattgcgtgggaaacgctatctggaaaaggctgccatgataacggcctcggcagatgtgccgttgaggcaaatcacgcgttacgacttgaatatcgcttcgggcattatccatacagcaaaagaatatgcggcaacggatgtcattataggtctgcaccgtaaagtcaatattgtggattcattcttcggtatgctgacggagaatctgctgaagggcttgcatcgcgaggtgatggtttccaagttcctgatgcccattaacacaattaggcgggtgattgtggcggtacctccgaaagccgagtatgaggcgggattcctgaagtgggtggaacatttctgccggttggggagtactttgggctgtcgggtgcatttttatgccaatgaagagactaccgcccatcttcaagggctggtgaaagccaaatatggacagacattgacagacttttcccgcctggacgactggggagacctgctgatactgaccggacaagtgaatttcgaccatctgctggtcatcatcagcgcccgccgcggctccatctcctatgacagctccttcgagaagctaccggcacaaatcagcaagtactttgcaaataacagcctgatagtactctatcccgaccaactgggcgagccgcaggatgcggtatccttctccaacccgcgtggcaacaacgagtcgcagcactacgagaaggtaggcaaatggttctataaatggttcaagaagaattgacgattgacaattgataattgacaaaaatctgtgtaaatccgtgtaatctgtggtgaaaatggaagattggcaacaacgaacgcaacttttattaggagatgaaaaaatggaacgcctgcgccgggcacatgtacttgtcgtaggactgggtggtgtaggtgcttatgcggccgagatgatatgccgtgccggagtggggcggatgacgattgtcgatgccgataccgtgcagcctacgaatataaaccgtcagttgccggctctgcattctaccctggggcaaaagaaggcggagatattggcatcacgtttcagggacattaatccggctctggaactgagagtgttgcccgtattcttgaaagatgagaacataccggaactgctggatgatgcggcttatgactttgtggtggatgccatcgatacgcttgctccaaaatgccacttgatagcggaaagcatgaagcggcatatcaagatagtgtccagcatgggggcaggagcaaagagtgacatttcgcaagtgcgctttgccgatatctgggatacctatcattgcgggttgagcaaggctgtgcgtaagcgtctgcaaaaaatgggcataaagcggaaacttccagttgttttcagcaccgaacaggctgatccgaatgccgttttgctgacggacgacgagatgaacaagaagtccacctgtggaacagtgagctacatgcccgcagtttttggctgctatttggccgaatatgtaattaaaagactatagtaatagcacttgaaagaaaactatcaaatagtaaatagtaaattgtcaaattgtaaatagcctagtgattcatttagagaatataacgaagagtttcggtaacctgcaagtgttgcggggtattgacctggagatagagaaaggggagattgtcagcattgtaggccccagtggagcgggtaaaactaccttgctgcaaatcatgggtacgttggatatgccggatggcggttcggtggttattgacggtacacaagtcaaccgtatgagggagaaggaactttccgcattccgcaaccgccatatcggctttgtgttccagttccatcaactgctgccggagtttacggctttggagaatgtaatgataccagccttcattgccggaagaggacagcaggaagccaaggaggcggctacggaaattcttgaattcatggggcttgccgaacgggcctcccacaagccgaatgagttgtcgggaggtgagaagcagcgtgtggcggtggcccgtgctctcatcaatcatccagcagtggtgctggcagatgaaccttccggcagcttggatacccataataaggaagaactgcaccagctcttttttgatttacgtaaccgtttcggacaaacgtttgttatcgtaacccatgatgaaggactggcgcagctcaccgaccggacgatacatctgattgacggggaaatcaataaaatggtctgagcctatttccccgtgcccattactcccgagtcattgtcactgttgtttaccttccgctgtgctgtcttgaaactgcggccgaacgagaagttgtaggaaaagttcaccaggaacatgcgggagctttcttttatataattatttgtcttgtaggatgcgaatttattccagttttcgctttgtactttatagttgtcggtgaaaggattgaatgcaccgactcctacccgaagattcttatgcttgtaatatacagctaacatctggatgttttctcctcccgagagggtttctccccagaaattgttccaattggtgtttatctgccagaacagagagaactgtttgtagtttaatgaggcttctgcctcacaaaaccagttggtgtaggtatgtgagtagtgattgccatggctcatgtaatggttgacaccgcccgtaaaagaaaattgcagaatgtcgcggatgggtcctacgcggagcatggcacgtccggagagtttctgccaatccttctgattgtcccaagtctgcactattttgttgccttcttgaatcttctcgtccataatggcattgggacgatagtcataggctccccatagattggtataaaagatgccttttttccattcgtaagtcagttccgtatgatagcacatatatgatttcagatgcgggttgccacgacgtatctggaatgagtccactgcttgctccacatcgctgaggtcgcccaatgaaggagaagcgttatagatgtttcccttccagcggaggtaggagttgtctgacatggcatagtgcagaacgatactcgggttgaaactgtagttctcggtagatttgtccttgccgctctgattatagtagaaacgagtcatggccactcccagccggtagtttagtttgtctatctttccacggtattctccgaatatgtatgtgtttccttggtgcatattggtttcataataatgcccgtttctgtattcattgttagagtaggactgtgtatggctcagaccgaagctcaatgcgttccccttggaatattgcttctcataaatggcctcggcaatcagggagtatttgttgcctcggatattgttgtcaatatcggtcaatatgttccccggggtgctttcttggtagagccgctgcgatttttcccgattgtaggtgcctactacattgaataccagggtttgcttgtttttcagattctgttggtagtacaaatccagtgagggacgtgtccagctctggtcggtacggtcggtcatgtctaccacgtccgtttcatcattggcattatagagagttcctttataatcccagtgtggctgattgtttcctcgaaggcggaaggtggcgctgaaaagggaattctcagaagcctgcaaactataatttacgtttaggttgtgctggcacatggttgccttgctgggctctcctttctccaggcgtctgagtgtagtgccgtctgccaggtggaattcttcttcattgtcgcggtacatgccgttaaaatcccgtggtcccatgtaataggagaagccgaattctgattttttgtggtttactttgccgtacagattatagtttccccacatcgtgttcaacccttgggaaatgtcggcaccgaagtttccgcccgttttaggtcggcgcactatgtagtccaaaacgacttcggcattaccgtagcgcagtcccggattgtcatggtactctatacgtataatgtcggcagggcgaatggcttttatctcgtctatttcggctttgactccattgatgcgtaattgcagttctccaccgccggacaatccaatctcattgttcatggggttgaccagaatacgtggcagcatcagttcctgcaacagattcactccgtttgtggaagttttcatttgtctttcggatgggaaaaccagtttgcggtctgcacggctgatttggctggagccggtgatagtcactccttccagtgcgatagaagcactgtctaatacgattggtccaaggtcggtatggcgctttactccattgagggtgatgtatccggtattatacccgatgctggaaagaacaagtctgtaatctccggtagccgtgttcttgaagatgaattctccttctggacttgtggtcacaccggcgacaaaagtagagtcgatggtctgtaataccacattgacatactctatactcttgtcggaagcatcgcggacggttccttttatttctattttttgagcaaaagcattctgtgccatactgcccagcagcatggttataatcattaattttttcatattgatacgatggttctaatccttattgcagtaggccttcctgtttttagggtgtttctgcttgttagacgaaatgactggtgaaaaggttgcatcagacattgaaaaatgttgcatgatgctgttattcaaagcaaacgtagtgactgattttctccaaatcggtatcggagaattcctcgtaaagtgcaaaaggtttcagactatgaaggtcgcctttcttcttccggtattctacaaaggcctttgcctggtagaagttgatgtaaggatggtggcgcagcctctctatgctactacggttcaggttgatgaggtggatggcccgggtgtcgatggaaaaccaggactgcaattgggtggtgtccaaatggatttcttgtaattgcgtgatgttgtagaatcctcccaagcgttgccgataaccgatgattagacgggcaatgccactaccgatgcctggtattttcttcagttctgtggtgtcggcgcggttcaggtcgacaagggtcccagacggatatttttccggtgcaattcggaaagtaacggcgctgtcattgcttgcaggagagctgtataactggacggttcttgtttctgtgtcttccggagtgatgtggatatagggtaggagtgtctgatattgtttttctgtcattccatatattttccggaaatcttctgccttatggaacttccctcctttactacggtagcggagtatgttccgcgccatccatccgggcagtcccagtcggcaaaaaatgacggagtcggcgatattgggattgaaacgggccaaggagacggttgtcggttgtttttgggaggaaggtttaagtctgttgtcccatttttgttccttttcttgtatggatgcgatgaacgattcgtattctgccatggcagtggcctgccgccggattacttcatcggagagggggcggttctctctttggtatatataaatatacccggagagaaagacgagaataatgccggtaatcaaaaccagtattccgcgcctttctccccgggagaaataaaggaattctttaaaggggttctgcatgatggcctatttcagaaaacccagttcattgataaaaatcagtgcaattcctatcggagcaatatatttcaggatgaatatcaatagcttgtagacggatactttcagagtgccattgttgctgacttcttcccatacgattttcttgtccagataccagcctatgaagatggaaatgaagaaaccgcctaacggtagcattagcttggccgttacaaagtcgaacaaatcgaataggtttagcccgaatacggtatagcttttgccgataccgagagacagtgagcagaatactcctaagaaaatacagcccgctgtcacgtatctggctgccttgctgcgtgagaacttgaactcttcatgtagataggcagttaccacttcgtgcagggaaatggtggaagtaagtgctgccaatgccagtaggatatagaacatcagagacagcagtatcgccagccagggaatattgccgaacgcttgctgaaagacattaggtaaggtgatgaatagcagactaggacccgcatccggtttgatgcctacagagaaggcggcagggaagatgatgaatcctgccaaaatggctaccatggtgtcgatagccgccacgttgagtgccgttttgggcaggttcgtatcattgcggaagtaagaagcgtatgtacagagacatcccatccccaagctcaaggagaaaaatgcctggcccatggctccaaggaacacattgccgtccactttgctgaagtccggtttcaacaggaattcaatgcctgctcctgctccgggcagggatatggagcagatggcaaggattatcaataggacaaatagcattggcatcatgattttggctgatttttcaatacctttttccactcctttgacaatgatgagatgggtggccagcaggaacagcaccagccagatgaccggacgccaggggttgctgacaaagctgttgaaggatgcgatgaaatcggctgccgacttcccggcaaaactgttggtagccgcttcgccgataaactcaagcgtccatcctgccacaacggagtaatatcccagaataaggaatccggccagtacgcccatacgtcctacccagcgccaatgcgtgccgggtgccaatttctgataagcccttgccgtattggcacgcgagcgcctgccgatgaggaattctgcaatcatgatggggatgccgagaatgagcacgcaaaccaagtatacaaggataaatgccgcacctccgtgattcccggtctcaaacgggaaacgccagatattgcctaaaccgactgcggagcctgccgaggcaagtatgacgcctaatttgcttccgaagttggctctgtcactttttgtcataaaacgtagatttttctttcaattcgttattaataccagctaaaacatgcaaatatagaaaatgttctgtacttttgcgcacagttcgttgataatttggtatatgctatattatattaagaaatatccggtgtcgctttttattattctgacggtgatttatctttcattctttaaaccgccttctacagaaataagcaagattcccaatatagacaaggtggtgcatatctgtatgtatttcggcatgtcaggaatgctgtggctggagtttcttcgcgctcaccggagagacaacgcccctttatggcatgcatgggcaggggcgtttgtctgtcccgttttgttcagcggaatggtggagttgctgcaagaatactgcacgacataccgtggtggagactggctggattttgcggccaataccacgggagcggtgcttgcatcaatggtcggctatttcattttaaggccaaggatgaaataggattataagtattcaactacggaacttagcttgatgccgttcgacccttttatcagaattgttttcccgcaaggtttctctctttgcagctctgcgatgagtgcggttacatcgggataactctgataagagtggcgtgtggcggcaaacaattcccctacaagaactacatccttgaatccgcattcttccagatagtctgcaatcttctggtgctcgtcggcactgtctttacccaactcccgcatatctcccaatatcaacattttgttttcggcctgcatgttccgaaagttactaatggaagccatcatgcttgtgggattggcattataggcatcgataatcagagtgttgtccgctgtttttttcagttgtgaacggttgttttgcggggtatatccggccagtgccttgtctattttctccggttccacaccaaaaaaatgtccgatggtgacagctgccagagcattggggaagttatattcaccgataagccgggtttgtacttcgtgatatttgctttcgttgtccgttttccactcgaaggtgaggtaaggagaattgccggtgacgtgtccgttgatgtacagcccgtcctcactgccgtaggcaatctggtggagtccgtaggctatctttttcaagtaggggttgtcgttatggataaagatggtagcttctttccgcgtccgcagatagtcgtacatctctcctttggtcttgatgattccttcaaaagagccgaatccctccagatgggcttttcctacgttggtaatgatcccgtagtcaggttcggctatctctaccagctccttgatgtctcccgggtggctggcacccatttccaccacggcaaggtcgtgttcagggcgcaggcgaagcaaggtgaggggaacaccgatgtgattgttcaaatttcccaaggtatagagcacgttgtgagtttgcgaaagtacggtggacatcagttccttggtagtagtctttccgtttgtacccgtaatgccgatgatgggtgtacgcatctgccgacggtggtaattggcaagttgttgcaaggttttcaagctgttttccaccacgatgtatcgtgtatcgccttcaggggcataggcttcttcgtccactatggcataagcacttccgctttccagcgcccgggcggcaaaggcatttccgttgaacgactcgcctttcagcgcaatgaataaagagccttgggggcagttacggctgtcagtagtgacactggtgcatgttaggaatatctgatgtatagctgttatatccatgactttataattaaatcaatctgtgtgaatctgtgtaatctgtggtaaaccatcgtgcaaagatatagttttaatcctctcccttcccgggtacaagcaaaaaacttatcagttttatgagtttatgtattttgaaaccacttttttgtttacatttgcaggtactatatagaacagactgcctatggaaattacaactgcccgatatataaatgtcaacggttcgctgctcgacctctctcaaccccgtgtcatgggcatactgaacgttactcccgattccttttatgccggtagccgtacacagacagaggcggaaatagtacgccgggtgaaacagatagtttcggagggagcggccattattgacataggcgcttactcttcccgtcctaatgccgacaatgtctctgccagggaggagatggaacggttgcgtatgggcctgaaaatactttttgagatacagccggatgctgtggtgtcagtagacacttttagggcggatgtggcaagaatgtgtgtggaggagtatggtgttgccatcatcaatgatattgcggccggtgagatggatgcgaatatgttccataccgttgcggcattgaacgtaccttatattatgatgcacatgcaaggcactccgcaaagtatgcagcagcatcctcattacgacaatcttctgaaagaggttttcttgtattttgcgcgcaaggtgcagcaattacgtgacttaggtgtaaaagacatcattctggaccccggtttcggctttggaaagacaatggagcataactatgaattgctgtcccatctggaagagttccgtatttttgagttgcctttgctggtaggcgtttcacgtaaatcgatgatataccgcttgttggacattactcctcaggaggcgctgaatggtactacggtgctcgataccatctgtttgctgaaaggtgctgacatcctccgcgtacacgacgtgaaagaagccgtggaaaccgtacggattgtgcaagccatgcgaaataattcctaatccctaacccctaatcattcaatatcgtgttttttgaatttggaataaaagattttatagatattctgttagtggctttcttgctgtactatacgtataagctgatgaaagcctccggctctatcaatgtgtttacgggtattctggtgtttatcctgatatggctggtggtgtcgcaggtgctggagatgaaattgctcggctccatcttcgacaagctggtcagtgtgggcgtgctggcgcttatcattttgtttcaggacgagatacggcgcttcttgctgacactcggttcgcatcagcatgccagtgcgctggtacgcttcttcaccggcaataagaaagagaagttggaacatgacgacatcatgccggtggtaatggcatgtatcagcatggggaagcagaaggttggtgccttgattgtcattgaacataatttgcctttggatgatgtggtgcgtacgggagaaattatcaatgccgatataaaccagcgtctgattgagaatattttctttaagaacagtccgttgcacgatggagcgatggttatcagtaagaaacgtatcaaagcggcgggatgtatcctgcctgtttcccataatctggacattcctaaggaactggggctgaggcatcgtgctgccatgggaatttcccaggtgtctgatgcgcatgccatcattgtatcggaggagaccggaggtatttcagtggcttacaaaggacaattctatctgcgtctgaatgcagaggaattggaaagtttgttaacaaaggaaagctaaggtgtgacaaaatctcctatttttacgtcatataactatgatataaaaaacaatatcttataactaataactgaaaaggatggatagacgaaatttcttacggacgggaagtctggcgatgttaggttcgctggcagtaccctcgttggctatgcctgcgtcagtacgcggagctttaggaggagcagataatcagtctgccgtagcttcggcaatggttcacttcggtgtgacggaggctgacttgaagaaagtgatggctgccgctctggaaaaaggcggcgattatgccgacctttattttgaacacacattcaacaacagtgtggttctgatggacggcaaagtaaacaactgtggagctaacattgacttcggtatgggcgtacgcgtattggcaggcgaccagacggggtatgcttatgtggaaggggtaactatggaagaaatgctgcgtgctgcacgtactgctgcccgtatcgcctcttcgggcaaggccggaaaatctgtaggactgacggaaaagacaattaccaaaagccgctatgccgtcactgaaccttgggaggacgtgagtgtcaaggcaaaaataccttatttagaaaagctgaacgaaaagattttctctttggacaatcgtgtacgtaaggtgcaggcttctctttctgacagtacatcgcacgtgctgttctgtaattccgagggcgtgagctactacgactaccgtccgatggtttcttttatggcagtctgcatcatggaagagaatggaaagatggagaacggttatgccggtcgttcttaccgcaagggttttgaattcatgacggatgacatcgtggatattattgcacgtgaggcggtggataagactgctatcttgttcaaggctgtgaaacccaaaggtggcgaaatgcccgtcgtgatgggggctggcggttcgggtatcttgttgcacgaagccataggacatgcttttgaggctgacttcaaccgtaaacgtacttccattttctgcgaccttttgggaaagaaggtgtgcgatgagcatatcaacgtggtggatgacggtaccatcgctttcaatcgtggagccgtgaatttcgacgatgagggtgtggaaggccagaaaacctatatcgtgaaggaaggtatcctgaccagttatctgcacgaccgcatcagtgccaagcattatggggtggctcctactggaaacggacgtcgcgatactttccgtaatactcctatcccccgtatgcgtgccacttatatggaagccggcaatatgaaggaagcggacattatctccaccgtgaagaaaggtatctattgtgaccagtttaccaatggccaggtgcaaatcggtgccggagactttaccttctttgtgaagtcgggttacttgattgaggatggcaagttgacgcagcccgtcaaggatataaatatcatcggtaatggtccgaaagcattggctgacatcacgatggtggcaaataacgataagattgacaacggtacttggacctgtggtaaagacggtcagtcttgtcccgttacctgcggtatgccatcggcactagtcagcaagctgactgtaggaggagaaagttaattatcaactatcaattaaagacatgattacagacgacaataagaaattggcacaatgggcaatggaatatgccttgaagaacggttgccaggcagccaaactggtgctatatacaaattctaattcttcttttgaactgcgtgacggcaaaatggaccgtttgcagcagtctacggagaatggtttgggattgaatctttatgtggacggacgtttcggctctttttccaccaatcggctggataagaaagaattggaaactcttatcacgaatggtatagagtctacccgctatctggcggtggatgagtcgcgtatgctggccgaccctgcacgctactataaaggaggcaagcctgacttgcagctttttgacaagaaactctatgaagtcaacccggatgataaagtggcgattgcacgtgctgctgcagaggaggtattgggcaaggatgagcgtatcatttcggttgattcttcttatagtgatggcgagggttcttcctatcgtttgataagcaacggatttgaaggcgagtcgaagagtacctggttctctgtctcagccagtgtatccattaagggagagggcgaagctcgccctcaggattactggtacgactcggctctgttctatgataaattgacgaagacgggaatcggtgccaaggcattggaacgcgtattgcgcaagctgggacagaagaaagcaaagtcgggtaaatatacaatggtggttgaccctatgaatgtgggaaacctgctcagtccgatgctaagtgcattgtatggcagtgctttgcaacaaaagaactccttcctgatggataagctggatacgaaagtggcttccgacctcttcacgttgcgtgacgagccgcatgctatcggtgcaaacggttcacgctatttcgataatgagggtgtggctaccgaaccccgcactgtttttgacaaaggcgtgctgaaaacttatttcatcgatacctacaatggtaagaagatggatatagctcctactatcagtgcaccttcacgtctaattctgacaccgggcgataaggacctgaacggattggttgcagatattaaacaaggcatcttggttacgggcttcaatggcggtaacagcaatagcagtaccggtgacttctcttatggtatagagggtttccttattgaagacggcaagctgacacagcccgtcaacgaaatgaatgtgacgggtaacatggttactttatggaattccttggttgctgtgggcaatgaccctcaaccgaaccgttcatggcagattccttcgctggtatttgagggagtcgacttcagcggattataatgctagttcaacatcaggctcatatatgggcttgatgttgcaaatattttttcggtgagttcaccgattgtaagtgccaagtggctgcccggcagacgcttggcactattcatatatttaccattgttcaggtagtagtagccgttattggcactgacctgctcatcggtgagatgaatgctgagttccagttccggatgggccgtagcatagagttgcagcatggttttggcattgatgatgcgtgccatgcccaaaagttggctttcaccggtagcgggaggagtgagaacccggatggacgggagattcaggctttggcagatatgttgaagcagtaaagtttttgtagcgggagtatccgacacgatttctccaatgcgccagttggctttccctatcggataggtaatggccaaagccgtgatttcctccccattgctcaatgtgcaaacgaagccctgccccagttgtaaatcggcaatgataacctgaaaatcctcttccgtatgctgaatgcagcaagggcgctcccgcaatttccggtcgagatattcatatcttttttcagtatattcggcagacatttccaaagtaaggcccgtatcggctgtcggtgtaccggaagcgataaaggtctcttcggcatagcggaatacgggggcataaccgctgcggccatagtagtcgaacagccacggttctgccggtatcagggtggataaggcgacattattgtgtagcatccgtgcaaaggcttgtgataacagctcgtgcattacgccccggttacggtaatcagggtgtgtgcaggcgccggatatataggccgtatgaatatcttctccttcgaacgtcataggataaggcaacatctgtagggcggcaatcacttcttcgccgctttggatggcaatattgatatcattgttgtagcggagccgaaaatacagttcagtaaattcctcgctatcattgaaacagagcttccataagttctttaccttttcccgtatcatcaatcccttatccttttaatccttaatctctaatccttactctcaccatttgatagcttccaccggttcatctttcaggcatgccacgtatttttccagaataatggcaggctggtacgaaagtttggccttgcgcaatccttcaatacccaaatcctcttcacggttgaggtagacatattgttcggggatatggttggcaaattcatagttaatcattgcgtacgctccgtctatgctggtgtcggccttttccacatgtactccgaaggtatcttggttgatgggcattccgaaagtgaaggcggcaattttgccgtctacatgcaggatgcctccggtcaatcccagttcttcaaaattgtggagggcgtagaccagtgcgcgacgttcgttgcccgttccttcatgctggtcgcagttgttggccttacaccattcggcttccaggtccagacattcctggatgcggtcgggagtgatgggagtatattcgtaattataggtgcgtttgaatttgttgacatgattccgtttggactggaatttctttccggcaagcgtggcgaggtctgtacgcagatagaggtaatcggcatagtcccggtctgctgtgaactggaattttccgggcatgaaggcttccagttccgagcacatgcccgaacatattcccagcaggcagaaaggttccccttcccggtgtgcgtcttcgaccagtgcgtccagtacttttgtcaaatctccgttacctatcggcatcatgtacaccagttcatcgtttgcccagaatttcagcaggaggaagccgtccatgatggcaaactttgtattgtatagaaaacgccagctgcataggttggagaatgagaggtcacaattccgtcgcggactgttctgtgtataggaagtaatcagttctttgtcttgtaattcgatatctttaaatgaaatcatacgttgtttttagttggttatgattatagataacaaaaataagaagattttgttagagtagccctaataatcgcagaatagttggggtcagcaatgcagtgaaaataccgttcagggtcaggccgaggctggcgaatgcgccgtatttgcggctgatgtccatggctgtggaagttcctaccgcgtgggcggcggctcccaaggaaaggccttgtgccataggactgccgatgtgggtcagtttcatggtcttgaagcccagtattcctcccagcaagcctacacagaccactacggcggcggtaagtgagggaatgccgcccagcgacttggttacttccatggctatcggcgtagtgaccgacttgggcgccagggagtagataatctcgtcggaagcccccatcaatttagctatcagcacgacagagataactcccacaatgcagccggcaagttgtgacagcatgatggggagcagctgtttcttaatcgtttccaattggaggtatagggggactcccagggccacaacagcgggtttcagccagaattctatcagatgtcctccttcattgtaggtctcataactgatatgtgtcatcttcaggaagacaatgaggatggcaattgtcagcaggatggggttcagcaacatgatgccggtctttttctgcaggagtttggccagaaagaaaatcccgaaggtgacagccaataggaaaaattcgttttctaaaaagttcatttgattttacgtgttagttgatgaacccatccggtgactacaatcaccagcagggtgctgattatggaagcggtcactatcggccagaactcggaggcgatgacatcgaagtaaagcatgagagctacaccgggcggtacgaagaagaagcccaggttggcaaccaggaagtcggacataccctgcacccagtgcagtttaatccaacccaatttcaagaatagggtgagcaacagcataccgatgatgctggaaggtaacttgatacccgtaaagaaaacaatcagttcacccaaagctaagcatccgaaaaggatggcgcattgacgaatcatactattataatacctattgttatacgttgaaaacgctgcaaaggtaggtattctatgtattgcttgttatcgttgtatcctgattttttttatgtcgtttgtagagtcgggcgggttgttcctgccggacgggtaattgtttgttgcagaggggcacgtgtgcgtacacatgaatgctgggaatacctaatgttaaatattataataattatggtctgaacggtaaaaagaccgatgtttgcaatgtagatattgcaaaattgtgtacttttgcggcgtgaataacacatactgccgattcttaatagacaattaaaatatcatgcaaagattaattaacgaaattgttgagcgtgccaaagcaaaccgccaacgaattgttcttcccgagggtacggaagagcgtacactgaaagctgccaatcaaatcttgactgacggagtagccgacttgattatccttggaaaacctgccgagatagaggcttgtgccaaagagtgggggctgggaaatataaacaaggctaccattatcgacccggaagaccatcctaagaaagaagaatatgcccaactgctttgcgagctccgcaaaaagaaaggcatgaccatcgaagaggctcgcaagttggttgtcgatccgctttatctgggctgcctgattataaagaatggcgatgctgacggccagttggcaggtgcacgcaacactacgggtaatgtacttcgccctgctttgcagattatcaagacttccccgggcatcacttgcgtttcgggtgccatgctgctgctgacacatgctcctgaatatggaaagaacggtatcctggtgatgggtgacgtggctgtgactccggtgcccgatgcagaacaattggcacagattgccgtatgtacggcgcgtacagcccaggcagttgccggtctcgacccgaaagttgccatgctgagcttctctaccaagggctctgccaagcacgaagtggtggataaagtggttgaggcattgaagattgccaaggagatggctcccgatattgccatcgacggtgagttgcaggccgatgcagctttggtgccggaagtaggtgcaagcaaggctccgggttcttctatcgccggacatgctaacgtattggttgtccccagcctcgaagtgggcaacatctcctacaaactggtgcaacgtctgggacatgctgatgccgtaggacctatcctacaaggtatcgcccgtccggtgaacgacctttcacgcggttgctccatcgaggatgtgtatcgcatgattgccatcactgccaatcaggccattgctgccaaaaagaatgctgaataacttttaaatctgatatatagtatgaaaatcttagtattgaactgcggtagctcgtccatcaaatacaaattgtttgatatggaccggaaagaagttatcgcccagggtggtatcgaaaaaattggtttgaaggactctttcctgaagttcaccttgcccagtggcgagaagaaagttcttgagagggacattccagagcataccgtaggtgtggaatttatcctgaacactttgacaagccctgaatatggagccatcaagtctttggacgaaatcaatgccgtaggtcaccgtatggtgcatggaggcgaaaagttcagcgagtctgtacggctgacgccggaagtgcttgccgccttcactgcctgcaacgacctggctccgctccacaatcctgctaacctgaagggggtaaatgcaatatctgccattctgcctaatgttccgcagattggtgtgttcgatacggctttccatcagaccatgccgaagcatgcctatctgtatgccgtgccttacgaactttatgaaaagtacggcgtacgccgttatggtttccacggaacctcacaccgctacgtatcgcagcgcgtctgcgagttcctaggtgtagagccggaaggaaagaaaatcatcacttgccacattggcaatggtggttccattactgctatcaaggacggtaagtgcgtagacaccagcatgggcttgaccccgttggaaggtctgatgatgggtacccgcagtggtgatattgatgccggtgccgtttccttcatcatggagaaagagggtctggatgccaacggcatctccaacctgctgaacaagaagagcggtgtgctgggtatcttcggtgaatccagtgacatgcgcgacctggaaaatgccgtagctgccggcaatccgaaggctgttctggctgaagaaatgtacttctaccgcatcaagaaatatatcggtgcctatgccgctgctttgggtggtgtggatatcgtggtatttaccggtggtgtcggcgagaatcaggcaagtgcccgctggggtgcatgtgaaggcctggaattcatgggcataaagctggatgccgagaagaacaaagtacgcggtgaagaaatggttatctctaccgaagattctcaggtgaaggtggtggtaatccccactgacgaggaactgatgattgcttcggacacgatggatattctgaagaagtaatatcgctgtaatatttcccggttccggcttcccggagtccggatgtggtttcgcccctgcaaatatgtaatgtatttgtaggggcgaaatgttttccgaatcctttaaaatccttatctttgttactcggttaaaaacaataaaggcaattttccgaataactttaaataagaactgcttatgaaacgattaatgtatgtgttgttctttgtactgctgaccagcggcatggcctatgcccagcaggcgaagtacgtgttttatttcatcggtgatggaatgggtgtgaaccaggtgaacggtacggagatgtatctggccgaacaagaagggcgcatcggtgtaaagcctttgctgttcacttctttcccggttgccagcatggcaactaccttttctgccaccaactcggtgactgactcttctgctgccggaacagccctggctaccggtgcaaagacctataacggcgccattggtatggacgataacaagagtgtgcttcagagtgtggccgagagagccaaaaagtccggtaagaaagttggggtaactaccagcgtcagtgtagaccatgctactcccgccgcattctatgcccatcagccggaccgtggcatgtattacgagatagccctcgacctgccgaaagccggtttcgacttctatgcaggcggtggtttcttgaaaccgactaccactgccgacaagaaagaggctccgagcatcttccctatctttgaagaagccggttataccgttgcaagaggccttgacgaatataagtcgaagtctgtccaggcggacaagatgattcttatccagaaagaaggggcagagccttcttgcctgccctatgccatcgaccgccaggaaggcgacctgacgctggccgaaattaccgaaagcgccatctctttcctgaccaaaggcagtaacaagggtttcttcctgatggttgaaggtggaaagattgactgggcctgccacggaaacgaccccgccacagtctttgaggaagtggtggatatggacaacgccatcaaggtggcttacgagttctataagaagcatcccaaagaaacgctgattgtggtaactgcagaccatgaaaccggcggtctgggtctgggtaccggtaagtacgagcttcaactgaaagcccttgccaagcagaagcagtctcaggatatcctttcacgttccatcacggacttacgcaagatgcgcaaggttatcaactggccggaaatgaaggaattcctggcagaaaagatgggtttctggaaagaactgccggtgagctgggagcaggagaagatgctgcgtgatgcttacgaagaatcattcgtgaacaagcatgtagtgtttgaggaaagtctttatgccaagactgagcccctggccgttgccgccaagaaggtaatgagccagattgccatggtaggctggaccagcggtggccatacagccggatatgtgccggtattcgcagtaggtgcaggctccaagctgttcgtgggtaagatggacaacacggaaatcccgaaacgcatagccaaggctggtggatacaaataatagaaagtcactacagattacacggattctcacagattggaagctctgatatcaagtataagagactaatctgtgagaatccgtgtaatctgtggtggctgtcaatttattccttaaggtccttctttataatttcatccatctcccggatacgtttctcccgttccttggcagattttattttctggtccttgtatccggtatctgtccgttcggagacctcttcgctccattcctcgaattcatccgttgccggacgtccgtgcgggtctatgttctcttcggcaatcgggtcgtttctgtaaatcatatcatccatgacgctaatgtttttaatgttatgatgttactacaaccatgccgggaaaaagttccggtgaccttcacttttttgtaatcatttataagaataaacgttttatagcgcgggcagcaggtacttccatattagattcagctctgcctgcatgtcggggatgttggcggtgacggcaatgacggcatccttgtccggcaacaccagtatgtattgtccgttggcaccatcggcacggtaggcgttgtggcggcagcgccacatctggtagccgtagccctgcagccagtcgcttgtcttggcgctcatcttcgctttcttcagcatctccggtttcatgccggcgggcagtgagggcacttggcaggcagatgcctcctttacccatttttcgggcagaatctgctgtccgttccagtttcctttctgcaggaacagttgtcccatcttggcaaggtcttccgttttgaggtacaacccccagcctccggtattgatgccttgcgggctttcctgccaccgggcgttgacgatgccaagcgggcggaacagacggggatagagataatccaccactttctcgcccgtcactttctgtacgatggctgagagcatgtaggttcccaggctgttgtaggtgtagaaggtaccgggcttgtgctccacggggaaggcaaggaactcctgcacccaatcggcgtctgcctttttgcgtaccgttccggtggggtcggtgtcgtgcccgcagttcatggtcagcaggtcgcgtacggtcatggctgccagattttcgctgacggttgccggaagcttgtcggggaagaaggagatgaccttgtccgtcagcttcagcctgccttcggaggcggcaagtcccacggcggtggcggtgaatgtcttgctgacggagttcaggatgtgaggctcatcctctttcccttcgcccatccattcttcggcaatgacattgccgtgttgcacaatcatgatactgtgcaggtcttgtccggctttctttacggcatccagatatctgttcatggccttgtccagcttcggagtagcggcggcgcggggcaggcccttggtcagttggttgatggaaatcagctttatgcctttgtcttcaatggctttccggatgcgggggcttgtcagcaggtcggtcactccctggcggtccagcgccacgtcctcatatccgatgtggaagacggttttcatttcatcgttgtccagtgccgggtggtctaagaaaaggtagcgctggcccggttgcaacttctccaatgctttgatgaagctggcctccttttcttcggcggttcttttggggccgtcgtacctgatgtaggtaaaccggtagtccttggaggagtccatgcggtcgatggacggcaggttgtattctttggcgagccgttgcaccagctcgttcacttccttgctgaaaccggtggagagcatgtgtccggacagatggctgagttgcggaatgcttttcagcgtcgtctctatctgcgcgcggaactcctgctctatctccttgatgtcccatttctgctccatgatggactgtcccggataggcggggttagggaacatcatcgggtagaaatagccgttctcgtccgtcaggctggggcagtgggtcagcggacgccacttcacgttctcccactcgctggtgatgacgaggtgcaggccgacgtccagtcccggattttctttcagcatcttgatggcttctggataccaggctgctacgggcatcacttccacgctgcgggcaatacccgagcggtaggtctggatgcaggctgagttgacggaatgcagggcaccgagatcgtcaatgcggatgacaagtgtcggggcgccggattgtccccataccggcaatgctcctgctgcgagcaggcatccggcaatcatgtttttcagtcttaaaggtttcatgggtggtaatggtatgatggttaacagtttggaaatgcgggttatagcttcgtctctccctccacaaaattctcaaggaagaggttctcgccgtcaaagacggcgtacgagaagtagtttatccagtcgccgaggatgaggatgcgggcggtactgctcagcatcaggtcgagttcgatgtggcggtgaccgtagatgaagtagttgatgttgggatggctttttaggtattccttggtgtagagcaccaggtattcgttgttttctcccatgtatgcgggttctttcccgtctatgcgtttcaagcggctgtgcttggcccagttcagtcccagctccatgctccagcgggggtgcagggcagagaacagtgtctgtagggtacggctgcggaacatggcgcgcagcatcttgaacttcttgtccgggtcgcctagcccgtcaccgtgggcaaggtagaactcttttccgaagatttcggtggtcagcggttcgcggtgtatcatgacgccgcactccttggtcagatagtcgccgcaccaaaggtcatggtttcccgtgaaaaagtggacttctactcccaggtcggtcagttcggacagcttgcccagaaagcgggtgtatcctttgggcactacggtacggaattcgtaccagaagtcgaacatgtctcccagcaggtatacggccgatgccttgtgcttgatgctgtccaagaagttgaccagcctccgttcttgggttcgtccgtgttcgatggctcgtgagcccaggtgagcatccgagaggaaatatacattcttcattttcaactttccattttcaactttgaactttcaactgatttaaaggaatcccagctccagtttcgcttcttcgctcatcatgtccttgtcccactcgggttcgaaaacgagattgatggtggcggaggttacgccgtcgatggattccaccttctggcgcacatcttccatgatgaagtcggctgccggacagttgggggcagtcagcgtcatgtcgatggaggcttctccctggtcggagacgtctattttgtaaatcagtcccaggtcgtatacatttaccggtatttccgggtcgaatacggtcttgagcatggagactattttctcttctatttcaaatttggtcatattcgtagggttttatatataggttttcaaagaacaaagctatggaatttaattgaaaatgcaaaggaacgccctccttttcattacttcggggagggtttgacggtgggtgaacatgcttcaccttctgggggaactccctttacccctggagaaactccttttacaatacgcggtaaaggtctttacaatatggggtaaaggacgttacaatatagggtaaatacgtttacatactgtggtaacggcttttacattggctggtaaatagctggtaaatacaatgtgctgatagttagtgttatgaccgcttttgtctttcgtatagtatgtccgtaacttggattatttatagtaatccttcgtcgttgaagctgtaatggcttccgtccgtgacgatgacgtggtcggtcaggtgtatgttcatggtttgggcggctttcctcacgagttccgtcagctgccggtcgtcgttgctggggtgcgggttgccggagggatgattgtggataagggctatctgtgtggcgcgttgcagcagggcttcgcgcaggatactgcgcacgtcggcggtggtctggtcgatgccgccgcggctgatgcgtaccttgtctatcactttggcggcgtggttcataagcagtacccagaattcttctgtggcaaggtcgcagagcaggggatggaacagctcgtagatgtcggcggaagagcggatggcggtacgtctggagcgttcctgcagcttgcggcgtttgcccagttccagggatgccatgacggtgatgcttttggcggggcccatgcctttgaatcgggagaagtcccgcacctcccatttgcccaggcggttgaggtcgttgccgcaggcggcgagtatgcgctgcatcagtgtcacggcggtttcttccgtattgccggagccaatgaggatggctagcagttcggcatcgctcaaggcttccgcccctttctgcatcatcttttcccgcgggcggtcctctgcagcccactggttgatattcagtttctccatatcatccctaatccttaacccctaatcctccttatttgtaaaagttctttttgaacgcctcgaactcgtccttgccaagtatgcagcggttccaccaggcgcgcaggaaccccgtcccgtatccgatgagctggatgaaggaggcggcgacggagtagagcccgatgctgaggctacggttccggatagtggagtccatgcataccagaagcgcataaagagcgatgggcagcaggctgtacgggcagaagggcgttcccagcaggaatatggccactcccagggtaaatgcagccggcagcaggtggacgagcttcagcgattccggatacttcttgtacagattgatgcgggcaatcccggaattgtgtacctgcttgaagaacttccggaagtctgtccggcgcttatggtatacccaggcaccggggaacagccggcatgtatatcctcccttgaagattcggatgctgaagtcgatgtcctccccgaagcgcatccgcgagaatccgcccagggcttggtacacttcccgccgcacacccatgttgaagctgcgcggatagaacttgtccatcttcttcttccccccacggataccgccggtggtgaagaaggaggtcatggagtagttgatggctttctgtatgtctgtgaatgattcgtgcgcgcggtcggggcctccgaaggcatcggcggcttcgtgctgtagctcttcttccacagcaaggaaataaccttcgggcaggatgcagtccgaatccagtattatcaggtattcgcccttgcttcgttccgccccgtagttacgggtctgcccggggccggagttgggcttgtcatagtaatgcacgtccaatagttcctgatacttctctgtgaccggcttgcaggggatggaggagccgtcctccaccacaatcacttcaaaatccttgaaactttgctgcgtcaggctttgcagcagttcatccacctcatcggggcggttgtatacggggatgatgacggagtatctcatgggtatggctttatgttttggttgtctccgcaaagatatatcatttaagctttgcagatgaataaatggaaagaaaaatccccggatgccaagtggagcaccggggatgatatgaaaagggcatttgcctgatttccaaaagggcttatgcttttacgcggcttacgtaagaaccgtcgcgcgtatcgatttcgatagtctcgccttcgttgatgaacaaggggacgcggactgtggcgccggattctactgtggcgggcttcagcgtgttggtggctgtgtcgcctttcagtcccggttccgtataggtaatcttctgctgaaccttgatgggcacgtcggcatagagcacggtttctgtggaagcgtctgataccacgtctactatcattccttcgagcaagaagtcaacaccgttgatgaggtcgtgggcgatgggaatttggtcaaaagtctcctggttcatgaattggtagttgtcaccgtcatgatagaggtattggtggggacgacgttctacacgtacgtcttccagtttctcaccgatgttgaaacggcgttccagaacgtagccgttcaccacgtctttcagcttggtacgcatgaaggtattaccttttcccggctttacatgcaggaagtcgatgcagaaatacagcttgccgtccatgcggatgcaagttccgattttaatgtcttgggcattaatcatacttatagtctttaatattattatattggtatttacttcgttagtgctggtttgcgagtgcaaaagtaatggaaatcggtaaaaaacacaaaaacttttgagagaaaatgagttatctcttggtttatttgaaaaaagtatctatttttgcagcccgaattcgtgagaataataacataaaacaagatacagtaatgaaaagaacatttcaaccctcgaacagaaagagaaagaacaaacacggtttccgtgagagaatggctacagcaaacggccgcagagtattggcagcacgtcgtgctaaaggcagaaagaaactgactgtttctgacgaatacaacggagtaaaggcataatagtcgttctcgttcgtattaaagaaataagggagctgcaaaagactgattctggtcttttgcagcttttcttatgtattgtgcccggttctccggaaaaaactattgccaactccgtgtactatgtggtgaaaattgtatctttgtcccaaataatgcattatcgattatgacaataaaagattttttctctttccggcagaaccggttcttctgggcgaacatccttgcgatggccgttgtggtagtgggattgctgttcggagtgctgaaaggactggatatatatacccgccacggcgaggctgtgatagtgcccgatgtgaagggtatgggagtggaggaagccgagaaaatgttccgtaaccgcggcttggtctgcatcgtttcggattccagttatgtcaagactcttcctgccggctgcatcctcgaatataatccggcagccggacaaaaggtaaaggaaggacgtaccatctatcttacaatcaatacgattgaagtccctctgcacatagtgcccgatgtggcggacaacagttcgctgcggcaggcggaagcgcgtattctggcttcgggcttcaagctggccgagatacagtatattccgggtgagaaggactgggtgtatggcgtgaagtataaggggcgtcagctttccatcggcgagaaagtgcccaccggcgcagtgctgacgctgatggtgggagatggaggcgccttgaaggcagactccctgggagtggattctgtgggaggtaccgttgaacccatgttgtccgaagactccgcggcagatgagtcctggttctgataaacatctgactccaatcgtaaattgtaaatagtcaaattgtaaatgccgtgatgatagaagaattgccggatgatatagataatgatgagctggacgacgtagagccggtgggtgacgaggcgcaactctatgaacacttccgtgtggtggtggacaaggggcaggagatggtgcgggtggacaagtatctgttcgaccgcttgacgaactcctcgcgcaatcgcatccagaaggctgccgatgcaggcttcgtgatggcgaacggcaaggctgtgaaaagcagctataaggtgaagccgatggatgtaatcactgtgatgatggaccgtccacgctatgagaatgaagtcatccccgaagacatcccccttgatatagtatatgaggacaagtatctgatggtagtgaacaaacctgccggtctggtggtgcaccccggtcatggcaactatcacggtacgcttgtcaacgccatagcctggcatatgaaggataatcccgattatgatgccaatgacccgcatgtgggactggtgcaccgcatcgacaaggacacctccggcctgctggtgatagccaagactccggatgccaagacgaatctcggcaaccagttcttcaacaagacgacaaaacgccgttaccaggcgctggtctggggaaatgtggaacaggatgaagggaccgttgtcggcaatatcggtcgtaatcccagagaccgcatgcagatgaccgtcctccccgacgaccagggaaagcatgccgtcacccattaccgggtgctcgaacgtttgggatacgtcacactggtggaatgtatccttgaaacgggacgcacccatcaaatccgtgtgcacatgaagcacatcggacacatacttttcaacgacgaacgttacggcggacacgaaatcctgaaaggaacccattttgccaaatacaaacaatttgtaaacaactgcttcgacacttgtccgcggcaggcattgcatgccatgacgctggggtttgtgcatcccgtcaccggagaagaaatgtacttcacttcggaattgcccgatgacatgacccggctgatagacaaatggagaggctatatcagtaacagagaattagaatgaaacgcacgattgctattgtagccggaggagatacctccgaattccacgtctccctgcgtagtgcacaggggatttactccttcatcgacaaggagaagtataccttatatattgtagaaatgcacggactggactggcatgtacagctgcccgacggcgctaaggctccggtagaccgcaatgacttcagcttcgtgctggatggcgagaaagtgacattcgactttgcctatatcaccatccacggaactccgggtgaggacggccgtctgcagggctattttgatatgctccacatcccttattcgtgttgcggagtactggcagcgtcgctcacgtacgataagtttgcctgcaaccagtatctgaaaggtttcggtgtgcgcattgccgaatcgttgttgctgcgcggcggacagtcggtaacggatgaagatgtgatggagaaaatcggcctgccttgtttcattaagcccagcttgggaggttccagcttcggcgtgaccaaggtgacggcgaaagagcagatacagcctgccataaccaaggcatttgcggaaacgcaggaagtagtggtggaggcctttatggacggaaccgagattacctgcggctgttacaaaacaaaagacaagtccgtagtgttccccattacggaggtggtgagccacaacgagtacttcgattatgaagctaagtataatggcgagtctgacgagattactcctgcccgcatttcggacgatttgacccgccgggtgcagacgctgacttctgccatttatgatatactcggggcctatggcattatccgtgtggactatatcattaccgaaggggaaaaaatcaatctgctggaggtgaataccacccccggaatgactgccaccagctttattccccagcaggttcgtgctgccggaatggagatgaaggatgtaatgacagatattatagaaaacaagtttaaggattaatcattattcattatgaatgcgaacgtggaatttgatgaaatccgtccttatcatgatgaggaacttcctcaagtctatgaggaactgattgccgatgcggcgttccggcaggcagtggatactgtgatgcctggtgtaccttttgaagtctggtcgcagaaaatgcgcgcgtgtaaaaccaagctggaatttcagaagaccttctgctatgggcttctgtggaaattggcgaaggaggctacggatggattgactctggatcattctgcattgccagacaagtcggcggcgtatacctatgtttccaaccatcgcgacattattctcgattccggtttcttgtccattctgttggtagaccagggtatggatacggtagagatagccattggcgacaacctgcttgtctatccgtggattaagaaattcgtgcgtgtcaacaagtccttcatcgtgcagcgtgcgttgaccatgcgccagatgctggaggcttccgcacgcatgtcccgctatatgcactataccatcagtgagaagaaacagtctatctggattgcacaacgcgaagggcgtgccaaggactccaacgaccgcacgcaggacagtgtgctgaagatgctggcaataggcggtgaaggcgacgtcattgaccgcttgatggaaatgaacatagctccgcttgccatttcctatgaatacgacccttgcgacttcctgaaagcgcaggagttccaactgaaacgggacattgaaggctataagaaaacgacggctgacgacttgctgaatatgcagaccggactgttcggctataaagggcgggtacatttccagacgggtgcctgcatgaatgatgaattggcgaagatggaccgttcacttccgaagcccgaactctttgcacgcatgtctgcactgatagacaaacgcattcatgccagctaccggatgtatcccaataattatgtggcacacgaccttctcgaggggaaggaggatttttccgaccattacactgccgaggataagcagcgcttcacggcctatatagaacaacagttggagcgtatctccattcctaataaggacgtggactttctgcgcggaaaaatgctgctgatgtatgccaacccgttgaagaattatctggcggctataaaagaatgaatacatgaagaagtactgtgattggtggcttttgcctttgttggcctgtctgttggctggttgtggcgatgatgattatcattatccttccgtgaagttggaattcttgactgccttttcgggggctgacggctatctgcggtctgttgtgacggatgaaggggaaaccttgccggtagtggaggacaagacaaagacgaacatagaggcaaacgcttcggtacgtgtcatcagtaattatgcttcggaggtaactgccgatggaactgccggtgcggtgctgtatgccttgagcggtgttctttctgtcgttccccaaacggtcgacaagttcgaggagggcgtcaagacagaccctactgatgtactgggtatctggatgggactcgactatctcaatatgacactgatagtcaaggagaatggtgaacataagttccattttattgaggatgaagtgattgtggatactgctaccgggtgtagtgaagtatatctgacgctgtatcatgacgcaaaggaggaggtggtgtcttataccaggcgtgcctacgcttccgtacctttgcggcagtatgcggcagagggtatacagaaggttatggttcatttcagtgtgcacacttattccggtgacatcaagacttacgattttgtttataaccctgactaaaatgaaatattcgatgaagacattgttcgcgggtttttgcctcgtttttaccaccctcttttcctgccagcagaaggagggacagttcaagtctgtttcggtagatgacttttccacattgatagccaatccggaggtgcagcttctggatgtgcgtactgttgccgaatactcggaaggacacgtgccccacagtatcaatatcaatgtattggatgagtcgtttgaaacgatggccgactccactctgcagaaggacaaaccggttgcagtatattgtcgtagtggtaagcgtagtaaaaaggccgctgccatactgagcaaaaaaggatatataatctatgaccttgacaaaggtttcatcggttgggaagaagcggacaaagaagtggaaaagtaatagcggtgtagctgaaatgcatttgctataatttctttttaggcgaggattacgcggatttcacggaaaaatttaagaaaagaatccgcgttttccgcgtaatccgcgcctaaaaagaataaagtagtcttgtcctctggttagaggctttcaagcagtctctttagcaccactgttgctgaaatctcccggttggccgcttcggggattacgatggactgcgggctttctatcacatcatccgtcacaatcatgttgcgtcgaaccggcaggcagtgcatgaagtaggcattgttggtaacggccatctggcgctcgcctactgtccaggtgcggtctttgctcaatatttgtccgtagttgtcgcctgtataggccgcccagttcttggcatagacaaaatcggctccttcaaaagctttcatctggtcatattctacgcgggcatttcctacgaacttggggtcgagttcataaccttcgggatgtgtaatcacaaagtcataatcagttgcattcatccattcggcaaaggagttggggacagcctggggcaatggacgcggatgtggagcccatgtcatcactactttggggcgtgccgtcttcttatattcctcaatggttatcaggtcggcaaaactctgcagcggatggcgtgtggtagcctccatggagaataccggccggccggaatgcttgatgaactgctccagtatcacttcgttgtaatcgtcttccttattttcgaagcgtgcaaaagaacgtacgccgatgacgtcgcaatagcagcccatcacgggaatggcttccagtaagtgttccggtttgtcaccgtccatgatgacaccacgctctgtctccagtttccaggctccctggttgatgtccagtacaattacgttcatgcccagattcaatgcagccttctgtgtactgaggcgggtacgcaggctggagttgaagaaaatcatcatcagcgttttgttacgtcccagttccacatatttgaaacggtcttttttaatctcgaatgcttcgtccagtgcagacttcaggttaccgatgtcctgcacgcaagtaaagttcttcatatttacagtctttttagtgtatctatatctttgttattcggctgtcaaggtctggtctgtccggaaccttcgataatccatttgtatgtggtgatttcttccagagccatcggaccgcgggcgtgtagcttctgtgtgctgatgccgatttcggcaccgagcccgaattgtgcgccgtcggtgaaagaggtcggcgcattgacgtatacacaagcagcgtccacttcccgacagaaccattcggcacgtgtcttgtcgtccgtaatgatgcattcgctatgtttggaaccgtacttccggatatgtgccaatgcttcctggaaagaattcacggttttaatggccatcttgtagtccaggaactctctgccgtagcagtcttcagtggcaagtctcaacagctcgacgggatatttgtcacgcagactgtggtaggcgggttcatcggcaaatatctctacattgcttgattgcagcggcaggcataggtcgggcaaattagccaggctgtcggcttcgataatcaggcaatccaaagcgttgcatacactgacccggcgtgtctttgcattggcaatgatagatggacctatgcttatatcgccatagcggtcgaagaacgtatggcatacgccggcacctgtctctataaccggtactgtggcattctggcgtacgaagtttatcaggctgctgctgccgcgcggaattatcaaatctacataatcgttggcatgcagtagttcggcagtcgcctctctgtcggcaggaagcagttccacgatatgtgtatctacgttgaaatgctccagtacctcgtgtatcacgctgattatggcacggttggaatagtctgcatcgcttccgcctttcagaatacaggcattgccgcttttaaggcagagtgagaatacatcgaaactgacgttgggacgggcttcgtagataatgcctatgacaccgaaaggtacactgaccctttttatcttcaatccgttgggtaatacgttctctttaaggacttttctcaaaggagaagggagggcggctacgttgcggatgtccgcagcgatgtcctgcaaacggctttttgtcagttttaggcggtcgtatttagggtcggtagaaggcatacgctccaaatccttctggttttcactcagaatgaagtctgttttgtttatggcagcgtctgcaacagccagtaatatttggttgatttctttgtcgctcaacgctagcatgttacggctggcatcttgtacggcgacaaaagttttgtttaagttcattttcttactgagtatagagtgataaatatgcaagtatgaatatcgtggatagtatccgtctgtggcctattctatatataggtagtcgtagtgcactacgggtttctttccatgttttcccattgtttcccgtgcctggctggagtcacagttggcttttcccacaccgatgggtttaccgccgaagtcgataatccgtacgatgtcgtccttctcgaactcgcctataacgtcagtgatgcctaccggtaggatgcttactgctttgtccgagaagagcagttcggtggcacaatgattgatgtgcagttcgcctttggcaaacccttcgctgtgcgcaatccatttcttgatgctcgataccggttccggagacggaatgaaacgggtatagtttaattcttcattattcattattttcacgaggatgttgtcccgcttcccgttggctatgattactgtgatgccctcatctgccactttgcgggcaatgttggtttttgtcagcatgccgccgcgtccgaagctggatttggaagtttgtatgtaggaggagaggtctttgccttgttctatttcacggatgacctgagaattcgggtcggcgggtgaaccgttgtagatgccgtctatattgctgagaatgattagtgcctgggcatccatcatggaggctatcaggccggacagctcatcgttgtcggtgaacatcagttcactcacggagatggtgtcgttctcattgacaatgggaatgacgccgttctccagcattacggtcatacagtttttctggttgaggtaatggcggcgggtggaaaagttctctttcattgtgagcacttgtcccacggggatgccatgctcccggaacagctcgtagtagcggttgatgagtttggcctgccctacagcggaaaagagctggcgctggtctacgctgtccaacttcttggtggggtgcacttcactacgtcccgaagcaacggctccggaagaaacaagtattatttctatgccggccttgtgcagctcggctatctggtccaccaaagcggacatgcgggtgacgtcgagagtgccgtcacgacgtgtcaaaacattgctgcctatcttgacagcaattctattgaaatcaatctccattttctctcttttcgtattcgcggactacttccatagcggcttcgtagtccttttcattgacgaggacggaaacatctaccgcagtggcaggcagtacaacgtttactaccattccgtcttttgttacagcttcaatatcactatttcccagcaggctctttacaagttctgcttcccacggtgaaccggtgaacacctcaacgagtttgcttttgtcttcttctttcatgatggtatgaatttagaggtttctgtcttacaaatataacaaatgtttttgttttaatgtttaatgctgacgaatttatagttcaatcctctcaactcttatcgattcattcaggaaagtagaagccgattctgtgaatttctcctccgattccgtggtgcggtagacgcatcttccacctttggtacattttttgtccatttccggatgacggtgaagatagtctttcagactgtctgccaccagttccccttgggtgacggtcgtgatgccgtcgggcatgtattgctgtatcttgggcagcagcagcgggaagtgcgtgcagcctagaatgacggtatctatctgtgtgtctttggccagcaggttgccgatgttcttgcgtatgaagtagtcggtaccctcaccttgtgcctcgttgttttctacgagggatacccatagagggcaggcttcaccgctcactttgatgtcggggaagagtttatgcacttccagcggataggattcagacttgatggttcctgctgtggcaagcactcccacatggcggctttgggttatgttccctatgcattctacggttgggcggattactcccaacacacgacgcattgggtcgaggcggggcaaatcattcatttgtatgttgcgcagggcttttgccgaagctgtattgcatgccaggatgacgagatggcatcccatctcgaacagtttggtgactgcctgcaaggtgaactcatagacaatctcgaatgagcgggtcccgtaaggcgcacgtgcgttgtcgcccaggtaaatgtagtcatattggggaaggacttcccgtatcttgcttaggatggtcagtccgccatatccggaatcgaatattccgatgggaccggctgcagaaggtaatgtctgtttcatgcgttctaaaggctatgtaccatgcaaagataattcaaatttctcagtaatgtataaaaaataagcgcggataaaactatccgcgcttgctttatcataaataattctattatttaatgcccaattgcgttttgactttggcagttacatcaacgctctgtgctcctacgaatggtatcggggtacgggctaagtcgaaaatgtagacaacaccttcagttttgccgacagcttggatggcttcgtccagtttcttatagatgggagccatagcatcttgctgtgctttctgcatactttgataagcttcttgttggaactgttcctgacgttgaaccatatcctgcagctctttctgacgtctttctgcaatgtttttcggcagagagtcggcttgtgccaggaattcttggtacttcttttggaattcttcgttggtacgctgcatttcatcctggtattttttagacatggcgtccaagtcagcttgggctttggtaaattcaggcataacagcgattacatcttgagaattcatgtgagcgaatttagcttgcgccatagctcccagcgggagggcgaacataactacgagtagtgcgatttttttaagcataatgtttattatttatttgaatgattattcgttgggggcaaatatagcgcaaactgaacgcaatacaaaataagcaagcttatttttaatcttgaatgcagtctatattctgaaacaaatgtatgaaattaatttgaatatcccagttttgcaagtacttcattgctgacgtcaatacttggcgaggcaaaaatgatacttgatgcggaagcacggtctacaactaccgcatatccgttctgtgtagcaatttcctttacagcattgtatatttcatcttgaatgggttgcatcagactttcacgttttttatacagttcgccttccggaccgaagtatttgcggcgcagctcggctgccgatttctctttagcgacaatctcttcttcctttttgcctctctgtgtttcagaaagggaagcaatctgagactgatagttcttgtacagagtcttggcttcttcggaaatcttttcgacttcactctgccattgtctggaggcttgttccagttgttcattggcacgttcgtaagcaggaatatttttcaggatatattccatgtcaatcaaggcgaacttctgtgcaccggctgttatacttactgcaaacagcgtaaaaaggatcaataaactcttcttcataacgatactgcattaattgtcaattatcaattgtccattgcttagaattcctgtcccaggatgaagtggaactggctgccgccatattgcgaggaacccattattttgtcgaaaccgtaagcccagtcgatacccatcataccaatcatcgggaggaagatgcggacaccgacaccggctgaacgtttcaattcgaacgggttgaacttattgacatcatgccatgcattaccggcttccacaaacgttaacgcataaatactggtacttgtttcgagcatcaaaggatatcttaattccagtccgagacgtgtataggcataaccttcagaaccgtatggagtcaatgagctgttctcataaccacggagggcgatactttctgtagcatagctggagtagccggtcataccgtcaccacccacgtcaaacgtttcgaacggagactttttgtatttgttgtagtgtcccagcaaaccgaattctacacgtcccatcagcaccggagtacgtttgacggtaatcgggtccatcaacgggatgtagactttggatttgaatttccacttgtggtattcaatccacttgtgcatcttgttcatgtcttcctggctgctggtgctgtacttgctgtaatcggtaccgtcgaacagagagaaaggcggtgtgatttgtgcagacaacgagaactcggaaccttggcgcggataaatcgggttgtcgatagagctacgggacaaggtcaggttgaggctgaggttattacacttaccgttggtaaccgggaagtactgccagtcactcagaacatagcgttggtaagacaactcggctgtgaactggaagtagtcatccggccacttcaaacgcttaccgaacatcactgcaagaccatacatctggatagatttgtccgggtcgtaataattctcgtagttgttgtaattgccgtagttgtacataccgtagccatacataccgctataatagctgttgtaatagctgttcatgtaggctgaattgtaataacggctactgatgtcggtctggcgggaatagaaagccgatacggagaatgcattcgggcgtttaccgccaaaccacgggtcgtagaatgaaacgctgtatgactgatagtatttggcattggtctggccgctgatggtcaatgtctgaccatcgccttgcgggaggataccgcggtagttctcacccggatgcagcaggttggacagagagaagttggtgaacttcagacttaacttaccgataatacccgtttgtccccaaccggcggagaactctacctggtcgttggctttggatacaaggtcataaccgatgtctaccgtgccgtcttccggtctcggctggatgtcgggctggatttgttcggggtcgaagtgtcccatctgctggatttcacgcatggaacgcatcaggtcttcacggctgaagagttcgcccggacgggtacggagttcacggcgtactacgttttcatacaaacggtcgttaccgttgatgctgactttattgatggtagcctggcgaccttcgtagatacgcatttccaggtcgatggagtcgcccacgatgtttacttccaccggttcgaggctgtagaacagataaccgttgttgtagtaaaggttaccgatggcatcgtcatcggtcattgtacgctcttcaagtaacttttggttgtagacatcacccttcttcatctggaggaggaagttcagttgttcggaaggatacagtgtgttacctacccaggttacattgcggagatagtatttctgtccttcctcaatctgcatgaagatgtctaccgtgcggtcatcgtagggcttgatactgtctgtcacgatgatggcgtcacgataacccagttcgttgtatttgtcgataatcagctgtttgtccgcttcgtagttgtcctcaatgaatttcttggtgcggaacagattgagcagcttgcccttttcgtttgttttcttcatcacacgcttcagcttcttggtcgtgagggcctcgttgcctacaatggtgatttgatgtactttcactttctccttcttgtcgatgtcgatgttgacaatcacttcattcttcttttccggatcatcacgttgggtgatgattacatctgcattcttgaagcccttgtcgtcaaaatagcgctttatcaaggtcttggcgcggtccaccagattaggtgtaatctgaccgccctttatcatgccgattctgctttccaggtcttcacgctctgacttcttcacaccgttgtagcgtatgtcggaaacacgcggacgcatggtcagatgaatggtcagccaaatttggtcgccttcaatcttgtctgctgtaatttccacgtcagagaacagaccgtggcgccagtagcgcttacaagcttgtgtaatctcgtcacccggcacggtgatagtctgccctttggatagtccggacaatccgacaattacataatcctcatagttctgggctccttcgaccttaatgtcggctatttcatacttcttgggtgttcccgaatagagtataaccggcttttcggtttcatcggtgttgtttacgtcctgtgctgctgttgtcagtgcgcagccgaaaaggcagacaaacgttacgagtatggagaaaatacgatagtgcatctttttatttactattttacaatttactatttactatttgtgtgtccggtgattaattgatttgctcgctggtcttgccgaacctgcgttcgcgtttctgatagtcacatatggctttgcgtaattcttcttcacggaagtcgggccaataggtatcacagaaataaagttccgaataggcgcattgccagagcatgtagttactaaggcggagctctcctccggtacgtatcagcaggtcggggtcgggcatgaagtgggttgtcagatgacgggatatgagctcactgtcgatttgttcgggtttcagctcacctttctgtaccaggtcggctatttgccgggcagcttccgttatttcccagcgggaagagtagctcaatgccagtaccaggcacattcccgtgttgtgggaggtgtgtgccacgcaagtgttgagccgttgctgtacgttggcaggcagtttttcaatatctcctattacccggaaactgatattgttcttcatgaacgtctcttcctctatggagtcgaagagcaatcccatcaaggcggctacctcgtccgacggacgattccagttctcggtagagaacgtatataaagtaaggtatctgactcctaatttagcggcttcctctgcaatgacgtgcacagtctctgcgccggcctgatgtccatagctgcgttcgtgtccacgctgcttggcccaccgtccgttaccgtccatgataatcgccacgtgctggggtatccggtttagatcgatttcttccttatatgacatcattattattgtatttcgaagcccaatctgttaagacgtccgcgccatacttcattcttggtgccgttaccgccgaatatcacccaaatgaagtcccgtttgtctgccggggccacagttttgtctttcgtcggttccactataatggagtacgcgcctttccctttgaattcctggggtagcaggaacttggtttctgtcttgctccacgcaatgcctgtgatggagttgtagatggcgtcaagttctcctccaaagcaatagaacatgtcgccatagtacataatggcagggttgaccatgccgggacaagatgtgtcgtacaccgtgttagccaggcttgcccagcctttgccgtccaatgagaaccagggtattgtctcttgttcgttggccagcggcattcctgccagaaccaccttctctacaccattgccggtgttggtctgggtggtggatatgttttcggtagggaatcctgccgggacttcctcaagggtaaggttgtcagccgtgttttccgcttcccaattctttccgtctttacagatgttgaaatattgctttccgttgatttccacaatacccgagagccggtcggagaaaccattgatgaggactatgacattgtctcccaatgtagtgacttctgtccaggcgccgccgttggtagagctgaatactcttttgctttctgtaaccatataaagcgcattgttatactctacggcagatgtcagctttacgtctgaggggaggttgctgacattgactttactccagttgtatttatcgggcgcagtcgatgtcttgtaagcagtactgttggaagtgtagacaaatagttcgtctcccagtacaaccgctttttgctgacctaaattgatggtattggagaatatattcccccttttctgcatgtctgtccatacgagtgagtccgggtcttgcaggtgtacattaactttcaatttatattcgcggactgtaacaccgtcggcggcatgtgctttgaacagcatgccggcatcgttattcatggcgggtctcaaatccacggagtccgacatgacgaataccgtgtcggtaggcgagcctgaagttatccaaccggtaacggtcatagtatcaatcagaatacggtcaatgatggtatctgaacctacgggcaatgaatctctgttatagatgagtctattgagctggtcaattgtaaatttgtaatgtttgccatgtatggtatcgataccaaaagcatgtatagtagcatcggagctgaattcataattgtcgtcagagtcaaggcatgaacttagagcaaatgacacaataagaaaactcacaattactgatagaaactttattctcattttgaaagttagtgtttatttacaagttgcaaaaataggaacatttttttctataaacagctttacggggaagttttatataaaattatagataatatccccctttttctcgataaaaaagccctgaaatgaggctattgactgtttcttgaggccgtataatggcgaaaactcctgccgaaagaatactctgttgcaaatggatatccgtcactgatttcgggtgctttgacgccggaatgaagaaggtgcggagcttcttccacaaagatttcgtcccacaatccggcatcaatgaaggattggagcgtttggctgccaccctctaccaaaagggattgtaatccgcgtgtatacagcatttccatgatttcggggagtatattctgccggtagtcgctgactggcagatattctacattcggtagcggagcgtgcgggatttctgtaaaaacgagggtcggcacgctaccgtcaaataggtgaaggctgggggatagcttttgttgccggtccagcacgatacgtaccggtgaacgaccataccaatggcggacattcaggccgggattgtccagttcagccgtacgggtacctactaatatggcactgtgctctgcccgtttcttgtgtaccagcatcgaagtcagcgggctggagaggataaccggtttaccgtccgtgcgggagtaatcgatatatctgtcagaagattccgcccattttagggtgatgtaggggcgtcgcaaagtatggaaagtgatgaacctgcggatgagctgccgacattctgtttccagcactccgacaataacttcacgtccggcatccttcagtttctgtatgcctcggcccgcaaccttagaaaaagggtcccggcacccgatgacgatgcgtggaatctgcttctcgatgatgaggtctgcacaaggaggagttttgccatagtgcgaacacggttccaggctgacatagatggtggaacgtttcagcagggacgtgtctttcacggaacggatggcgttgacctcggcgtgggcttctccacagcgcacatggtatccctcgcctatgattttcccgtcacatactattaccgctcccaccatcgggttgggtgctgtattgcaaagtccgttttgtgccagttggatgcatcgcagcatatatttctcttcttctgaattcatatccttgcttgtcttttggttgaataatcaaaattaatgattacttttgcagcccgaataaaaccggactccgaatgaatgtaaccgtttcacatatccgcagtgctttgcaggagtgctatcctccccgggaggcagccaatctttcccgtattgtctgctgtgaaatgttaggtcagagtcatattgactattacctgggcaaagatatgattttatctccaaaggatgaaaaggaattggaaagcattctttcccgtctgtgcaattttgagcccatacagtatgtgcagggtactgcccgtttcctgggacgtacttttcgggtggctccgggggtgcttattccccgtcccgaaacggaagaactggtggagaggatgctggaggaagtcgctccggcttcccgtattctcgacattggcactggaagtgggtgtattgccgtcactttgtctaaagagttgccggaagcggaagtaactgcttgggacatttccggagaagctcttgccatagccggcgacaataaccgccttttgcagacctccgtacaatttgtacagcgtgatgtcctgacgtatcaaccgactgaggatgagtactttgatgtaatcgtcagtaatccgccttatgttacggaaacagaaaagaaggacatggatccaaatgtcttgaactgggaaccttcgggagctttgtttgttccagacagcgacccgctccgtttctatcggcgtataggtgaactgggacggagcatgctgacggtcggcggccgactctattttgaaatcaaccgggcatttggagaggctgtcgcttcgatgcttcgcaagcaaggctatacgaatgtccgtatccgaaaagatatttccggcaacgaccggtacgtaattgcagaacgatgatagaaataactgaaactgaagctttgaacagagtggcggcatattgctccactgccgagcattgccgggcggagattgcggagaaactgcaacgctggggcattgcctatgatgccatagaccgtatcatcaaccgtctggaacaagagaagtacattgatgaaaagcgcttctgccgtgctttcatcaacgacaaataccgttttgccaaatggggcaagatgaagatagggcaggcgctccagttgaaaaagatatcttcatctgtctattggccctatttgaacgagattgatgaggaggaataccacgccgtcttgcagaaactgctggcggcaaagcgtaaaagcgtccgtgccgaaagtgagtatgagttgaatggcaaactggtgcgttttgccttgagcagggggttcgaaatgaaggatatatgtcgttgcatagaggtttctgaggaaaatgactactccgaatgaaaattatcggctttctcttttttattctcattctgtttccgtatttttgtgccatatttatcatatatagattagttttgctatgaaaactttagaaagattgtttgcagagaagttgctgaagataaaagcgattaaactacaaccggctaacccgttcacttgggcatccggatggaagtctccgttttattgtgataaccgcaaaaccctttcttatccttctctccgtaatttcgtaaagattgaaattacgcgtctgattttggaacgtttcggacaggtggatgccattgccggtgtggcaacgggagctatcccgcaaggtgccttggtggccgatgcattgaacttgccgtttgtatatgtacgctccactccgaaagaccatggactggagaatttgattgaaggtgaacttcgtcccggtatgaaggtggtagtcgtggaagatttgatttctacgggtggaagcagcttaaaggctgtagaagctatccgccgtgacggatgtgaggtcatcggtatggtggctgcctatacttatggtttcccggttgccgaaaaggctttcaaggatgccaaagtgcctttggtgacgctgaccaattacgaggctgtgatggaagtggcactgcgtacgggctatatcgaggaagaagatgtggagactctgaatgaatggcgtaaagaccctgcacattgggaatctggtaaataagaacttatttgtaaaaatgttaatatggataaaagagccattcggatagattctgtccggatagttcttttttctttttgaatacgattgattatgacgaaatttgagagtggagtgaaagttgtaccggcttcacaagaagctgtttatgaaaagctttccaacttgagcaatctggagaaggtgaaagaccgtctgcctgaagacaaagtgaagaacttgagttttgatgcggagagcatgacgatagaggtggctcccgtgggaaagattacgttgcagattgtggagaaggaaccttgcaagtgtatcaagtttgcaacaaccacttcaccgctgcccttcaatctgtggatacagattgtacccgtcaccgaaaccgaatgtaaaatgaaactgaccatcggcatggatataaatccgtttatgaaggccatggtgcagaaacccttgcaggaaggattggagaagatggcagatatgctggcgatgatacaatattaatcattaatcattagaaacaacgtggctcagaaactttgggaaaaatccgttcaggtaaataaggatatcgaacgcttcacggtaggccgtgaccgtgaaatggacctttatttggcaaagcacgatgtgctgggttccatggcgcacatcacaatgctcgaaagcattggcttgttgacgaaggaagaactgcggcaattgctggccgaattgaagaaaatctatgcgatggccgagtgtggagaatttgtgatagaagagggagtggaagacgttcactcacaagtggaacttatgttgacgcgcaacttgggtgatataggtaagaaaatacacagcggacgttcgcgcaacgaccaggtgttgctcgatttgaagctctttacccgtgcagagataaaggaagtggcggaggctgtggaacaattgttccatgtgctgattatgcagagcgaacgctacaaggatgtactgatgccgggttatacacacttgcagatagccatgccgtcttctttcggactttggtttggggcatacgccgagagcctggtggacgatatgatgttccttcaggcagctttcaagatgtgcaaccgcaatcctttgggttctgctgcgggatacggttcctcgttcccgctgaaccgtacgatgactacccgtcttctgggatttgattccctcaactacaacgtagtgtatgcccagatggggcgtggcaagatggagcgtaatgtagctttcgcccttgccagtgtggccggaaccatatcgaaattggcttttgacgcatgtatgttcaacagtcagaacttcggttttgtgaagctgccggacgattgcactaccggctccagcatcatgcctcacaagaagaacccggacgtctttgaactgacgcgtgccaagtgcaacaaactgcaatcccttccccagcagattatgatgatagccaacaatcttccttccggctatttccgtgacttgcagattatcaaagaggtcttcctgcctgcttttcaggaactgaaagactgtctgcagatgacgacttacattatgaatgaaatcaaggtgaacgaacatattcttgatgatgacaagtatctgcttattttcagtgtggaggaagtcaaccgcttggcacgtgaagggatgcctttccgcgatgcctacaagaaggtgggactggatattgaagccggaaacttctcgcacagcaaagaggtacatcatacccatgaaggcagtatcggaaacctttgcaacgatgaagtctctgccctgatgcagaaagtggtagatggtttcaattttgagaccatgcaagctgcagagaaagagttgctgggcaggtaaaaggttctgcgggttcaagtcccgctgcgagtactgtacttttataaaaaaaaatttggcagaaacgggaaaactgtttatctttgcacccgttctccaaatgcggaaatagctcagttggtagagcataaccttgccaaggttagggtcgcgagttcgagtctcgttttccgctctcttttccctttttaggatgctcgaatggtggaatggtagacacgaaggacttaaaatcctttggccattgcggctgtgcgggttcaagtcccgcttcgagtactcgattaagctctgtgaatcattgatttgcagagctttttctttataagctcttgatatgaaagaccgtttccctatagcgaacaaagtgtttcccttaatagaacaagttgtttcattatggcgaacactttgtttcccttaacagaacatttcgtttcatcatatgaaaacagactgtttttccttattggaacaaactgtttctctatacttgaacaaagtgttcatctctgtgaactaacaaactaactataatactatagtagatgatatgcgcgtggcacttggtaatatgtgcttgcagatgaaataaaagaatctatataaatagcctcctctttattgttcagaacagcttggggcgtttgttattgaaccgatagccgatacccaacatcagataattgggctcatgaaattcccggaggttatatcctatatggagatacgaattgcgtgttacgtctattttcagggcaagaatctgatagaaagacttcatgtcaccgccgccgtgcagaacattggctcccagaccgatacctaccgtgaagtaaggcatgacaaattctccgcgggcagataagcccaatgccatctgcttcttggcgggcggagtatagaagccgttctcttcttcgtacgattctttcatgttcgcactgtggtcgtatacgccgtccagcgccacaccggcacggaatttatagccgaagttgtacatgggtgcaaagctgaaaccgaacacgttgtaagtgccgggtgcgggtacctggccactactgccctcatgggccactgctttctttcgccaggagccgaacaaagtcaggtcgtagctgacgtggcgggggaatggaggaacgatagggcgttgccatgattgggcgagctcatccgctctgcggttaaagttatataccaaccccactttgcagtccaccgtgttcagaccggagttgggatattgggtatttccgttggaaaagtggcttccggtagttcctatcatcaggtcgaacttgggggagagtgcccactttaagtagaggttcacattgagataggcattcactttcgagccgataatctggttctccgggttgtcatattcatcgtagggtttccagccgaacgatgcgccgaagttccattcatagttcaaggatatgcgggggctgaattgggcgatgcgtcccccttgaaacagatagaccgccagcgggttgcccagctcttccggattgccgaagttgaaatagccgactccaatcccttgataggctcctatataagcctggtcggcaacggtgtggggacggagctggaaggagtatttcagatggccggcataggcatttttcatggccttgtattggtggttggagtactccagaaaagggctggtctgaaaaatatagccagcacgcccttctacgcctaatctgtggatgaagcgctgtgagaaagggagtgtatcccgtttgtattccgaatgactatcggatgtccattgttgggcgtatattgtatcagacaagaaaagtaccgctcctaagaaagccagtattttccatatctgcgttctatttttcatatgccgtgtcggtctttcttgtttataaatgttccaagtgaagtttaatttcgtgcaaatatagttcttttttccttttggtattcacaatgagacaactatttgtaaaaagagggggtaaaacggaaatcgtcaatagaatggccgacttcggttttatcccctccttattcattcacccggatgttgtcttatgattcagatactgggtggcgagtgttatttccggtcgttctcccggatttccacacggcggattttcccgctgatggttttggggagctcatcaacaaattcgatgacacgcgggtatttgtagggagccgtcactttcttcacatggttctgcaactccttgacaagctcttctccggcgcgtgccttgtactcttttgccaacacaatcgtagcttttaccacttggccgcggatttcatcgggcacaccggtaatggcacattccactacggctgggtgggtcatcaatgcactttccacttcgaacgggccgatgcggtagccgctacttttgatgacgtcgtcggcgcgacccacgaaccagaggtagccgtcttcgtccttccaggctacatctcccgtgtagtaaatgccgttgttccatgcctcgtgggtgcggttggcatcacggtagtattccttgaacaatcccagcggtttgcctttgtcggtacggattacaatctgtccctgttcaccggcttccacggaacgtccttcgtggtctatcaggtctacatcgtattgcggattgggcaatcccatgctgccgggtttcggttccatccacggcatggtggcaacggtaagggtcgtttcggtctgtccgaagccctccatcagcttgatgcccgttaacttcttgaaggtctcgaatacagcggggttcaaggcttctccggcgatggtgcagtattccaggctggataggtcgtacttcgtaaggtcttcgtgaatgaggaaccggaagatggtgggcggtgcacaaagcgacgtgacgtgataatcctgtatcttctccagtatggctgcgggagtgaacttctcgtggtcgtatacaaatacgttggcaccggcaatccattgtccgtagagcttgccccacacggcttttccccaaccggtgtcggcaatggtgaggtgtaggctgctctctttcaggttgtgccagaagctgccggtgacgatatgtcccaacggataggtgaagtcgtgggccaccattttgggctctccggtagtaccgctggtgaagtacatcagggagatgtcatcgttcgtgttcggatgttccggtttcacgaaaggagcggcggcctcgatacctttgtggaagtcttcgaatccttcgggagcttccggcccgacgcttacgaggcgtttcacagaaggagactctggcatagctgccgtgatatggtcggtgatgacgctttcgccggcacagactatcattttaatgtctgcggcgttgcagcggtatacgatgtctttcttcgtcagcaggtgggtggcgggaatcaccactgcaccgagtttgtgcagtgccacaatgctgaaccagaattcataacggcgtttcagtatcagcatcaccatgtctccgtgcccgatgccgaggctttggaaataggaagccgtcatgtctgtgtaccgtttcatgtcggcaaaggtaaactgccggcattcgccctggtcattggtccacaacagtgcgggtttgtcgggctgctcggctgcccaggcatccactacgtcgtagccgaagttgaaattctccggtacgtttatcttcaagttcttgatgaagtcctcctgtgaggtgaaggatgtttgagataaaaatctttctaccataactttattacatgattactgccaggaattttacagtctttccgtcaagcgccttcatgccgtgcggcagtttggagttgaagtatagactgtctccttcgtttaagattaagtctttgccgtcgatgctgaccatcatacggccttccagtacgaggttgaactcctgaccggtatggctgttgtaatgtatcggctcgctgtccggtttcggttctacggtcacgatgaacgggtctgccgtgcggttgatgaaaccggctgccagcgattggtatttatatgccttggtacgttctatactggttccttttccggcacgtgtcaggaagtaggagctcattttgggctcttgcccaaacatcagtgcgtccagtgatatgccgtagtgccgtgctatcttctgcagcatgctgaccgagatgtcgaattctccggtttcggccagacggtactcttctgcagagatgtcgcagtcgcgggcgatatcgtcggcagtcagttccaatacgtcacgcagtccgcgcaggcgttcggctatttgtctgatttgttcgtccataattatatttttttaatgggttgttattaaagtgtggcaatgtgccaataggctgcacaatgtttaattataccgtagctcataggcatatcgggacatcgttacattagcacattaaatatcatttactcgctttgatggctttaatcacagtggaggtgaatccttcatgttccagctcgttgattcccttgatggtaattcctccgggggtacacaccttgtcaatctcaacactggggtgcgtgtcgttgttcagaatcagctcggctgcccctttcacggattgtgccaccatgcgcatgccgtctttgggatagatacccatttcaacgccggcctgcatggctgcctggatatacttaagcacgtaggcgatgccgcaggaagtcatggcagtggttgccgcaatcttttcttcgggaatgagcatggcgagtcccatctggttgaaaatgtccagcatcagttgctcctgctccttggtggcattgcggctggcgatgagtgtcatgctttccatctcgctgatggcggtattgggaataagacggaacatggtcatttctttgtctgctacatagtgtgtcagctcttcaaaaggaatgccggctgcaacggatataagaatctctgtgccttttagttccagttcctttatcactggctccatcagccatggcttcacggcaaagattatcatatctgcaccggctgccgcttcctggttgtcattggtcacttgcaatgcggggaattctgccttcagcttgtccagcttgccctgggtggggttggagacaatgatgttaccggcagggatgattgttccttttgccagccctcgggcaatggctccccccatatttcctgcaccgataattgctgttttcatatctttttgttgttaaaagagttgttttgctggcaaaggtagataaattttctacaaaaaacgaccgagagagaaaggtattctgcttttcggtcgtttcttttgctggctgattatttgtgtcaaatattaaagtactttcttgaagcgttccaagaattcctttgcttcatccatgccgaggcacagaggcggcagcaggcgaagtacattcgtaccgcttacaccggtgaatacatgctgctctttcagtagtcttaggcgcagttccttgatgggttcttcaaattccagccctatcatgagtccgcgtccgcgaacgtccttgatttgagggaatttctttagttccgttatcaggaagttgccgacttgggctgcattctctatcaggttttcctgctctatcacatccagcacggcaagggcggcactgcaagccaggtggtttccgccgaaagtggttccaagttgcccgtataccggtgtaaacattgggctgatgagtacgcctgccatcgggaaaccattgccgatgccttttgccacggtgacgatgtcggctttgatgccgttgtactgatgggcgaagaacttgccgctgcgtccgtagccgctttggatttcatcgagaatcaagaccgtgttgtgttccgtacaagtctggcggagagcctgcatgaattcgtctgtcggcagttggatgccgcctacaccttgtatgccttcgataatcactgcgcagacatctcctttggacaattcggccttcatggcttcgatgtcgttcaacgggaggtaggtgacgtgcccgcagttgttgatgggagcgatgattttaggattgttcgttacttccaccgccagtgaggtacgtccgtggaatgcttttgagaaggatatcacacgggtacggccattgtagaaagaggcgagtttcaaggcgttttcattggcttcggcaccgctgttgatgaggaagaatgagtagtcgtcatagccacagacttttcccaagcgttctgccacttgctgttgcagcttgttaattactgagtttgagtagaatcctaacgtagcaacttggttactcaccatctctacataatgtggatgtgcatgtccgattgagatgactgcatggccaccgtagaggtcgaggtattcggtaccgttctcgtcccatacatggcagccttttcctttgacgatgttgatgtcaaagagagggtatacgtcgaataaattcattttttttagaatgcagaaggtttcaaccgtaatcctacggtctcttccaggttaaacattaaattcatgttatggacagcttgtccgctggcgcctttcaggaggttatcaatgcaggaaatgataagcagtttgtcgccatgcttctccagatggatgaggcacttgttggtgtttaccacttgcttcaggtcgatattcttctccacgatgtgggtaaaggaatctttggcgtaatattcttcatacatgcggacgatttcttccagggccactttggtcttcaccacaatggtggtgaagatgccgcgcgggaagtcgccgcggtaggggatgaagtcaatgtccgcatcaaagctgttctgcagctgtttgagcgattgcttgatttcgggcacatgctggtgctcgaaagctttgtagacgctcatgttgttgttgcgccagctgaagtggctcgtggcgcccggtttcacaccggcgccggtacttccggtaatggcgttcaccatgatatcatcgttcagcatcagatgtttggcgagcggcagcaggcccagctgtatgcaggtggcaaagcagcccggattggctacgtgcttcgctttgcaggtggcacggcggttcagctccggcaggccgtagatgaagtcgtgttcgggagaggctatgcggtagtccatggagaggtcgatgattctcagttcctcgggcacgttgtggctttcgaggaacttcttcgtgtcaccatgtgccgtacagaaaaagagtacgtcgatttcttccagcgggagctggtcggtaaataccaagtctgtttcgccgtacagtccttcgtgtacgtcggtaattttgttgccggcgttgcttgagctgtttatgaaaacgatttccgcttccggatggttgagcagcaaacgtatcagttcgcctgccgtgtatccggctccgccgatgattcctactttaatcatttcgataatatctatttggttcttgtggtataacaattagcattataatgtatatgggtatgcctgcaaatgcagtaaagatcgtggcgaacgtataaacgatacgcaccaatgagacatcgagtccgaaaaagtttgccagtcctgcacatacgcctgaaagcatccttccagtccggggacgtgtcagtttttgcttcctgccggtcatttagattttctcgtctttatgatttgaataataagcacgcagtgctgtggaggttactttgatgaagcccttggcatcttctgccgtccatcctttctgcatctcaccgtattcgccaaacttgtttttcacaaggtcatctttgctttctacacctacggtagaaaagcagagcgggtgaagttcgaggatagccgtaccgtttacgttgcgttgcgaggattccagcatggcttcgatgtcgcgcattactggttccagatattggctttcgtgcaggaacatgccataccagttggctacctggtccttccagtattgctgccatttgctcaaagtgtacttctcgaggaacttgtgtgctccgataatcagcataggtgcggcagcttcgaaacctacgcggcctttgataccgataatcgtgtcgcctacgtgcatgtcgcgtccgataccgtatgccgcaccaatctcttctaccttctggatggctttgatggggtcgtcgaatgtctcgtcgttcacggctttcagctcacctttttcaaaagtgaggcgcaactgctcgctgccctctttggtgcagtgtttcagataggcgctttcgggcaacccttgcgcggaatccagaatctcgccaccacaaatggaagtgccccacaaacctacgttataggaatattttagtttggtgaagtcggcggcaaagccgtgtttgttcagataatcaatctcttcctgacggctcagtgccatgtcgcgtgtcagcgtgatgatttccacgcccggagccatgacgaggaaagtcatgtcgaaacgaatctggtcgttacccgcacctgtagaaccgtgggcgatggcatccgcgccgatttcgttggcatagcgtgcaatggccaatgcttggaagatacgttcggaacttacagagataggataggtgccgttacgcaaaacattgccgaataccatgtatttcaagcttttctcatagtattcctgcgtcacgtcgagggtgacgtattctttggcgcccagcttgtaggcattttcttcgtttgtcttcaactgttcagcactgaaaccgcccgtattggcacaagctgcatatacttcgtaccctttttctttggtaagatacatcaccgtaaacgaggtatccaaacctccgctgaatgcgactactactttcttcttcttttccatatccttagtatttttatattttatcctcttcgtgcagcttcgggtcgtaaagcattgctgtgcaaatgcagaatttacggttcttagctaccaatatatcatggtttatacagccttcgcaacctttccagaacgattcgtcatcggtcagttcgttgaaggtgacgggcacatatcccagctcggtattcattttcatgacggcagctccgctggtgagactgaaaactttagcattaggccagcgtaggcgtgccaggcggaaagaagcggtcttgatacgttttgccagccccagtccccgatatttggggtgtactatcaaaccggaggttgctacatattgcttgttaccccagctctctatgtaggtgaaaccggcaaaatcatctccacacaaggctataatggcctttccttctttcattttagtagctacgtattcgtgtgtgcgttctgcgatgcccgttccgcgtaccttggcagcttcccggatggtatccaaaatcttgtctacgtaaacttcatgtgaggcgtcagccaccatcacatcaatttgtttcgaatccatttcttatttaatttcttgttttttgttgttatctatcatttaatgttcgggatgatttgcgataggaagctgcgtacctcgtcatgtgacgctgcttcgtgcaccaccagcatgatggtgtcatctccggcaatggtacccagaatggcgggacactctcggttgtcgatgtcgtaggccatgctgctggcatatccgggccgggtacggatgacggcaatattgcccgaaaattgaagtgaaacgaatccgcttgtcatcagcatttcacttgcactctggtcgttcgaacgtttatacatgatgttgttgggcagcacatatacgtatttaccgttcatgttcgctgctttcgctactttcagctgtttcaagtcgcgtgacaaggtggcttgtgtcagttcaaagccttccttgctcaaagcttgcaacagttcttcctgagaactgacgtctttgcttgagataatcatcttgatggcgtctaaccgattggcttttttcttcattttctgtataattattctaagagtagtgcaaaattagggattatttcggaaagaatatgcaaaaaggagagcttttttattctttttatacatcgggtgtactgtatatgttgtttttgttctctttgttggagtcttgtttgttcttttacgttattggagattgtttccgtatgtctttggtaaatgttgatataatatagaatagatatgcaattgtcaaatctgacaccctttcaatcaaaaactgtacaaaaattatatgcatagaaataaaatccctcaggtttttacgttggtcccagattgttacgttgcccccccctctctcttatggtcgggaaaccggaggagaggagggatgaaataaaaaaggcttaacttctaaaagctaagccttttctgtcggctgcactatcgaattatcgaacaagtttatagtggattttgagaaaataatagattttattttagttgttttaaaataaaaagctatttttacggtaaaaaagtaatcattatggatttatatactacaatagtaggactgtattcgcaaaatagacatgaagtgctaagagtagtaaatacagctatccattcgaaatgtaatctatctgaaggtatagaggttattcatacagggttttattgttttacacatacggggaaagaacttgaattcctatatgatacacaatctcagattttgtatttccaaggttctaacagtaatgggtatcattttcctttgggagtattatttcaaagtaagtgtttaccacatatcattaattatcagggtttggtgagaatgagattttctttaatgcttaataataatagttttttttgttatcaagggtatgatacaattcagcaatcatttataaacaaagtggtgttatattttccaatcactacttatacatattttatatttcaaaagtatgaggggtatcatgctataaagataaaacctatggaaataccttcttttacttttaaagcgggaaagttttgtttttgacaactgttttgttataggtttatataatggattatcgaacagaaaacgagaatgaagtttttaaaattttccgcagatttacagcggtttgtgaaggtgaaaaagaaaaagcgacaaccgattttgctcgtttgtcgccttctgtcggaatgaggcgactcgaacgcccgacccctacgtcccgaacgtagtgcgctaccaactgcgctacattccgattgcttttgaaaagtggtgccaccaggaatcgaaccggggacacaaggattttcagtcctttgctctaccaactgagctatggcacctttttcgtttgcgggtgcaaagataaagagttttttttataccgcaaggctttttgaggaaaaatatctaaaaaaggtacctcttactctatggagcgaggtaccttacttctaagaatcatttgctatcgaagaaatcagtcgatattcggattgatgctgtgccagtctttgatggcaggcagtacacccatttctatcacctcgtcacgaagtttgcagagatgggcatagctttctttcagtttggcttcttcttcgggtgtgccgttcagttccttatagtgtacgccgtctttggtaatttcagtttccattgccatcatgatgtggtcgaagccgtggttgtgtacatatgtaccggcaggccagcggaacggtttgccacccatagctgcagctatcatttcgatggagacgtatgccggactctggaaggaagaacgtccacggagggcgatgatgttggcaccgcctttggttaccttagtctggatttcgacccactgttctttagtcagggcaggggtgccgatgatatcaagtaacggtttgccgtccaccttggcggtagaggcatatacagccatctgttcaccatgaccgccgtaggtacggcaattttcgattttgtcgggggcgatgccgaaatgcttggaaagttcactacgcaggcgggtgctgtcgagggcagccaatgtggtcacttgtgaaggtttcaggccggaatacaatagggtaatcagaccggtgatgtcggcagggttgaaaatgacaaccacgtgcttcacatccggacagtaggcttttacattcttgccgaattcttcggcaatagcggcattgcctttcaaaaggtcttcgcgggtcatgccggccttgcgggcggcaccgcctgatgataccacatacttggcaccggtcagcgcttctttgatatcggaggtaaatgtgatgttcattccttcgaatccgcagtggaacagctcttcggccacaccttccagtccgggagcataagggtcgtacagacataggttgggagtgagatgcatcatgattgcagtctgtgccatgtttgaaccgatcatgccggctgcgccgacgattgtcaatttgtcatttgtcagaaattccataatcttttttatttaaaggtgagtaatatcttttcttgctgattgtcacgatacaaagataaccctttttgaagagagttgttcatagaaaaaagttatcttttagagcaaaaagttatttcttctttccgaactgctgtattgtacctaaattacttatctttgttgggaaaatgaagataagtaagaaactatgagcattgagttaggaaagtacaatacgctggaagtggtgaaggaggtagccttcggcatgtatctggacggtggcgaagaaggtgaaattctgcttccgtcgcgttatgtcccccaagactgtaaggtgggagacaaactgaacgtttttatatatcttgataacgaagaacgtctggtagccactactctgacaccgttagtgcaggtcgggcagtttgcctgcttggaggtggcgtggataaaccagtatggtgctttccttaactggggattgatgaaggatcttttcgtccccttccgcgaacagaaaatgaagatgcaggtgggaaagaagtatgtggttcatgcccatttggatgatgaaagctatcgtatcgtggcatcggccaaagtagaccgttatctttccaaagagaaggccgtctatgagtcggggcaggaggtggatatcctgatttggcagaagacggatttgggattcaaggcgatcatcaacgatgaatatagcggcttgctatatgagagcgagatatttcagccactgcacacgggcatgaggatgaaagcctatgtgaagcaggtacgtgaagacggcaagatagacctgctgcttcaaaaaccggggcaggctaaagtagaagatttctcagctacgctgctggactatatccgtgaacagggcggacggatagctttgaatgacaagagtccggcagaagaaatctatgcaactttcggtgtcagcaagaaaaccttcaaaaaggctgtgggagatttgtacaaaaaacatctggttgtattggaggaagatggaatcaggattaggaattagtcccagtcattaggaatttccctacttgtaaatagagacaatcattagggaggggaatttcctctccctatttttgtcgtacaataaaaaaagaaaagtcatgatacgtcatttgatattaagtgtttgtctagttctggtagcgtttcccgcaataaaagcggcgcccatagacggaatccgtatagaaagtccataccgtagagtggtggtactggtcgacggacagcaggtttgcctgcctactttcagttgttttgtagccaatctgcgtggtagttgtcgggtagaggtttatgaagcgccatcccgtggggagaattcccgaagaggaaaactcctatatgatgaacgtgtgcattgctccatcaatgaagtggaagatattttcattccagaggacaaaagacctggtggaaactggggtacttctaatcatcacaagcctggcagacccggtgacagaccgttaggaggcgagcagcatgaaccggtgatgtcaccatctgccttcgaacagtttatggggctgatggaaaaacagagtttcgattcagaccgtaaggaagtgctcgaccatgccttgctgacctcttggttcactactgaccagtgtatccgtctgatggttttttatcgtttcgacagtgaaaagaaacagttgatgaagaagatttatcctaaaatagccgataaaccgaatttctattatgcgatagacaagctgaccttctcgtcggacaagaacgagataaatgccttcatcaaacaatatcatgagaagaataactaaaaaaaggaggggttatgaaacggattatatttatatttcttgccgctatgatgagtacagctgtttgtagtgcggcaatgagcaacagcaaagtgcgtaaagagacccgctttcttacggacaagatggcctatgaattgaacctgagtacagaacagtataatgacgtgtacgaaataaactatgatttcatttccggtatacgttatctgatggatgacgttcttcggggggaggaatgggccttgaatcgctattacgattatctggatgtgcgcaatgacgaccttcgatgggtgctgaataaccggcagtacggccgtttcatgcaggccgcctatttttaccgtccggtttatgtaagtggtggtcgttggtcttttagggtttacatcacttacaccaaccataatcatttctatttcccgcggccgtatcattaccgtacatattgcggtgggcattatcgtacgcactatcacaacagctattatcgcggtcgttaccatcatccgcactatactggttcgtggagtattcggaatgataagtcgtaccacaccagccgccgttcagatttcggttcggtgaacatccgccctaattcgcataagcgtccggcaggcagggatgatgtatataccacgcgacgtagcaacagtagtaataatcgcattagcacaggtacacgtaacagcagtacgcgacgtagtagtgtggatagtggcagaaagtcgagtaaagagaaaatagaaaccacaagaactaaaaataatgataagagccccagccgtagcagggtaaagacggcaagcaaggaaagaagaaatgcttccggcgtacggagttccgaaagccgtcgcagcagctcttcaagcactacccgcagttctaccggcagtagctcttcccgctcttcggaaaggagatagaagaacaaaaaactcccctcttgtcagcctggaggcagggagaggggagaatcaaacacaacaactaaaattatacttctttttttattcaatcggttctcccttatagaaatccagaatcttggtacggaacagatagtcatacttggcttgcaattcgtctgattgggatttcataaggttctgttttgcttcattgtattctacggcatttgcttttccgttctcatacttttcgctcatcagcttgaaagactcttcgctggcaacggtggctgtatggctactggtatatttgctttcggcagcagcggcgttgtaccatgcttgttggatttccttataaagtgtcttcttggcattatccaattgcaaggcatagttttcacgttgcaggcgtgccgtgcgtacccggttacgggtagagagacggttgaaaataggtacgctgaggttgaatcctacatatttgttgaagttatcgttcatctgctggctgaaagtacggtcgatggtagaatagtaattcgtaccgagactaccgttcaggctcagttgcgggtagtagttgctctgggcaatacggatattgtgtttactgccttccaagcggaactgtgcagcttgtatggaagccttactcaccatggctgtttggaatatctcatccggaggagtgagagggactaagtccagattgactgccggagattccagattgaacccttccggtgtttccagttcgataagctggctaaggtcgagcagggccaacttatagttgttgtttgtctgcactacattcatctcgtcttgtgccacacgtgctttggcttctgccagttctgccggagaggcttttcccaagtcagcaagccggctgatgcggacatattgctctttgctcaattgcacttgtcccaacgccacctggtggagctcttcattgaacagcacctgaaggtaggccgaagctatattgatggcaatgtcttccttggctttgtccaggtcggcaatggcagctttgaggttcagtttcgccaatgcatactggtggggaatctccagaccggtaaagatgggtatgcttgtactgacggacatattggtaccgtggctgctggtgttgacgtatacagtggagtagtctcccgtatcctcgttcttgatggctgtttgcgtacgtccccagttccagctctggccggcgttggcgttcaggttcggcaatcgtgcccatttggctgtatttacctcgacagcactctgttcggcagcgttggctgtctggcggatactgatgttatgctcgatggcatagtctatgcattggcgtaaagaccatcgttcctgcgcctgcactgagacactgccgaatattgcgaggtataagaatatctttttattcatatcgtatatctttttaagctattccgtttgttaatcctttttctctgcaccgcgaatcttatcctgggcactgataccgcttttgatggcaatctttatgccgtcactcatgccgacctggatggggcggcgttcgaacttctgtaccggtacgctgtccgtcattacgtatacaaaggtgctgtcaccattgaattcaatggtactttccggtacggcaagcgttttctgggcacggtccaatacgatttctgcgttggcagaatagccggaacgtatctgtacgctgtccggtgcggcaatggcagctttgatttcaaactggttggcaccgttttcttccacacccttcggagatatgtattccagtgtggcatcgaacgaaagattctgcagggcgccgattgtcagtttcaccggcatgccttcgtgcacacggcccacttccgtttcgtcaatgttgccgcggaaaatcaaatcgttcatgttggcaacggtagcgatggtggttccgtcattgaaagtgttactcatgataaccgagttaccgactttgatgggtacatccagaatcagaccggtaatggtggaacggatcagggtactactgaaagaagcgctgttcttggtgatgccttcctttacaatttccaggttatcttttgctgtctgcagttcctcgcgtgcctgcttcacgcttacttcccctttttcgtactcttcagcgctgataagcttgtcgttgtacagtttctgggtacgggcgaaatccgtttcggcttgggcagcgttgatttccgccaatcgtacgcggctttcggcagagttcaattgtcccagttcgggtatcacctttactttggcaagcacttccccttgcttcacactttgtcctgcttccttgtatacttcggcaataataccggaaatctgcggcttgataaggacttcatctctcggttccactttgccggtggctacggtagtcttttcaaggtctgtcacttccggaactatcgtttcgtatactgttactttaggttgggacttctggtacagaaaaacgaatgtccaaatgaataaggcagcaattactaccaataatgcgattttcagaaacttctttgttttcatcttatatttacgatttaattatttacgattgatatagccattatttcatggcttacggttagtggtctctctataagtttattcatccctgatggcttcaattggcttgattgccatggcgcgataggcaggtgccagtccggcaagtactcctaatgcgatgaggaggatgcaggttccgatagccagtccgaatgaaacctggtagtgggttttgataactccagggtcattggcggccttttcaagtatttgcagtacaaatacggcaaaagaaatgcctgccatacccgctatagtggtcagtaccatgctttccgaaagaatttgttgcaggatgtctttaggacgggcacctatggcacggcgtatgcctatttccgttgtgcgctccttgacggttaccatcatgatattcgatacaccgatagctccggcaaacaatgtccccaaccctaccatccagataagaaagcgtactccggtcatcaggttgtccatcatggagaacatggcttccgcattcaggaacatgacggcttgtttgtcatcgggagcaatgtaatgtgccgcttttacgaggcgttccacttcgggctgcacgtcttttacttttactcccggtttcatgatgaaacataccacatgcagtttctttccgaggttgtaggtctgttgcatggtggagaaaggcaatgtaatggcttcagaggcctgcccttgtatattgacattgccttcggatgaacacattccgataacccggtaatagatgccattcacccggacatatttgccgcaggggtcttcacccggtttgaagagactttcgtaaacacgtttgccgattacgcacactttacgtgactctttaatgtcgacatcattgatgaaacgcccgtaggccatctcttgatgctctatctgttcatattcgggatacaagcctttcacactacagtcgtacttgttgtctccgtagacggcaacttgtccccagagggcgattgaaggcgtggcgagtgctatgccgtccacactgcttacacggtctacatcttccatctccaagtcccaccatcgtcctttgcgaaaacctttataagcctcgcttgtcttttgtgcagcgataaagcccgagttggttgcaaatccttcgaactgggattttagttcttcctgcatgccctggccgccaccgataagcgccaccagcataaagataccccagaatacgccgaacgccgtaagcaggcttctcgttttgttccttgttattgtgatgaggatttcctcacacgtatctatgtctattctcataatctttaatctgctctaagtgcttcaataggactgatacttaccgctttcttagccgggaagaacccagccaacgtacccgctatgataagggtcagggtagcttggatagcaatactgaggtctacggtgggatcggagaacatggtctgctggaacatgccggcatccatcgtctggctaccgaaagcagagttcatccattccgtcaccccgatgcctgccaccataccgatataaccgaatagcgtagtgatagtcacgctttccacaataatcagccaaaggatggagaaaggttttgctcccaatgccttacggataccaaattcccgggtacgttctttcacggtaatcagcattatgttcgacacgccgacaatcccactcaacagtgtgaagataccgataacccagattgcagtccggaggatacccattgcattctgtgtctgcagatagttggtgaaacgattccatatccatatggcgctctcatctgtggggtcaaagcggtgattggtggcaatagccttgcggtattctttttcaaaggcttcgttactttctatgctgtgcaggttcttggttgtaaagatgatgttattcagcttgtctcctttattatagatggtctgcaaggtggagaaggggatatacgcttcgtttgcctcgcggtctccctggtcattgtagaggcctactacttgataggccactccactggcattgacaaattgtccgatgggttcagtatgcgtttttccgaaaaggatatctgcagatttcttatggaggatgatgactttacgtcggtctttcaggtcgttgtagttgatgaaacgtccgtccgctgttttcacggtttccacttcggtgtagttgggatatacgcccagcagagagatattgatatattcttgtccgaagctgacgtttacattactttgacgcacggtggcaccggcactgatgacattttcagtgaattgcttctccgtgtcatccatgtcccggttgtccagttggacgcggcgtccttctttcagaccgtcgtatgacttggtggtccagccggggaagatgcggatagagttcaaggcacgctccgacgcattttgctcgaaggcatgtatgataccgtttccggctccgagcagcacgatgagcatgaagattccccatgccacggcaaagcccgtcaggaatgtacgcagtttgttgcgtttgatggttccgtatatttcttgccaaaggtctatcattgataattaaaaattaagaattaaaaattaaagggggagggggctcttcctttattatttcatgaatccgtcttttccgaacgggcttgcatcgtggttcagattcgtctcgatgctacctatgataccgtctttgatatggataatcttgtccgtctggttggcaacaccgctttcgtgggtcacgactacgatggtcatgcccgtatcgtgcagttcctttagaatctgcatcacctctacggaagtcttgctgtcgagcgcgccggtaggttcatcggcaaggataatctgcggttgggtaatgagggcacgggcgatggctacacgttgtttctgtccaccggacatctcatttggcatgtggtgtgcccactctttcagccccaggcggtccagatattccagtgccagcgcattacgtttgcggcggctcactccttgataaaagagaggaagcgccacattctccactgcattcttgaaggaaatgagattgaaggactggaagatgaaaccaatcatacggttgcggtactcggctgccttcgtttcgctgaggttcttgatgagggtaccgttcagataatattcccccgtgtcgtaactatccagaatacccagtatattgagtaaagtggactttcccgaacccgatgagcccatgatggaaacaaattcgcctttctgaatgtcgaggttgatacctttgagcacatgcagcggtgctccgttgttgtaggtcttgttaatgtcttttagttgtatcactgttttccctgtttattgctttactcttattaattttcactattagacgcagcaatgctacgaaaagttgcaaaagttgcaaacttttttaaaaaaagattttgcagtgtcgtttttctttgtgatttttgtaaccatgaatgtgattaactaaccctttaaacaaaagtaatatcatgaattcaaacatggaaaagccctatgtagtgggcattgacataggcggaacaaacaccgtctttggtattgtagacgcacgcggaactattattgcaagcagttccatcaaaaccggagcttatgaggacgtcaatgattacgtagacgaagtttgcaagaatctgttgccgctcattattgccaacggtggagtagacaagataaaaggtatcggtatcggtgctcctaacggaaactattacagcggtactattgagtttgccccgaaccttccctggaagggtgtaattcctttggctgccatgtttgaagagcgcttgggtatccctaccgctttgacaaacgacgccaatgctgccggtatcggtgaaatgacttacggtgcggctcgtggtatgaaagactttatcatgataactcttggcaccggtgtaggtagcggtatcgttattaacggtcagatggtatatggccatgacggttttgccggagagttgggacatactattatccgtcgtgaaaacggacgtctctgcggatgcggacgtcacggctgtctggaaacttattgttcggctacgggtgtggcgcgttctgcacgtgagttcttgaccaagagtaccgaaccgagtttgttgcgcgacattccggcagaaaacattacttccaaggatgtgtatgatgcagcggtgaagggtgacaagattgctcaagacatctttgagtttaccggaaccatcttgggtgaggctttggctgacttcatcgctttctccagtccggaagctatcgtgttgttcggtggtctggcaaaagcgggagactatatcttcaagcctatccagaaagctattgacgacaatgtattgaatatctacaaaggtaagaccaagttgctggcttccgagttgaaggactctgatgctgcagtgctgggtgccagtgcgttgggctgggagctgagagatatcaagtaatcaatattagggaaactgataaaggaggggatatgtcaaaactccccttctatcgaagtcaccctcgctacacctatctgtggcgagggtgatttttagtttatgagagtttcgacacacctttttttctttggtggcacatattcctcagcaataaagttatgtcacaagttgcttccacacttccacccattctctgtatccctttattcattggggttgcggatgctgtggaagcaacttgaaaaggtggaagcaacttttgcttccaccttaaatttacgccaaataatctattaatgtcttgtagtacaataaattaataggatatggggcaatttgccaatatcgtgtaaacaagctattggtttcctgcaaacacggtattaacttcgtaaaagcccgtgcgataataggtggaagtcaggtttttggtatggataagataggtattcagtataggcaagctatgcatatgagagctgtttaacggccgtgaggcgttcgcctaacggccataaagcaccttgttgacggtcgttagcagagcgtctcacggccgttgggcgctgataaactaacatatcagcaagaaggaaggcttatgtgaaaggaaaggagcgcaggcttacaatgttttgaatgagggagtagcagtagagtatcgcatggtgtgtatgcctactgtgtatatcactaaaaaagggaaaccgacattgtcagtttcccttttttatttcgaaataggagtctggaattaaccgttaactcttttttctttgattcttgctttcttaccggtaagagcgcgcaggtagtacagtttagcgcgacgaactttacccaccttgttcacttcgatgctgtcgatagccggtgattcaatcgggaaaatacgttctacgcctatggttcctgacatcttacgtactgtaaaacgcttcttgtctccatgtccggcaatcttgataacaacaccacggtacagctgtacacgttccttgttaccctcgacaatacgatatgctactgttacagtgtcacctgccttgaagctcgggtgctgttttccggtagcaaatgcttcttctgcaattttaattaaatccattgtttttattattaaattgtttcatcgttacaacgcaacataccaggcttctctcttggtgtcctgacagcgattgcgcgaaagcggtgcaaaggaacgaattatttgccagatacacaagtgcttcaagctttttttcgccagttgggatgatttttgagcgtttcattctgctaaacgcaagtctaaataatcggttaattgtgtggctcagtcgcaaaagaaaagtatatttgtagcaatttaaaactaaatgaatatgaagaaacaaactttcagtctccttgcgggggcagtgttggcggttgcgcttctattggtttcctgccattcttcttacgaagtgaccaaggtagagggaggcagaattcccatgaactctgtctgggatgccgagccggatgccgaagccgtggctctgctggcgccttacaaggcccggatggacagcgttatgtatcatgtggtgggaaccgcagaaatgtcgatggacagattccggcccgaaagccttttatccaatctgattgcagatgtactgcgtgaggctgcggtggaagtgctgggcaaaccggccgatatggggctaatcaatatcggtggaatccggaattccctgacggaaggagatatcactaccgaaaacatctatgagatattgccttttgagaattcgctctgtgtgctgacgatgaaaggctctgccatgaagcacttgtttgaaaacattgcggtgagacttggtgaaggggtgagtggtatacagttggaaatcagcaaggatggcaagctgctccaggcttccattgccggcaatccggtggaggatgaccgtgactatacggttgccacgattgattatctggctgatggaaacgatggaatgacggctttcctgcaggcggataaaagggagtgcccggatggggctacactgcgcggtctgttcatgaagtatgtggagaagcagacggcagccggcaagaaggtgacttcgcgcatggagggaagagtggtcgttaaagagtaagcattaaaaaaacagaagttctatgaaacatatatattccttggcagccctgctgcttttcatgctccccgcatcggcacagcaagaggagcgtgtcattactgaagaacccctttgcctggtgtccgccgattctgtatcgtccggccaatccggaaaacaactgtttatcctgcacaccagcgatacgcacagccgtatagaacccatcagcgccgaggcggccgacgagtatgccggtatgggcggtgtggtgcgccgtgccggttttgtaaagcagtttcgcggcaagcatccggatatgttgctgctggattgcggagacatctcgcaaggcaccccttattataactttttcaaaggcgagctggaggtcaagatgatgaacctcatgggctatgatgccatgacgataggtaatcatgaatttgatttcggacttgagaatatggcggaattgttccgtatggcggattttcccgtggtctgttccaattatgacgtgacgggtacggtactcgaagggctggtgaagccttatatcaccttggtgcgcgaaggggtgaaaatcggaatcttcggcctggcccctaagatggaagggctggtgcaggcggataaatgcataggcattgtctacaacgacccgataaaggtggcccaagaaatgacagaccttctcagggagaaggagaattgcgaggttgtgatttgcatgtctcatttgggtatccgcagtgcaaatcccgaaggcgcttccgacgagaacttggtaggcaagacgcgtggcattgatgtcattttgggaggacattcgcatacttttatggaaaagcctgccgtttatctgaatgcggacggcaagagcgttcccgtgctgcacaccggaaagagtggcatctacgtaggagaaatggtacttactttaactgaaaaatagcatgatgaaaagactcaccctccttttatgggttgcaggattgtttatattgggattatcttcacttcacgcccagacgggaggcccgtttcttccttcggctgcagacaaccggtgccggcaatgggtggactccgtgttgtcaggtctgaatgtacacgaaaaagtggggcagctcatcgttgccaccattccggccagagcagacaaggccacgaaaaagcagatgcgcgagctggtaaagaaatacaaggtcggtggcttgctgttttccgaaggtactccggaagagcaggctatcttgaccaatatggcccggaaggatgccaagattcccgttatggttactttcgatggagagtggggactgtcaatgaggctgaaaggcgctccggactatccccgtaatgccgccttgggatgtatcgaggacaatggcctaattgaagaatatggacgtgaggtggcccgccagtttcgcgaattgggggtacacgtcaattttgcacccgatgcggatgtcaatacgaatccgctgaacccggtgatacacgtacgctcctttggtgagaacccgcagcgggtggcggaaaaggtggtggcatacagccgtgggctcgaaagcgggggcatactttccgtttgcaagcatttccccgggcatggcgacacggatgtggattctcataaggcgcttcctgccttgcactacgaccgtgcacgcctggacagtgtggaactttatcccttcaaggaaatggtacgtgccggattggggggtgtcatggtaggccatctgcaagtgcaggcgctggacccggatggggtgactccttcttccttgtcgcggaatgtggtgaccgggttgttgaaggatgaactcggctttaaagggctggtgtttaccgatgccttggacatgaagggtgtgtctgccattccgcaggtaactaccaaagcgctgctggcgggaaatgatatggtgctggtacagttcaatacgaagaatgcggtgcaggagctggtagatgcagtggagtcgggacaactgagtaaggacgaacttgatgccaagtgccgcaaggtattgatgtacaagtatatgcttggtttgagaaactgccagccgcaacttcgggtcagcggaatgagctatcgcatcaatacggaggaagcgcaggcgttggctgccaagttgcgccgttcggcagtgactgtattgaacaattatttcgatgtcctcccgctggcaccggtggaaggtgatattgccgtgctcagcatcggagagaaggaggcggatgttccctttgtggaagctatgaaaaagaatgcaggcatcagccatttccacttgccttggaatgccgatgaggctctctggcaggaagtgcaggggcagttggctgctttccgtcgcgtggttatcagcatcaccggttcggcttatgtcagcgaccgtgatgtggcccttctggaaggcttgaacctgcgtgctccgctggtctatactttttttacctcttaccgtacattgcaacctctgatgcccgcacttgccaaatccagcgctgtggtgctggcacattcggcagagacggatttgcagcaatacgtggctgatgttctttttgccaaaaagccggcctgtggcagaatgtcgatgagtatcggtaaactgtttccagcgggaacgggctgtatgattgaaccgggcatgaaaccggggaagactgttccggaagattacggcatgaaatcgtatgtgctgcaaagtatcgatgccgttgcccggaagggactggaagcgggagcttatcccggttgccgcgtgctggtgtggaaagacggactgccggtatatgacaaaggcttcggaacccactctgataaggataccactactgtccgttcttcggacctttttgatttggcttcgctgaccaagactacggctacgttgcttgccgtcatgaaactgtatgatgagggcaagataaaactggatgacaaggtttccgcttatctgcccttcttgcgcaatggcaacaagcggaacattaccatccgcgaacttttgttccacgaatcggggcttcctccctatatccgcttctacctggacatcatagacccgaattcggtacacggtccgtactcccagagttgggtggacgagtggcatcgtacgcaggtaagcgagcatagctattattgttccgattttaagttccggaaagggatggtgtccgacaagaatacaccggtctataccctgcacatggcagatggcatgtggctgaacaagagtttcaagaattctatccttcagcggatagccaagtgcgagttggatggcaaacgttatgtttacagcgacctcggcttcgtgctgttgcagcaggtagtggagaaggtgacggagctgccgatggatttgtaccttgcccgtgagttctatgccccgatgggattgcaacgtactatgtttctgcctttgacgaagttcaccaaagcggaaatcatgcccacggcatccaatgacttcctgcgtcgccaggatatatgcggatatgtgcatgacgagactgctgcctgcatgggtggggtgtccggtaatgcaggacttttctctacggccgaagaggtggcaaaggtttatcaaatgttgctgaacggcggtgaattcaatggcaagcgtttcttgagtgaggcaacctgccgtttgtttacgacggagaaatctgccatcagccgtcgcggtctgggattcgacaagccggatgtatccattgtgaagcgcagcccttgtgctccttccgctccggaagcagtatatggacataccggatttaccggtacttgtgcttgggtggacccggaaaacaagacagtgtatgtattcctcagcaaccgcttgtgccccaatgtatggaacacgaaactgggtgacatgaatataagaagagatatccaggaattgatttataaaagtattattccgcaaatcccctaaaaacaatctatctataaggaatgaagagaatatacctgcttgcctatatcactatattgtgttgtctttgtccgcttctgaaagcgcagcttggcccgatgccgtttactccggtgccgccgaacgacccttcgcttgtacgtctcttgaacagtgacgtgcggtgcaggcagtgggtggattccgtcatgcagcgtctgactctgaaagaacgcatcggacaactgttcatctatacgattgccccccagcaggacaaggccaacaaggaactgctgcgtaaggtggtggaggactataaggtaggcggtctgttattctccggcggattgatgcagaaccaggtgatgttgaccaatgaggcgcagcggatggcggaagttccgctgatgattacctttgacggtgaatggggactggctatgcgcctccgcggtactccgaactttccgcgaaacatggtgctgggctgcatacagaacgatacactgatttatgaatatgggcgcgaagtggcccgccaatgccgtgaactgggggtgcaagtgaattttgctcctgtagcggatgtgaatatcaatcccaagaatccggttatcaatacccgttccttcggtgaaagtccgttcaatgtggcgaacaaggttgttgcctactccaaagggttggaggatggtggtgtactttctgtcagcaagcactttccggggcatggggatacggatgtggattctcataaggcgttgcccgtgctgccttttacccgtgcccgtctggacagtatagagctttatcctttcagaaaagccattcgtgccggattgggaggaatgatggtggggcacttggaggtgcctaccatagagccgcaaaaggggctcccgtcttcgctttcgcgtaaggtagtttccggtctgttggtgaatgacctcggctttcaggggcttgtctttacggatgcccttgccatgaaaggggtatcgggcaatgaaagcatctgtttgcaggcgctgaaagccggcaatgatttgctgcttgtcccccggcgtattaaggaagaagtggaggctgtgcttgccgctgtgaaaaaaggggagctgacagagaaagagatagaggcgaaatgccgtaaagtactgaaatataaatatgcccttgggttggaaaagaaaccccatgtacagctttcaggtttggggacccgcatcaatactccgaaaacgcgtgatttgatgcgccggctgaacttggcggccatcactgtgctggataaccgggacgaggtacttccgctggacccttccatcggtgaagttgccgtgctcaatgtgggagaagcgcaggaaatccagccgttcctcaaggaactgtcgcagtatacccgtcctgtggagttccgtttgggcaagaatctgccggaggctgacgggaaccgtttgagaaatgcgctggccaagtacaaacgtattctggtctgtgtcaccgaacaccgtttgacgccctatcagaatttctttgcaaagttcgctcctgacgtaccggtggtttatctgttctttattcctggcaagcaggtattgcagataaaacaaggggacgctgctgctgaagcggtgattttggcacactcctccaacgaggaggtacagcggcaggttgcccggattgtttatggcagcgcttgttcagagggacgcttgtctgccagtatcggtagtcggtttgctgccggtgcgggagtgacgctgactcctcaaagcgccccccgctttgtacccgaagagcatggtatgaattcccgtctgctggctgaaatagacaagatagctgaagaaggcattcgtgaaggggcttaccccggttgccaggtggtggtgctgaaggatggcagggagatgtataataaagctttcggtacccacgtctggaacaagaccggaagcaaggcgcttcccgtaaagaagacggatgtatacgacatcgcttcgctgacaaagaccacagccacgctgcttgctgtgatgaagttgtacgatggcggacgcctcaatcttacagaccgggtgtcggattatctgcctttcctacaggatacggacaagaagaatattacggtacgcgaactgctgatgcatgaatccggtctgccttctaccttgctattctatcaggaagcgattgatgaagaaagctacaccggcactttgttcaaggcacgtcccgatgcccggcattccgcacgcatcggacggcagacttgggcgaaccctaagttccgcttccgtcagggactgacgtcgaaggtgcagacaccggagtatacgatgcaagtgtccgacagcctttggctgaaccgttccttcaagcaagagtacttgcagaagattgtggatactccgcttagggataaacgttaccgttatagttgtgtgggctttattttgttgcagcagttggtcgaggcgcgcaccggcatgtctatggacgaatatctggccaaggaattctatactccgatgggattggagcgtacggggtatcttcctctgcgcttcttgaagaaggaagatattgtaccttcatcaacagatcctttcttgcgtaagactaccttgcaaggatttgtacatgatgaatctgcagcttttcagggcggcgtttccggtaatgccgggctgttctccactgccggagaagtggcaaaagtctatcagatgttgctgaatgggggtgaactggacggtaagcgctatttgagcaaggagacctgcagggtatttactaccaccgtctcaaggataagccgccgggggctgggatttgataagcccgaccggcgtaatccccagaagagtccctgcgcagagtctgcccctgcttctgtttacggtcataccggtttcacgggtacttgcgcctggacagacccgaagaacggcttggtttatgtctttttgagcaaccgcacctatccggatgtgtggaataacaagttgatgaggctggatataaggacgaggattcaggaagctgtatataaggcgatgctgggaggaaaaaaataactgctagaattaaaaagagcctcccttgctcacgcaggaaaggctcttttcttcttcaattttgaaacaattaaattctatctgttaagctttaagtgtgtgtcttatcagaacgcaatacctacgcgcagaccgaaattgctcaaaccgtctacgctgtacgtaaagaggtcacctttgttcgtaccgtagctgtaataggctgcgaaatgcaagcccggtccataagcccaaggatacacattgaaaccaatttcaggagatacatagaaaccccatgtatccttgttggcttcgaatacgttgaaggttgacttcaactgtgcatattcagcacccagttttacaccggcatacggctggaatgcacctccacggttccatacatagcgggaggccagaccgaaaggcaactggaatgcagtgtgctgctggtcggtattcagactgccgccttcgcctacgggaagtgtctggcgaccgaaatactcatggttgctatggtagttcaagaaagctcccaatgcaaaattgtctgtcaggaagtaaccgccttcaaaattcataccccagccgcttgatttgtcggcgaagttgttgctgaggggaaagttatattgccagtcgatattggcataaccgttatcggtcatctgtgccttcgtcggtagggcgaagacgagagcaagagcggcaaccgcaaatactctcaaggaaagatattttattgttttcatactttgttcttgttttttggttcaatggcaacttcccagtccggaaaggatgctgccgtattattcttgttaccttaatattgggtaacccgtcatttgtcacttatagctcgtagcttgtcactacttgttagtcaggtaagttgattgagtgaaagcttggttcacaccttgcacggcaagtttggtattgacagaagtagaaccactcagcaagccgctcatatagctggtccacagaacaggaagtttctcgctctggccttgcggcgcctccagattcaacaattcgctgataaaggaaccggtgctgtaggaatagttcacggcatagggataataccatccgccccagttgccccagtaaggagcatcccagtagcctggatagttccaccaccattcgggacgtccgtagtcggtgaagtaataggtacttctgacatagcttacctgcaagccaaggtcggcttcttcccggtcatccacacggatgtagccgcggctattcatgttagtgacataagcgttgagaatttcctgggcattctcatctttccagtattcggcgttttccttatcaccgatgaccagaatgctgtccggcaagtaataagtttcgaaggttttgaaatccgccttcttgtcatagttggtataaaccagataattattgtccagcttatccatgtcagggtctttttcgcaagatgcaagcgtcactgcaaagaccgctaataataggggaataaatttcttcatacttttataattgtttaggtttaatataaattcctgccctatggtaccttaggcttttgtgagaaaaaacaagataggatataaaaggttcacgtagaggtatgttaaaagtgataaaggaatagggtgacagcacttttaacgtaactgtcaccctattgcacttatcatgtcattactttatccccctgtcatcttttccatatccgtgctgtccatcctcctccgggtgccatgtgtatgttcagcttgtcccccgaggtcacggtgcgtacttctttcttgtagtcggttgcttcccggtcggcattgatgccgtcggaaaagatttcggcttcgtaacttccttctccgaggaaggaaaggtcgatggtacagtcgcgtggtgtccagtcggtcatggaggcgacgtaccagacgtctcccttgcggcgtgccagtgtaaggtattcacctacttcaccgtccagtgccacggtctcgtcgaaaacggtaggcactttggcaatgaagtccgtgcattcctgctccttcatatatttgctggggctgtcggcaagcatttgcagcggggcttcgaagagggtgtatatcgccatctggtggacgcgcgtaccctggctcatcggatggtcgttgacggcacggaaggtttcgcgggttgcgttcatcatggctcccggtgtgtagtccatcgggccgacaagcatgcgcaggtagggagcagtcacgtcatagcgtgggaagttgtggaggggggctccgttcactatcggttcccatttggcgttctccaatccctttacaccttcaaagttcaagacgttgggataggtgcgctgtataccgtatggcttgaggccatgcaggtccaataccaggcggtgctcggcggcgtaggctacaatgcgttctacggactgtaccagtggctggtcgtcacggtcgaagaagtctatcttgaagcccttgatacccatctgtgcatagtggctgaatgcggcttccgtatctttggcagaatttcgccagcttgcccagagaatgatgccgacgcccttctggtttccgtaggctaccagttcctttaaatcgatatccggattcaggtctttcaataaggattcgtttccgctccagccgtcatcgatgatgatatattccaggttgttgtcggcggcaaagtcgatgaatgccttataagtcggggtgttcatgccggctttgaagtctacgccagtcaagttgcaggtgttccaccagtcccaagccactttgccgggtttaatccaggaaatgtctttgatgcggcaggcgggggcaagacgctgtgccatgtcattgtcggcaagctgcgtgtccttttcggtgacgagcaccacacgccaggggagctcctgcttggcacaacgggcgatgtagtctgcacgttttgtcggtatcaggttcagccggttgtgtccgccgattgtttcttccagcggatagggggcaaatgctgcctgcactccttgacgtgtctggggatttgcagtgaggaacatgccgggatagttttccaatccggcttccatgataacggctttctttcctccgtccaggcaaaccatcagtggggtgatggagagtgagtcggtgtgcattttggacaacggggcttcgtcgtagtaagactcgaaagagaagcaatagcgctcaccgttgcggttgtcgtttatgtaaggtacaaatgcctggtaatccttgtcgaaattgaagtccgcagtttcgttgaggacgataaacggcttgttctgttcggaaatgaagcgataggcagcgccgtcatcgtatgcgcggaactgtacgctgtagcctccgcggcatttcagtgtcagctggttgtagacatccttcacacttgcttttttatagaggggagtggggaaggaggactccacggacttgcgttctgcacggattacttttacatttttaccgaaagttattgctttcttggctgatttttcatctctgccttgcagggcgatggcagagggttgcagcaccgtggttccgtcgtgtgctatctgccaggtgagggcttctccggcatctaccgtaacggatagttttccgttgggtgatgcaagttggtattgctgtgcacggaccgtgcccaagcaaaggaataataaacaaaaggtttgaataaggaggcttttcatgttgatttatttttgaatgattttctttatcttctccagttcctcggcagagaagtctgtattttcagtcgctttcaagttatctgccagttgggcaacggagctcgctccgatgatgacgcttgtcaccaggtcgtccttcaacagccaggcaagtgacatctcggcaagggtttgcccgcgtgaggcagcaacttcgttgagtgccttgattttttgcagcgtctcgtcggtcagtgcttctttcttcaggaaagccccctttgccatgcgcgaatcttcgggaataccattcaggtagcggttggtcagcaggccctgcgccagcggggagaaggcgatgaagccggttccgttccctttggcttgctgcaggataccttcttcttccggttcgcggttgaagagattgtatctgccttgatagagcaggcagtgtacatcccgttcttccaggtatttgtaggcaaactcggccgcctctttgggatatttggagattcctacatagagtgctttgccttgccgtacgatatcaaccagtgcttgcagggtctcttcaagcggagtatccgggtcgtagcggtgggagtagaagatgtccacatactccaggttcatccgtttcagactttggttgaggctgctcatcaggtacttgcgtgagccccactccccgtaggggccgggccacatgtcgtgtccggccttggtggagatgaacagttcgtcccgatagggcatgaaggatttcttcataatcattccgaaagtctcttcggcggaaccgtaggaaggaccgtaattgttggcgaggtcgaaatgcgtgattccacggtcgaaggcatagtgcgccatggcctgggaattggcaaatgtgttcatgtcgccgaagttgtgccacaatccgagtgatatttccggcagcaggatgccgctttgcccgcaacggcggaatttcatgccgttgtcatagcgttcgggcgctggagaataaatagggtttatcatgatattgtattttgtgggttatcccattattacttctactgtatgcgtgcccggcagatggttcaccacattgccttctatcggctggccgtctactgtgacggacttgatgcctttgcacacaccatcgggattcttcacggtaatatgatattctgccccgcggaacctacgcttcacgttgaagcctttccagcctgccgggatacaaggattgatttccagaccttcatacgaaggcttgatgccgagtatgaattgcgtgatggcataccacatccaggcagccgttccagtcagccagctgttcttgccttcaccagggcgggcggcgtccttgccggccaccatctggcagcatacgtaaggttctactttatgcagggcactgtgctcttcggtgtacgacgggcatatcttgcggaaatactcccaggaacggtcaccccgtcccagtacggtttctccgatgatgacccacgggttgttgtggcagaagatacctgcgttctccttgtagccggcgggataggtggagatttctccatactccacaacatagcgggtgaagggtggattgttgagtacaataccgtgctcgcagtccaggcgttcctttacggagtccagcgctttttttaccatgccttcttccagtccgatgcctgccatggtgcaccagccttgcgattcgatgaagatttgtccttcttcgttctctttggagcctaccttgtggccgaagtaatcgtaggcgcgcagataccagtctccgtcccagccgtgtttttttacggcttccaccatattgtctatgtaggtttgcgctctgtttgcttcgtcgtctttacccaggcggcggcacagctccacgtagtcgcgtccgcataccacgaacaagccggcaatcatcagcgattctgcctggctgccttccgtctggttttccgtggtctggaaggattcattcggatcccaggagaagcagttcaggttcaggcagtcgttccagtcggcacggccgatgaggggcaacatgtgggggccgaggttctcgatgacgtggttgaaggagacgcgcaggtgctcgaacagagacacttccgaaccttctttgttgtcgaaggggacgggctcatccaggatactgaagtctcccgattccttgatgtatgccaccgtaccgaagataagccacatggggtcatcgttgaagccgccgccgatgtcgttgttgccgcgtttggtcagcggttggtattggtggtagcatcctccgtcggggaattgggtagaagctatgtcgatgattcgttcgcgggctcgttccggtatctgatgcacgaagcccacgaggtcctggttggagtcgcggaaacccattccacgaccgatgccgctctcgaagaaagaggcggaacgggacatgttgaaggtaatcatgcactgatactggttccagatgttcaccatgcgatccagtttttcttcgtcggtcttcacgacgtagatgtccagcaggcggtcccagtaggctttcagttcggcaaaggcagcatctactttggcggtagtgtcgaaggccgaaatcatcgccttagcctttaccttatttataataggtgaagagggtacactctgcttgaacgcttcatgcagagattcttcacgttcctcgaactttgcctcctgcttgttttccacatagcccagcaggaagatgaagtcgcggctttcgccgggttgcagttctacttccagatagtgcgaggcgatgggactccaaccgtgggcaatgctgttgcccggtctgccttctactacccgttccgggtcggcaaactcgttgtagagtcccacgaatgtttcgcggtcggtatcgaaaccgtctacgggtgtattgacactgtagaaggcgtagtgattgcggcgttccttgtattccgtcttgtggtagatgacagacccgtccacttccacctctcccgtggagaagttacgctggaagttctccatgtccgtagcggcattccacaagcaccattcggcaaaggagaatagtttgagttttctcactttggcagaagtattccgcaaggtcagcttctgcacctctccccaggtcttcagtgggacgaagaagagcaggctggcttcgatgccgtctttggatccggtgatgcgggtgtagctcatgccgtggcgacactcgtaactgtcgagtgcagtcttgcagggcttccaggtgggagaccatacgttgccgccttcattgatgtagaagtagcgtcccccgttgtccatcggcacgttgttgtagcggtagcgggtgatgcggcggaacttggcgtccttgtagaaggaatagcctccggcagtattggagatgagtgagaagaaatcttcattgcccaggtagttaatccatggccaaggtgtcttggggtcggtaatgacgtattcgcggttgtcgtcatcgaaatatccgaatcttttgtcttgcatattatttcttgtatttagtttgatacattcttcattagttgtgccatccggccattttcccggaagcacgcttcaaatttaaaaacttttctcctatcacccttgtttgcccggcgtgttttttcccctcggaaacatgaagtaccggaaaatgatacaaaagtatcaccgcacgaatctttttcgctctatctttgtaaacacattttatgattaaccgatatgaaacacttattcgcatttctgttccttcttggaattaccttttctctttctgcccaatccgtccgcgaacgtattttgctggacgacggctggcagtttgcttttggcaatgcttcctcaccggagaaagacttcggctgcggaacggagtacttcaactatctgaccaaggcagcctctatccataatgagggcccttactcccccaagttcaatccggagaagtggggtgtggactggaagacggtcaaccttccgcatgactgggtggttgatttgccttatgccaaagaggcgagccacagtcatggctataaagccgtcggctataaattccccgaaaactctgtgggatggtatcggaaaagtatcactgttccgcaagaggacctcggcaagcatctttatcttcagttcgacggtatcttccgtgatgcccgtatctggataaacggtttctacctgggacacgaacccagcggctatgccacgcaggtatacgacattacggaatacctgaattacggagaagagaatcttatctgcgtccgtgcggatgccacgctcgaggagggctggttttacgagggtgcgggcatctaccgccatgtatggctgaacaagacggcgccgttgcatgtagctcctttcggcgtatttgtatcttccacgctggaagctcctttcgacaaggctgtgctggtgaccgaagtgcagatgaagaattcgggaaaagaccccgtctccggcaaagtatggtgccgtctgcttgatgccgacggacaagtgcagatggaggacgaggcggaagagataaccctgctgccgcaagaaacgcgtagcgtaaaggtgcgtaccaaagtgctgaatccccagctatggagtacagaacatccttacctttataaaatggaaaccagcgtctggcaaaacggtaggcaggtggacgtggtggccaccccgattggtattcgtgacatccgcttcgatgccgacaagggcttcctcttgaacggacagcctctgaaactgaaaggtgtgaacatgcaccaagaccaccccggagtaggtgccggcattcccgatgccctgcaagtgtaccgactgaaggaactgaagaagttcggctgcaatgcctaccgttcttcccataacccgatgactcccgaaatgctcgatgcctgcgacagcctcggcatccttgtgatagaagaaaaccgtctgacgggtgtcaacgaggaacatactcgcctgctgaaacgcatgatagaccgcgaccgcaaccatccgtgcattatcctttggagtgtaggcaacgaggagtggggcatcgagtggaaagaaagcggtacacgcattgctgccacgatgcgcgaatattgccaccgtttcgaccctacgcgcctcatgaccgttgcttcgagcagtggccctgccattttgattccagcagacgtggccggttataactacatccttcagaatccagtagagcagcaccgcaaggattatcccggccgccgtgcgctcggttcggaagagactacgggctgtggtacgcgcggcatctacttcgatgcccacgacaaaggccacatggtggcgcacaaccgcaagccgaacggacctgacagcctgctgaactgcatcgagcgtggctggaaattctatgacgaacgtccctatttggcgggtcttttctattggacgggtttcgactaccgcggcgagcccaaccccatgaagttcccggctacgggttcacaattcggcattctggactactgcggtttccccaaggacgaagcctggtatctgaagtcctggtggacggatgagccggtgctgcacatccttcctcactggaatctgcaaggtcacgaaggtgatagcatcgatatttgggtatacagcaactgcgatgaagtggaattgactgtgaacggcaagaaactggatcgcaaaccgatgccccgaaacggccatctttcctggaaagccgttttccagcccggtgcagtgaaggctgtaggctataagaacggcaagaaaatattggcctgtactgtggagactaccggtactcctgcccgtatctccctgacggcagaccgttccgtcattcaggcagacaatcgggatgtggcagtgtgtaacattgagttgcaggacaagaagaaacgttttgtccccactgcctgcaacgacttgacgataaccgtctccggtccggtacgcatccttggggtggggaatggagaccccgcttatcaggctacggaacgtccggccgacgccgatgcccgcacctatcaggtaaaggcattcaacggacttgcacaggtgctgttgcaaagtaccggcgaagcgggagaagccacactgacggtcgtttcggaaaacctgccggaaacttcctgcgttttgaagctgcagaagtaagcagcttatcattcatatcatccggcgaagcggagacctttcttttgtctatggggcaagagagggatctccgcttctttcttcctcaaactatagtgtgtaagtgtgcgagatgcgcatctcgtgttgtatgagatgtatatctcgtacagcatgagatatacatctcatacatccttacattagagcctgagggggagaagaacggaagttttgcttttccgggtgggactttcccgggtatctgctcatatataacaattattacctctaaatgtaacaaatggtactgttgtgggattaaaaagaatgagtatatttgtggcatgatatttttttaaccaatgcctatggaaaaccagaactatatcatgagggagataacccctctgtcggaacgtgactgtttctatattgccgatcgtcgcaaaacagaatttacctaccccatccattgtcacgcagagtatgaactgaacttcacggaacatgcttccggcgtacgtcgtgtggtgggcgattctgccgagattatcggtgattatgacctggtgctgataaccggtaaggagttggagcatgtatgggagcaacatgaatgtacctccggggatattcgggagattaccatccagttctctcccgacttgttcttcgggaacgttgtcaacaagaaccagttcgacagtatccgtcggatgctggagcgtgcacagtgcggacttagtttccccatgcaggccatcatgaaggtgtacaactggctggataagctggcttccgaggagcagggcttttatgccgtgatgaactttctccgtatcctttacgaactttccctctatgacaatgcccgggtgttgtccagttcttcgtttgccaagatagagactttctctgacagccgccgggtacagaaggtgcagaaatacatttccacccattatcaggaggatatccggttggcttcattggccgatatggtgggcatgaccccggtctctttcagccgtttctttcgcctgcgcaccggcaagacgctttccgactacattattgatatccgtctgggctttgccacgcgtatgttggtagattccacgcgtaccattgcagaggtgtgctatgactgcggcttcaacaatctgtccaatttcaatcgtatgttcaagcggaagaagggatgctcgccgaaggaattccgtgagaattatcggaaaaagaagctggtgatatgataaaaaagtattggtattcttcattgaaagtgcctatttttgcaccgatgattaatactaatatctgatatcatgaaaagagttttttccttattcttatgtctgctgtgtgtatgtgctgtgacggcgcagatacgcggcaatgaaattcgtgtagtcgtttcacccgaccatagcgattgggtgtatcgtctgaatgagaagtgtacgtttaccgtccgggtgctgaaggcacagaacctcttgcccgatgtcaagattgactatgaactgggccccgaaatgtatcctactgaagtaaagaaagacgtggtgctgaaagatggtaccttgaagttgcaaggcacgatgaagactgcaggcttcttgcgctgcaaggtcaaagcgcatgtggacggccggacttatgaagggctggctacatcggcctatgctcctgagcagctgcaacccgtgacgaaacttcctgccgattttcaggattattgggccaagaccttggaagaggcgcgcaagactccgttgaatccccttatgacgctgcttcccgagcgctgtacggaaacggataatgtatatcaggtcagcttccagacaaaagcttggggaggacgtttttacggtattctcagtattcccaagaaagaagggaagtatccggctttgctgcgtgtgcccggtgcgggtgtccgcccttatgcgggagatacgtatacggctcctggaaaggtaattatattggaggtgggtatccacggaattcccgtcacgatgcagcagtctgtatatgatgcgctggcaggtggggcgctgagcaattattggatgttcggccgcgacaatcgggatgcttcttactataaccgtgtggtggtaggcgctttgcgtgctgtggattttatctgttcgctgccgcagtacaacgggaaagcgctgggcgttacgggctccagccagggcggtgccttgtctgtgattacggcggctcttgattcacgcgttactttcctggcggctgttcatcctgccctgtgcgaccacgaagcgttcttcaagaagcgtgcttgcggctggccccattatttctattattatggtgctcccgatgaaaagcagcttgaaacggtgcgctattatgatacggcaaactttgcccgcctgctgaatgtgcccggttggttcagttgggggtataacgatgaggtctgtcctcccacttccatgtatgcagcctacaatgtgatttcttctccgaaggaactgcatccttatctggaaaccgggcattactggtatcaggaacagtgggatgaatggctggactggatacggagacaacttaatgtgccaatgtgattaatcacattggcacattaatctgataatatagtatcattttttatgatatgagccgcgtatctttgtgtatcgcttaaaaactgataatatgaagaaacaattccttttgctgacagtacttttattccttttgggggcatgtgcccctaagcctgcggagcattcgtttattaaggtcaatgccgatggacagttcgttcgcgacggaaaaccctattattttgtaggtaccaatttctggtacggtgccattcttggttccgaaggtgaaggcggcaatcgtgaacggttgcataaggagctggactttctgaaaagtattggcatcaacaacctgcgcgtattggtgggtgctgacggtgaaaatggcataaagacgcgggtagagccctctttacaagtggcaccgggcgtctataatgatactattttagccggattggattattttatgaatgaactgcgtgaacgtgatatgacagctgtcctctatttgaacaattcctgggaatggagcggtggctattccgtttacctgcaatggtccggacacggtgatgccgtggtacctgccgtagacggatggcccgcctatatggagtatgtcaagcagttcccccaatcggacagcgcgaaggccttgtttgccaatcatgtcaattatattgtttcacgcaccaataggtataatcagataaaatatgtggatgaccccactattatgtcttggcagattggtaacgagcctcgcgctttctctgacgagaacaaggaaccgtttgcccgctggatggccgatgtggctgcacaaatcaagtcacttgacccgaaccacatggtgtcttccggcagtgagggctcgtggggatgcgaaatggatatgaatcttttcgagaagattcatgccgaccccaacatcaattatctgaatatccacatctggccttacaactggagttgggtgaaggcggacagcctgaaggaacttcttccgcgtgccaaggaaaatactaagaagtatatagatgaccacatggtcattgctcggaagtacagcaagccgattgttttggaggagttcggttttccccgtgacggtttcagcttttccaaagaggcaccgaccactgcccgcgatgaatattaccgttatgtattcgacctcatccgccaggaccgtgagagcggcggactctttgccggatgcaacttctgggcatggggtggttttgccggacaaaatcccgaccatgtattctgggaaaagggagatgactataccggtgacccggctcaagaacaacaaggactgaactctgtctttgccacagacagcactattgaaataattaaagcggaaaaccggaagctgcaaaattgaacctatccgtgcttttccgtgtaatccctgcctgaaaattagaatgtaagcgtgtacaaagcgtttgtaccgttatataagaaagattattactctaaatactaagtatgatatgaaaagcatatggaaagttatgttggcggtttgttgcctaggtatgaccattggttgtggaacaaacccgtcgaagaatgaaaatgtaaaggaaacgctaccggcattggtggtcaatggtacgcagttgatgaataccgaaggagacacggtggtattgcacggtgtcagctatggctggcatcagttctggccccgtttctacaatgcctcttcggttgcttatctggtcaatgactggggcgcacaagtgcttcgggcctctatgggagtggatttggatagcgcctgctatgtgaacaagcccgaattcggtattgagtgtgttacgaaagtggtggatgctgctatcgagaacggcgtttacgtcatcatcgactggcatagccacaatctgcggcaggaagaagcaaaggagttcttcacccaaatggctacccgttacaaaggggttcctaatgtcatctatgaggttttcaacgaaccggtggaagacagttgggagcaggtgaaggcatactctgtggaggttatcaagacgattcgtgccatagaaccggatgccgttatcctcgttggttgtccgcattgggaccaggacatccatttggcagcggacgatcctattaccggatatagcaatataatgtatacactccacttttatgccaacacccacggacagtggctgcgcgaccgcgccgactatgctctgggcaagggcttgccgattttcgtttccgaatgcgccggtatggaggcaagtggggacggccccatcagtaaagaagagtgggggaattggctggactggatgcagcggcattccatcagctgggtggcctggtctttgtctgacaaggatgagacttgctccatgttctatccgtcggcttcttccgagggaaactggaaagatgcagatatgaaggaatggggaagaatggtacgggacgaactgaagaaatgaccctttcgggaaaaagcaatatgatttaaccattaataatttaagaaaaaaagaattgtgcctatgggaaaaaaggaaaaacggaactatgaagacatggactgtttggaagtaaacctaaatgtcaaggctgtgatagtatatcagggctttttgactcagtctcatttttgttaactaaaaaaatcttcttttgggaggttttgtgtttgttttaaatctaagaaatacagtatgaatttgaattttagaaagacagcgctgcttgcggggatatgctcggtgttcagtctgggttatgctcctcagcttttcgcagtatcatcgacggataccgttgaggcagtgcagcaaacaaagaaaattacgggtgtcgtcagtgatgctatgggccctattatcggtgccaatgtattggaaaaaggtacaacgaatggtgtaattaccgacattgacggtaactttgccttgaatgtgaaaccgggagctaccattgtagtctcctttataggctatgtcagccaggaaataaagataacgaaccagacaacagtgaacatcacgctgaaggaagactccgagatgttggacgaagtggtggttgtggggtacggtacgatgaagaaaagcgacctttccggtgcttccgtttccatgagtgaagacaagattaagggttctattatcaccaatctcgaccagtcccttcaagggcgtgctgccggtgtgacggcagtcagcacttccggtgctccgggttcttcctcctctatccgcgtacgtggtcaggccactatcaatgctaatgccgagccgttgtatgtaattgacggtgtgattgtacagagtcagggacaaagcggttcatcttatggtttgggcgatgcactgggtaatggctcggtttccaccatttctccgctttccaccatcaaccctgctgatatcgtcagtatggaaattctgaaagatgcttcggcaaccgccatttacggtgcgcaaggttccaatggtgtggttttgattacgaccaaacgtggtaaggcgggtgaggctaagtttacttatgacggtatgtttgccgttcaacgccagacaaagcgtctggatatgatgaatctgcgtgagtatgccatttattataatgatttggcaaacatgggtgaaatctctgaccctagtaattattatgccgatccttctctgctgggagtaggtacaaactggcaggacgccatcttccagactgctttgcagcatcagcaccagatttcggcacaaggtggtacagagaagatacaatactacgtatcagcttcctatatggatcaggacggtaccatcatcggttcaaactttaaccgttacagcttccgtgccaacttggatgcccaactgaagaagtggttgaaactcggtttgaccgccacctatacagcaacgggtgatgacctgaaactggcagacagtgatgaaggtttgattaactactcgttgaccactcttcctgatatacctatctataatctggatggcagctatgccaccgttgttcgcgaaggctacacgaatcctaacccgattgcccttgccatgatggatgacattctgctggaccgtcagaaactgacgggtaatattttctttgaggttactccgattaaaaatctggtatggcatgccgaattgggttatgacatcagttccagcaaaggtgagcgctacaagccgatggttgatttgggtggatgggtacgttccagtaatgaaagcaatatccagaaaaacagcagtacattctggcaattgaagaactatgtgacctattccggaaacataggcgacaagcatcattatacagccatggtgggccaggagtgctgggagtccagctatgacttcacgagtgtgttcaatagcggtctgccttcggatgaagtgcacaatcctgccttgggtacgggaaccccgactatcaatgcaggttttggaagctcgtctatggcatctttctttacacgtctgacttataactatgccgaccgttatttgggtacttatacctatcgttatgacggctcttcaaacttcggtcccgagaaccgttgggcaggcttccattcattggctacttcctggcgcttttccaacgaaacgttctttgaaccgttgaagaaggtcatcagtaacggtaagttgcgtctgggatggggacaaactggtaatgccaacatcggtggttatgcttggggtacatccatgagtcgtatgccttccggtctgggtatggggtatcgcccctccaatataccgaatacttccatcaaatgggagtcccaggagcaatggaacgtcggtgtggatttgggattcctgcacgaccgtatcaacctgacggtagagtggtacaagaaaacttccagtgatatgttgatgccgttgcagttgccttcttatatgggtacttccggtaatgcctcttctgcattggctgctccgaaaggtaactatggtgacatagagaataccggttttgaaatctctctgaacacacatcctattacgggtaagtttgaatgggattctgacttccagatttctttcaacaacctcaaatccgcaactacgcgcctaatatgatacagaagcgaaaagaatctgcatcgttagtaaaaagggggcacagtgcatcgaatgtcaccataaagacatataaatgccccttaccccaccatgcgacttgaggcaatacgcaaaatcacgactataagttgtcggtgttatccaaagtcattctggaacacattggcataagcattgttgcatgaatagatattcagcacatacttccttgatgtcctgacccatttggctggcacagagatgaacttaaagacaaacgtcttgatgcggcttgttgctttgagtccgaacctcttcacgtcaagcctcgccatgatgaatttatagaagttgcgtatgagtgccataagcagaagaaacaccgtgttttctcccataaaggattttggaagcctgttccagccgaatccgttattcatatcatcgaagatgcgttccttccctccacggaggttatagaattcgacaatctctttctcggaagactcgtagtcatttgtaaggatgcagcggtaggtgtattctccttcccacaggtcgagttcgccgtctatccgcttctgtctttgaatcacaagacggtatgccttccctttccatttctcgatgagaatggaggccagctcaaactcaatgccgcccaattccactttcttccaacctctgagggcaaagatgtcattgtagagcgaactgcatcggttagcacggatatagaaggtcttgcagtgtttagcaatctcttccactatctcttcagaacacgagccgcaatcagctctgaaacggttgataataagcttgttttgttcaaacctttcaaagaacctcttcagcgtgtccttctggtggaaacggacatttgtgttgccgtcgctgttctcaatgccgacaatcaagttgccaataaccgccacgccagggcgataaccaaggaacttcttgtatgtaggcttcgcatcaaacttctcagcctctatgaactggtggtcgaagtcaacgtcatacccctcgccctctttcagctgccctgtggacaataggcaattgaggagcagtgtattcagcttgtctgccgtgttgaagtcgtaggtcttgccagtgtcggatgtgtaggaaatgttatcctgggtcagttcctttatggctctaagaatcgtgtcggcactgcatgtgcgaagtgtcggatgaagcgaaaggtggtacatcagatgagtggtgacatcctcgatgcatgagccgccacaaaaataaacgctcataagcgaacggatgatttcgctgtattgataaccatacagcctgcatctcataccgagggttgagtcgattacagatgagagtctggagtcaaattgctccattattgaaaatattcctccaaaaggagtgagtttctcggatttaattgctacctttgccatgtctgtcgggtttgatacatattttgatttgcaacactaagataggtgaaaaatctgacatggcaaattcctgagcaactttttgttgctcaggtacttaaaaagttatatttgtaatagtgttgcggaattaaggaacaagaacaaactgaaaggattggctggtacagccaatgcgcagattgtgggttacggacagtggaccgatgtagtcagtgtatccagtgtaggcgaatcactttataacttctatggatttgtttgtgatggtgtttacaaggacctggaggaccttcagacttctccgaaacctgccaagtacccggcaaacggtgtattcgaccgtaccaataccgtatgggtgggtgatgtgaaatataaggatatcagtggtcctgacggtgtgcccgatggcgttattgacgactatgacaagaccaatatcggttctccgatgcctaagtttacttttggctggaccaatactttccgttacaagaacttcgacttgtccgttttcatcaacggttcctatggcaacaaggtgtacaactacctttccatgaagctgacacatatgaactctccctggactaaccagctgaatgctgtaaacggacgtgcacagcttgttcctatcaatccgaacaaggtctacgaagatggaacgatgtggtataatgatgtgtctaacgtcatggtggcaaacccgggagcttccattccacgcgccactatcaatgacccgaatgacaacgaccgtatcagtgaccgttatattgaagatggttcttatatccgtctgaagaacatctctttgggatatactttcccgaaaaagacgattgataaactgggactgagcaacttgcgtatctatgccaatatccagaacctgctgaccattaccggttatgacggctatgaccctgaaattggtgccagcacttcaagcgtcaatgtctatggtttggacaacggacgttatccgtctcctacagtttattcattcggcttgaatgtttcattctaacactttaaattgaagaaaacatgaaaatcagatatattaaatattgggcgtttgcagctgtactcggtatgggaacagtttcatgcgaggatttcctgaaccgtcctaccgaagacaattataacgaatcgaacttctatcagaatgacgaacaatgtgtgcagggggttaattatctttataactcaccttggtatgactttcagcgcggttttattaaagtcggtgaaatcttgtctggaaacgtatacgagggaaacagcccttacttgaattttacggtgaatggtacggatgaaaaccttgtgaacatgtcctattctctatgggcagtgattggccatgccaatactgtatatactcgtttgaagacggcaaatgcgtcagaagcagtgaaaaatcagtgtatgggcgagtgtctggcatggaaagccatggcttacttctatttggtacgtagttttggcgcagtacccattatccatgataatacggacgaattgaattccggtaattataactccaaattcaaagtggaggcagcagatgtgtacgaatatatcattatgactctggagaaagctatggagttgcttccggccagaggtgaaacgggacgtattgaccgctattgtgccgaaggtcttttggctaaggtgtatctgactaagagtggcctttccggtacccgcaatgcggatgatttggcgaaagcggcagaatattccaaggatgtaattaataattccggccgtaacttgctggctaactattccgatgttttccgtttggcaaacaacaagaatgaagagtgtctcttctcctggcactggtcggcaggacgtgacccctggacacagcagaatacgttgcagtcggacttggcaatggtgggattcgatgaatttggtgattgctggggcggctatgcaggtccgtcggttgatttgcaggatgcatttggaatttccgctttggaaagtcctgagacgcgttcggatacggatacccgtcgtaaggctactatgatgatggcaggtgatgtatacgattatttctggcaggacaagggcggatttgattatctgcggtttatttatgatgccgaatatgggaagggaggacctaatggcgattaccagtctcctaccggtgccaatcacgtgaagcatctctatggtaacaataatgaccatgtattgggcttgggcgtatcggctggtaatatgtacagcggcctggcaacccatatcctgcgcctgtccgatatctatctggtatatgccgaggcgaaaattggactggctacctctactacagaccagagtgcactggatgctttcaatgcagtacgtggccgtgccattccgggagttactccgaaaacctccattacttgggaggacgtctggaaggaacgccggctggaactggcttgcgaaggcgaccgttggtatgattatgtacgtttggcatattatgattcccagcgtgctatcaatgagctgaaggcacagcgccgtgatgtttattatagtctgggtactacttataaggcttattatgaaaacggcagttggacggtgaatccggacgagacccgttacaatccggatgcaaaggcgccgaatgtgacagtctccagctttacattgccgttcccgacagaagacgtggtgttcaatcctaatttgatgaaagacccggtacacgtagatgtacgttctgaattcagttattaatttaatgcttgaaaagatgaaaaataatagatatacgaattggttcttcgcggcagctgttgttgtagcaggcttttccatggcggcttgtgaggatgaaccggataaatatgaagtggcagggggaaagcctaccttgaaatatgttcgtgtccctgatccggcagcggcagactctttgctgacgggggcttatatggcgaatacgatttgtctggtcggtgagaatttgcggagtgtttacgaactctatttcaatgaccagaaggcgatacttaataccagttacatcactgaccatacacttatggtagatgttccgaaagagattccttcggtagtgactgataagatttatatggtgaccaaagcaaaggataccatagattatgatttcaaggtgttggttccggctcctaccgtgaactccatttcttgtgagtttgcaaagccgggtagtgaggtgacactgattggtgactatttcattgatgacccgaatgtgccgctgaccattacgatggccggtaatgtggaagtgactaatattacgaacataaccaagactgcggtcagctttattcttccggacaatgctcctgcaggctatatcaacgtgaagtccatttatggtaccggacgttccaagttccgctattatgatacacgtaacattctctttgactgggacggttctcatggcggtatggctattgcccacggttggcgcgatggtagcaaggtgttgagagaagccgatgaaaacagtattgacggtgcttatatctgtctcaccggagcacttgacggtgctatcggagctacttgggcagaagatgagttctcgttcaactattggccggaaccgtctgccggttatcccgaactttctgcacgtcctgagtttgcagaactgctcgaggagtatggcgtcaatggcttgcaactgaaattcgaggtgaatattccttcttccaatccgtggcagtcttgcgctctacaagtgatgtttacgggtaatgatgtggtgacttatgcgacgggaactaatgcttattttagtgatacgaatgtgccgcgcggtttgtggttgccttggaagaatacgggttcgtatgatacgggtggtaaatggacaaccgtttccatgaatctgtccgagttcaacaagacgcatgaaggtaataagtgtgatagaacttttgacaagactatgctgaccggattgacattctttgtctgggcaggtggtgtggaaggtaaggattgcaatccggtgattatgattgacaacatccgtgtggtacctattgaataaccttttaaatagaatactgatatgaataaaacatataaatttccggcactgtggatgatgtgcctgatgctcttcagttgcttgacgtttacggcctgcgacaatggggatgatgaagataccaaccaatataaagggggaatcagtctgaatgtattcggaccgagtcccgtatcccgcggcggtgtactccgtttcctaggcagtggcatggataaagtgactgcggtcgctatttccggttgcgacgatataacagacatcgaagtagtcagtgatacggaaatccgtgtcactgtacctcagacagcccagccggggttggttgtcttgaagactccgaaaggggatattacaacaaaaaccgagttgacatttacggagccgattgctttggaggcttttgcaccggcagaagtaaagcctggtagtgaattgaccattactggtgaatatttgaatttgattaaagaagtgatatttgctgacgaggtaacagtgcctgctgatgagtttgtcagtcaaagccgtcaggagattaaagttattgttcctgattctgctcagaccggtaagttcatcttgtctgatggagctgaaatccccaattggatttattctgaaggggaactggaggttactttgccatcggtagaggctccactcgacctggtagataagaagccgggggatgtcattcgagtttctggtgaaaactttgatttggtgaagaaagtgcagatgccgaatggggatgaagttgaatttacgatgactgcctcttccgaaggagatgaacttacttttacattgccggataatgtctcggacggagaagttacggtacttcctgcttcggatgtaaaagttgtggttgctactgttgtagtagctacgccttcgaacgtagtggctgttcctgctgtgaacttgcgtggtggagatatgattaccttgaaaggtaccaatatggatttggtgactgatgtaacgttccctggtgtagaagaagcagtaggattggaatcacaaaactcgactgaaataaaggtcttgatgccggctgcggctattagtggtgatttgcaattgaatacaaatagtggaaaagcaactgccgtatctattgcaacggcaaagccggaaaacatttcttatagtgcggcgacggtcccggcaggagaggctttgactgtcaaaggaataaatatggatgtagtttcggctgttgtattcagtggtaatgtggaagttaccgtatccgatgccactgctactgccatttctttgactgtacctacaactgccgaaactggggccttacttttgaaaatggccaatggtgaatctgtggaagcaccgtctctgacaatagagaaaccggtatgcgcctatttgccggcattgcctgacaaattggttcggggacgaattgtggaacttgagattgttaatgctgataaactgacaaatgtattgctgaatgaggcttcagtccagtatatcaatgatgcggctaaaggggtattgatgttgaatgtaccggctgaactggatggaacttatagcctgaaactgatttcttcaaatggtgaaattgcttatgatgttcttgtagttgccaatgaagaaacagtttgggctggtccgctcgatattagttggggtgatggaggacgtgtattggtaccggctgcatcttttgccaaggtaacggcaggtactgtcatgaaagtctatttcgatcagaaagaccagacttgggcacaggctcagtttaattatggtgattggagcggtattacgttctctttgtttaatcagactatggtaccgaccgacatttacggctggagtttcgagagccgtgtgatggagttgacgttgactcaggagatacttgataatattcaagctaaacaaggagattgtgaagaccagacaaatgtaggtatcattattcagggcagtgatttgacgtttacaaaaataacgattgtaaattgatgaattgtggcttgaagaatgtgactatggatgccctgattaagaatgaaataaaatcataattaagatgaagaaactgaatataaaatggatgctttcgttgatagcagcttttacttttgcctcctgcgatactgatgtcgatcatgatatcccagcagtggatacaccggtattggtgtctactactcctgaaagtggagcagccaaagtgaaaacgggagaaatcactattgaggtgaaatatgacaagaatatattctttgcaacagacaatctgagcgaaatcaagtttaccggtggtgaactgataagtgccgatgtacttggcgcaagcaatatactgactgtaaaagtgaatgttcccgggagagagacggcttgttctctctctatccccgagggaatagtaaccggaccgaaccagatgcctgctccggctgtatcggttcagttctctactgtcgctttggacaaggcactggttgccgctagttcggccaaagctgtgaaactgtacaattatctattggataacttcgagacgaagacactttcagctatgatggccaatgttgcctggaatacggaaatgtccgaaaaggtgtatggatggactggaaaatatccggctatcaactgtttcgactatgttcatctgccggcatctgtagctggagcagactggattaattacggtgacattactcctgttaaggattggtctgacaaaggtggcatcgtagctgccatgtggcattggaatgtacccaagaaagctgtaggcgaagcttcttctacccaaatatgggaaggagagacagtaatgccgggtgattggagtggaaatgtacagatgacggatgatgctgcaaaagctgtctttgctgatgcacaagtgggtcaggtgatacgcgtggctgtgaaggatgtggcagcgggtgcacaaggttcgttcaaaaacagtggttggagcgagattgcttcaggaactgattattttgacatatccggggactatacattggtgattaccgaagatgttttgaaatccctgcaagaaggtggtctcatcattggtggacatgattatacagcagttgctgtttatcttgaaaataacggtacagctctcgacccgaataaggattatgccttttataaggcagatacggagtttgatgctgccaatgccacagtggaaggcacttgggaaaacaaggtgtttaccgaagatttgaaaaatgctgccgcttacttgaagctattgagagatgcggatattccggtattgtggcgtccattccacgaggcagccggtggctggttctggtggggtaaggatgctgccagctttaaatctctgtggattgctatgttcaattacttcaagactgaaggattggataatcttatctgggtttggactaccgagggcaatgatgccgattggtatccgggagatcaatatgtagacatcgtgggacgtgatgtttataataaggaaactgcagattgtgtttcagaatatacttccattgccgaaaattatggaaacaagattgtttcgctgagtgaatgtggtacggtcggacttatttccaaacaatgggcatctggtgcacgttggagttggttcatgccgtggtatgacgggacaaatgaggatggtagcccggtagtccatgctgatgaagcatggtggaaggatgctatgagccaggaatttgttgtttcccgtgaagatcttccttctatggaatagcatttttaataataaaatgggaagggttgtctctggttagtatcggggcaaccctttctgtcttttatagcttttagttgttggttatggaattcatgctttatactttttaggaaaaatagtaatggatgttaaatgagtgccgttatttgataaaatagtattataaggtttgctgctaaaagtctacttttgtcaagcctaattaaaatttgataataatcatataatgtttaaccgctaatgaaatgaaaaatgcctatgagaaaggagtgatatgtataccaaccactttatagaataaggtacctcaaatccgcaactacgcgcctaatatgatacagaagcgaaaagaatctgcatcgttagtaaaaagggggcacagtgcatcgaatgtcaccataaagacatataaatgccccttaccccaccatgcgacttgaggcaatacgcaaaatcacgactataagttgtcggtgttatccaaagtcattctggaacacattggcataagcattgttgcatgaatagatattcagcacatacttccttgatgtcctgacccatttggctggcacagagatgaacttaaagacaaacgtcttgatgcggcttgttgctttgagtccgaacctcttcacgtcaagcctcgccatgatgaatttatagaagttgcgtatgagtgccataagcagaagaaacaccgtgttttctcccataaaggattttggaagcctgttccagccgaatccgttattcatatcatcgaagatgcgttccttccctccacggaggttatagaattcgacaatctctttctcggaagactcgtagtcatttgtaaggatgcagcggtaggtgtattctccttcccacaggtcgagttcgccgtctatccgcttctgtctttgaatcacaagacggtatgccttccctttccatttctcgatgagaatggaggccagctcaaactcaatgccgcccaattccactttcttccaacctctgagggcaaagatgtcattgtagagcgaactgcatcggttagcacggatatagaaggtcttgcagtgtttagcaatctcttccactatctcttcagaacacgagccgcaatcagctctgaaacggttgataataagcttgttttgttcaaacctttcaaagaacctcttcagcgtgtccttctggtggaaacggacatttgtgttgccgtcgctgttctcaatgccgacaatcaagttgccaataaccgccacgccagggcgataaccaaggaacttcttgtatgtaggcttcgcatcaaacttctcagcctctatgaactggtggtcgaagtcaacgtcatacccctcgccctctttcagctgccctgtggacaataggcaattgaggagcagtgtattcagcttgtctgccgtgttgaagtcgtaggtcttgccagtgtcggatgtgtaggaaatgttatcctgggtcagttcctttatggctctaagaatcgtgtcggcactgcatgtgcgaagtgtcggatgaagcgaaaggtggtacatcagatgagtggtgacatcctcgatgcatgagccgccacaaaaataaacgctcataagcgaacggatgatttcgctgtattgataaccatacagcctgcatctcataccgagggttgagtcgattacagatgagagtctggagtcaaattgctccattattgaaaatattcctccaaaaggagtgagtttctcggatttaattgctacctttgccatgtctgtcgggtttgatacatattttgatttgcaacactaagataggtgaaaaatctgacatggcaaattcctgagcaactttttgttgctcaggtacttaaaaagttatatttgtaatagtgttgcggaattaaggaggtatatttaatttttcctcaaaaagagaagtttaaccttatattaaacggtagatgccgccaggcaataccaattcattaatctaagtaaaatacaagtatgaatttaaatttcagaagaaccgcgctgctcgtgggtatctgttcggctgtcagcctgacttatactccgcaacttttcgccgcatcggtcgatgcaatagatgctgtgcagcaagcaaaaaaaatcacaggtactgtaacagatgcaatgggaccggtcatcggtgccaatgtattggagaaaggaaccacaaatggtgtcattaccgacattgacggtaatttcacattgaatgttcagccgggagcaacgattgttgtgtcttttatcggttatcagccgcaagaaatagtggtaggtaaccagactagtttcaagattcagctaaaggaagatacggaattgttggatgaagtagtcgtagtgggttacggtgtacagaagaagaaactggtgacaggtgctacggttgaggtaaaaggcgaagacatcgcaaaattaaatactacgcaggcattgggcgctttacaaagccagtctccgggtgtaaatattcaggccgtttccggtcagccgggtgatgggtttaaaattaatattcgtggtgctggtactaacggaaatacagctccagtttacgttattgatggtgtagccggtggcgatattaacgccttgaatcctgccgatattgaacgtattgacgtgttgaaagatgctgcatcttgtgcaatttacggttcgagcggtgccaacggtgttatccttattactacgaagcagggtaaggtaggaaaggtttctgtatcttatgatggaaacataggttgggcaaatatatataagatgcctgatatgttgaatgccaaagaatatatggcggtaatggatcaagtggcctataataatggaggccaaccgtatgattggtcaaaattcgtagatgctgatttgctgactgcttatcagaatggtaccaatcctggtacagattgggtaaaagaattccggaataaaaatgctgtggttactaatcatgcgttgaatgtaacaggtggttctgaattctccaaattttcgacaggtataggctatcagtatcaggatggtgcattcggtggtccggtgaagactgactatcgtcgttttactttccgcattaattctgagcatgtgatatatcgtaagggagatgtggatgtgataaagtttggtgagaatatatattatcagcacaaacagaatcaaggtgtgcagttaggtaatcaatattcgaatgacctttctaatgctttgcgtgctattcctctgattcctgtatataatgaaaatggtgatttcttcatgtatgatgatttgaagaattttggaacgagtgctaatggtatacttgattatactgcatatgcttctaatccgatggctcacatggtatataatcaggctgggaataataagaataagaattttaatctgaacacagcggcatatctggaagtacaaccacttaagaatcttatttataaaggtcaggttagttacaaacaatggtcaagttcatggcgttcatatcttcccgtttaccaaattaataatcagggagatagccgtgataaagaccaaacgataaataacgtgtctttgggttggaactggagtttgactaatacgttgagttatcggtttgatattacagacttacatcattttgatgttttggctggtacagagtattctaaatcaagaccaacttatggcgaatcagtagaggcaaccggttataatagtgcttttggtgactttacacatgcttatttgcataatacagaacgtaaagctactgctacagtaaatggttatccctcggattatggttctaagatgtcttattttggacgtttgaattatgactttaaggaaacttatatgttttctgctatcattcgtgccgatggctcgtctaagtttgcgaaaggcaatcaatggggatatttcccatcattctctgctggttgggttatttcaaacgaggcttttatgaagaatactgcttcttggcttggtctcttgaaagtccgtgctggttggggacagaatggtaatgacaatatccctaattcaaattggcgtgccggttacgagtttggcgattatggtctttatacatttggctcggataagaatggaggtacaaccggagcttacccgaatcgtttggttaaccccgatttgacatgggaaacttcagaacagaccaatatcggtattgatacccgtttcttggataaccgtctgagttttaccatggactggtatagcaagcagacgaaagacttgttagtggaagtgggtaccaatgcggcttccggtttcgctactcaatatcaaaatgctggtacggtaaagaatactggccttgaactttcaatgggctggagagatcagattggtaaggagttcaagtatggggtgaatgtcaatatggcctataataagaatgaagtaacggaggttaataacgccaatcattttattgaaggcggtaatgatttgttggctcaaagtacgggtcggtttgtccgtatggaagaaggacatcctattggctatttttatggttataagacggatggtgtcattcagaaccagaatgacttgcaggcatatcttgaccagaattgtaaaggaaatgcggcaaactctaagcaaggtgcaagtattaaaccgggtgatttgaagtttgtggatgttgatggaaatggggtgattaatgatgacgataagactgatttgggtaatcctcatcctgacgtgacaatgggtcttacgttaagtgcggaatataaaggatttgatttctctgtaacaacctatggcgcttttggtgcacaggtagctcgctcttggcgaaagttctcagatggacagtatgaaaactatacgacagaagtttacgattactggcatggcgaaggaacctcaaacagatatccgctgcttgcgccgggaaatagtggacagaatttccaggccatttcagatatttatattgatgatgccgactatgttcgcattcaaaatctgactataggatacgatttcaagagaatttggaagaactgtccgttccagcaacttcgtgtgtatgctgctgcacagaatctatttacttttaccggttataaagggatggatccggagaatggtagagccctcaatgacaaagaaccgtgggtaaccggtgttgatgtaggtaactatcctcaacctcgtacttatatggtaggtgttaatgttaaattctaaaattgatacacgatgaaaaaaatagcatatttaataggtgcagctttgatgatagcaggaatgtttgcttcttgtagcttggactcgatgagtctgacggaaaaagatacgaccaattttcctaaaacggctgaagatgccaatcaggctttagctgccatatatcagaacctgaataatgtcaatgcttttccacagcagtctttcttgtataattctctgctggcttgcgatgatatgttgggtggtggtggtcccaatgataagttgatgcaatctttggaccttatttgtaatacgggtacaaatgctacgcaggactactgggtggctcgctatcaaggaatcaaccgtgccaatacgttgttggaggctcttgctggtattgaaatagatccggaagtaagagcgcaggctgagggcgaagccaagttccttcgtgctttttattactacgagttggcttccatgtatgggcgcgtacctttggtgattactgctttgttgcccgaagatactactcctccgactgccgctgttatctgggggcagattctgcaggatcttcgcgatgcggctgcaaatatgccggctgttcgcaagtcggatgggcatgttgataaatatacggctgaagctatgttaggacgtgcttggttgtattatactggtatgtatggcaatggtgaaactctgaacgatttggttagtacgaactatagtccgttgacttcagttgatttgcctgatgggacaactttgaccaagcaggatgtggttgggtatattgatgattgtgtgaataattctggttatagtcttgttcctgagtttcgtaatttgtgggcatataccaataaatgtacggtagaagattttccgtttactgccggtcagggattgaagtgggtagaagatgatgcagcggtaaatcccgaatccatgtttgccattaaatataataaacttgcatcttggagcactactatcggttatggtaacggttatgctctgcattttggtgtacgtggcaatgatcaggccaattctttccccttcggacaaggatggggtgccggtcctgtagctcccaatttttataatgattggagtgtggcagaacaagatgatgcccgtcgtccggcctccgtattcaagacggaggatatgccgagttataataaaggtggtggtgacggctttatccaagaaacggattattatcagatgaaaataggttctatcatggcttatagtacggatgcggctggaaataaaacgattgagccggtatttgagaagataatgtatggtgccgacggctggattaatgataatctgatgcaaaccggttctattcatgatttggttttgattcgttttgcggatgtattgttgatgcagtctgaattgaaggaagatgtttccggtataaacagagtgcgtagtcgtgccggacttgaacctattggtacatattcgttggctgcattgcagaatgaacgccgttgggaattatgttttgaaggtactcgctggaacgatattcgccgttggcatattgctgccgatgcccttgaaagacagacgggagcaaaggtttatacaaatggggctgaaagccgtaatgtggcgcagaacggtggttatgccgcacgttataaggctacggcaggtttccagaagattcccgaaaaccaagtcctcctgaatgaaggaaaggtagaacaaaatgagggttatacggatgcaagtgctgagtataatggttggcaagaatagaatatgaatttaaaatgaaaaaagatatgaaaaagatattattcgcaatacctttgtttgcaatgctgctggtggcttgcgatccgatagtggatgaaatcagtccggatcccaatgtcacaccggaaaatcttacttttgaacttgtggccaagaaccagggaaacaacaacattcagattgttcctactccgtcacgttatgtgaaggtttatgatgctacgtctgatatcaagttggcagaaggtacggctccgtcggttcaagtagctcctcctaataaagaattgcaagtatatgtaacaaccattaattcggacggctccataacaaaatcggcttccaaatcaatagcagtaacggagtatacagatcttcccgctatttatgctgatgtattcggcacaactccggacggtggttatggaacaaccacttgggtctggaatacagaagctgcagacggttgttggggtaatggaggttatctcggcaataccggccccggttggtggatttgtgatgctgtgggagatgtcggaaacggtagagggcaaattgatgaacaagctgtaggaaaaggattgcctgatgatggattaaatggttggttctcacttagtttgactggtgttcagacaagtcgtggtgaaagtggttctgtcaaggtgtcagaagatgtggtgcaatccggttgggatgtaggtactatggagttctctggtactattccattgttaggtatacagccgaatcaaggaaatgcacgtcagtatgagtatcatattttgaagattacagaagatgaacttcgtctttgtgctcctgaacccggtgctggcgattggggtacggcatggttctggaacttcaagaaaaaatagttaatattgaaaggtacgggtgggtaacgaccactcgtatacttttattactaataaaaaaatgcaacaatgaaacgaactttctttttgatattactgttcttctgtgctctttttgttaaagcggatgttttgggaccgtatacaatggatagtaatgtacctcccacaccaaccggatatgctcgggttgtacttccgataggaggtgctgacgcttcggtagccgtaagcataactgtttgtgacgaaagtggtcaacagtatgttttgagaactactaccccaaatgctgctccatattgttatttcttggcttatggcgtttaccgcgtggtcgctttagaggattgtacagcacaatctaattggggcgcacttacggttggtacaattttcgaagtgacaggaggtggctatatttctttaaattatataggaacaatctctactccaagtattgttcaagcatcgggtactgatgataatgttcctccttccaaagtaggttacaatataatgaaagtgtatggaatagagacaaacggcggtggggtgttggttgattctgacaaaaaagaatatggtatctttaattataccggacatataggcggtgctcattacttttacattaagccaggcacatacactataaaatctttgagtgctaccaatggaaattatatttatttggagtatggaaatgttagacaaccgctttctgctggtaggactttcacagttcctgcgtcattcttctccattgtgttttctaaaaaggcactttaagaataatctataaatgaattattcaactcaaagcagttgtcgttaccccccgactttattagtcgcccgtaacatcggataattgtaaatgcattaaccgaatagtacaattgtttaatggttaaatcaggaaaaggcgagtcgtgagattcgccttttcgcattcattctctattgcctttccggatgcaattcacattcctttttgtattacccctgatttcagggcgcagaatgtttctttttatccctgcatctccttcacctccttctcccatcctcctgttcattggctttcccggtgaaaccgctttccaccctcatcgccccgcctttgcatcgcgcgacacgccgtagtatcccggcatggcccggtagatgggttgcgtgggcttccccacattcttcagcttgccctcttgctgcaaccgtttcaggtggacgttcgcggtggtgcgcgccatgccgcagagcgcttggaagtcactgcgaatcagcacgtcgtggtcggcaaagtattctttcagcttcatgtctatctccacttccgaaagcttcagggagtggcgggtgtatttactgcggatggcattgactcccgtcatcgcttgtttcagcctgacgtcgggacggaagctgatgcttttcagccggagtttcaggtgcttgttcggggtgctgcgggtcactttctgtgtggcttccagggtgggggcgaagtagcccagcccttcgatgtgcacctcgtggccgtcgcgcagttcttcgccgcaaatttgcgccaggcagtctatcgcgttcatcacgtcgcccaccgtgagcgagctgcgggcatgcacgcggttgtagagctgccgcatggttactttcccgttgagcaacgggcggggatggaggcctctctcttcaggggcttcctcattagtgcccggattctcgtaccagtcatatagtattgccatatcaatcctcaaatccgcaactacgcgcctaatatgatacagaagcgaaaagaatctgcatcgttagtaaaaagggggcacagtgcatcgaatgtcaccataaagacatataaatgccccttaccccaccatgcgacttgaggcaatacgcaaaatcacgactataagttgtcggtgttatccaaagtcattctggaacacattggcataagcattgttgcatgaatagatattcagcacatacttccttgatgtcctgacccatttggctggcacagagatgaacttaaagacaaacgtcttgatgcggcttgttgctttgagtccgaacctcttcacgtcaagcctcgccatgatgaatttatagaagttgcgtatgagtgccataagcagaagaaacaccgtgttttctcccataaaggattttggaagcctgttccagccgaatccgttattcatatcatcgaagatgcgttccttccctccacggaggttatagaattcgacaatctctttctcggaagactcgtagtcatttgtaaggatgcagcggtaggtgtattctccttcccacaggtcgagttcgccgtctatccgcttctgtctttgaatcacaagacggtatgccttccctttccatttctcgatgagaatggaggccagctcaaactcaatgccgcccaattccactttcttccaacctctgagggcaaagatgtcattgtagagcgaactgcatcggttagcacggatatagaaggtcttgcagtgtttagcaatctcttccactatctcttcagaacacgagccgcaatcagctctgaaacggttgataataagcttgttttgttcaaacctttcaaagaacctcttcagcgtgtccttctggtggaaacggacatttgtgttgccgtcgctgttctcaatgccgacaatcaagttgccaataaccgccacgccagggcgataaccaaggaacttcttgtatgtaggcttcgcatcaaacttctcagcctctatgaactggtggtcgaagtcaacgtcatacccctcgccctctttcagctgccctgtggacaataggcaattgaggagcagtgtattcagcttgtctgccgtgttgaagtcgtaggtcttgccagtgtcggatgtgtaggaaatgttatcctgggtcagttcctttatggctctaagaatcgtgtcggcactgcatgtgcgaagtgtcggatgaagcgaaaggtggtacatcagatgagtggtgacatcctcgatgcatgagccgccacaaaaataaacgctcataagcgaacggatgatttcgctgtattgataaccatacagcctgcatctcataccgagggttgagtcgattacagatgagagtctggagtcaaattgctccattattgaaaatattcctccaaaaggagtgagtttctcggatttaattgctacctttgccatgtctgtcgggtttgatacatattttgatttgcaacactaagataggtgaaaaatctgacatggcaaattcctgagcaactttttgttgctcaggtacttaaaaagttatatttgtaatagtgttgcggaattaaggtcaataggttttagtgcgttcaacatacttgtttcttccctcggaagtgtcttcctgtaagtgaacgactccggtcggccgaacgaataacccgggtcgttcgattgaacgacctaagtcagtcgattggacgacccggggcgttcacttataaagaaccgtgcaaaggtactgaaaataaagggttccgaagcataaataagtatgtttgtcggcaggaatgatttttgaagaataagcggagaatggtttgcaaaacgccctcggcaggcagtaactttggcgaagaggcgagaggaaagaaaggatgattcccttcctcgaaacctcccaataatcattttaataaaaaatatttatgaagaaaaaactgatgactttgcagcaacaccggctcttgaaggaagcgggacaactgatagccttttccgaaaggctgaaacacgcacaaaaagaaacgaccgaccgaaactggaaggagcgggaagagcagcgccgccggagcgcgaaagccgcaagcaccgtgactgcactgagcggcgacatcgaggagttcctcacttcgcgctacgactttcgctataatctgctgacggatgaaaccgagttccgccccgccggacaacgctctgccgccttcacccccgtgggcaagcgcgagttgaacactttctgcatcgaagcccatgccgaaggtattccttgctgggacaaggacttgaaccgatacgtctattccacttacatccctgcctaccatcccttcctgctctacatggacgaactgcccgattgggacggcaaggaccggctgactgcgcttgcctgccgcgtctcttctcggcctcactgggtgcggggattccatacctggatgctgggacttgcctcgcaatggatgggcgtgtccggactgcatgccaacagcgtggctcccgttctcgtcagccgcgagcagggacgacggaaatccagcttttgtcgcgccttgatgcctgacgtgctgacgcgttactacgccgacaacctgaaactgacctcgcagggacaagctgagagaatgctggcggaaatggggctgctcaatatggacgagttcgacaagtatgccgacaacaaaatgcccttactgaaaaatctgatgcagatgtcggtgctcaacatccgcaaggcctatcagcagaacttcaggcaactgccccgtatcgcctcgttcatcggcaccagcaaccggttcgacctgctgaccgaccccaccgggagccggcgcttcctctgcatcgaggtgaagcacaatattgactgcataggcatagagcacgaccagatttttgcccaactgaaagcggaactcattgccgggcggcgcaactggttcaccaagccggaggaggaggaactgcaatggcataacgaggctttctatcgtgtcagccttgtggaggaggcagttcacagcttgtttcgtgccccgcttccggcagagaagagcttcgatctgactgccgccgacatctttgatgagttacaaaaaacgcatcccgccctgatgcgtggcagcaatcccatgcagttcggttcggtgttgctgcgggtgggactgaaacgccggcatacgaagtacggcaatgtatatgaggtggtgagaaggaagaaagaagtttcaccggaaagggttgaacgatagggaaataatgcgaaaggtgaaggggtgaaggaagagaaagccggtttatagtctcattacggattgacatagattcctattaattcaggttgtagatgccgatgggataaatattttcgctcataataactgtatattttatagatttctataaaagtaacttttttataagaacaaaacaagcgaaagttgcgattttcactactccttgtcggataaaaaacttatctttgcgattgaaacaatctcttgttaatgatatgaaatacacatcatactcttatccttcaggcagggcggaagtggctgcatttgttgtgaccggcggagtgacggaataccatgtgatgatacatgccactgacccgaaacagacctatcgtgaacagatgaatgtcgtgttggatgcgtatgccgctttactgaaaaaagaactgtccggagccgtggcggtttttaaaagatacttcctgagtgatgccgccaaccaagcggaactgttgcttgccgctacggcggaaagctccgattgcgcgctgtctgtggtggaacagcctccgctggatggtaccaagattgctttgtgggcctatctgcagaccgatgtgcagacacgagtgctgccgaacggactgtatgaagtgaaacacggtgtttaccgccagctctggatgggatgcagcttcaaccgtgccgccaattcggaataccagatgcgtcttttgctcaacgactatgccatgcaactgatggaggaagggtgtactctggccgacaattgcctgcgtacctggatatttgtgcagaatgtggattgcaattatgccggtgtagtcaaggcacgtaatgagatgttcgtcacccagaacctgacggagaacacgcactatattgccagtaccggtatcggtgggcgtcatgccgacccgaaagcattggtgatgcttgatgcttttgctgtagcgggattaaagcccggacaaatcaaatatctctatgcccgcacacacctgaatcccacttatgagtatggagtcagtttcgaacggggaacggcggtggattacgacgaccgtcggcaagtactcatttccggtacggcgagtatcaacaaccgtggggaagtgatgtatgccggagatgtacgccgtcagacagaacggatgtgggagaatgtggaggctctgctgaaggaagctgactgcggctttggagatgtagggcatatcattgtctatctgcgtgatattgcggattatgctgtagtgaaagagatgtttgacaagcgttttcccgatacgccgagagtgattacgctggctcccgtctgtcgcccggggtggctggtggaaatggagtgtatggcggtgaagaaaatctctgattaaaaatattatctttggttaattgaatattaggctgacagttggtaaacgcctacctttgttgaaattctaatgtataaggatgaaaacacgtatcttgcttttctgtatcagttgccttctttgggcaagttgtggaaattccggacagaattatgtgattgaaggaacgttgccgtcggtgaaatacgacggggaatggatatacctcgtgccgatggagaatgcgccggggcgggtggattctgtaaagataaccaatgcctctttttctttttccggacaaggggaggagatgagggtgttgcgtctgcgccatctgctgcgtatctacatccaggaactgctggtggtgacggagccgggaaccatacatgtgaaggccgactctgtcggttcggtaacgggcactccgcaaaatgatgcccttcagaaatggaaagaggggagggaaaagaagcaagaggcttaccattttatccggacgggactacggaatgccaccggaaaagattcactgcatctgatacggatacgtgacagtctgaggatgcaggagcaggaaacgaactttctgtttttgaaagagcagggaaacaatacgttggggacattcatgcggaagatggtgcgtggctccttgacggaagaacaacaaaaactgttggatgaaagcttgcagaaggaaatacattgaatggggagcggcaggaatcggtgctttggcgttgtttctttttttcttccggatattgccctatcatctgttccatcgggagcagacacagctctttttgcttgccaccgaaccattggccgggtatctgcggcatccggcggctctggcacgtctgtcaggagatttcctcactcaattcttttattacgaagggggtggcccgaccataatggctgtcgtgctgttgctttggggagtggtggtgtttcgtttgttggctccgtacatgggacgttgggcgtggattcctacggtgttggcggtggcttgggaggcaggaaggcaatgcggattgagttatccgctttccggcacaatcgctttaaccggtatcggaggtgttttgttgttgtgccgtagctgcatgcgacgttcgtggaagtcgggcttaccggtaagcatattggcggtattgtccggctattggctgtttggctgtggcgattggtcgtcacgatggtacaatatgcccgatttagggcgggaatatcttttggcgttggattcggaaatgtatttcggccgttcggaaaaagtacggaaactgttggtggagggtgaataccgctctccgttcactgcctattattataatttgctgaatgcacagcagaaccggcttcccgaccggctgatggatggttatcaaccggcttcgcaagggctgtttctgcctgtggctccccattctacctacctcactatttatgcagccaatgaagtctggtttgcgttgggagatatgacgatggctgaacatgccgccattctgggaatgattttttctccgcaccacaccggggcaagagctgtcaagcgtttggcggaaatcaacctggtgaacggtgatgaggcggcggctatgaaatatcttcgtctcctgcaaaagacaatgtgttaccgtgattgggcagaacgacgtattcccggaaaacagacggccgaagtctgccaatggctggaacggaagcggttgttgttgcctgcaacggatactttgcgttcttctgccgacattccgctttcacttcgtcatctgttgcgtaacaatcctgataatacgttggcatgcgattaccttctctgctttgatttgctgaataaggatattggggctttcgccggagattatcgggagtttgctgcaaagaagtttccttccagattgtatgccgaaggtttacttatctatcttgccgggaaaaaggcttcgttggatgaagtggaaaaatggaatataccgcctcaagtattggatgaatttggcgattatacccgactgtacgaggcgaatggtggtaatggtgcccctttgcaagccaaatacggaaaaacatattggttttatttccactatgctacgatgaaaaaggggaagtgatttatgatgaacatagatatgaaatatatacaagttgttgtggggctgttactgtgctactgcctatatgcttgcagtccccgtccggagtctgtacagcctgcagaccggttattggtgctctatccggaatatcaggatgtaaccattccctacaatgtggctcctttgaatttccttgtgcggaatgaaggggtggatgcggtatgcgtgagtgtaaagggagcatcggacagcttggagataaatgcgcgcgggaacaaggcgatattccccttgaaagcttggcgtgcattgcttgaagcggagaaggaacatactttggaagtaactgttactgcccgtaccgacggccgctggctgcgctatccttcctttgcatggcaggtagtggcggacaagcttgacgcctatgtcagttaccgtctgatagagcccggttatgaggtatggaataccttgcagatacgtgaacgttgtattgagaatttcgaagagcgtattttggcggataacagtcagacagacggcaagtgcatgaactgtcatgtgcacggaggaaatagtggcaacctttcgatgttccatcttcggggtgagggaggggggactgtcctgaaccgtgacggcaagctccgtaagcttgccttgaagaatgaacagatgatatctgcggctgtctacggggatttccatcctgacgggcggtatggtgtgttctcgtctaatgtgattattcccatgttccatacggaaagtaaccgccgtctggaagtttacgataccgtctccgatttggctgtcgccgattttgacggaaaccggatgattctatctccgcttacggcggattccaccgtattggaaacttttcccacattctctgccgatgggaaatggatatattactgctcagctccgactgttccattgccggacagcgtacagcaattacgctattcgctttgccgcattgcgttcgatgccaatcacggcgcatggggtgaccgcgtggataccctttggaatgcccggctggagaaaggctccgtgtgtcatccgaaagcttcaccggacggccgctacctgctctataccgttgctgattatggaacattccccatttggcaccgggagacggaattgcagctgatggatttgcagacgggtgccatcgattccctgccaatggtcaattccaaccgttcggacacttatcacagttggtcgtcaggcagccgttggtttgcctttgccagcaagcggggtgacgggcagtacgggcgggtttattttgcctatctggatgctgaagggaaggcgcataagccttttgtgctaccccagtcggaccctgaaaaagacgatttgacattgaaatcctacaatattcccgatttgtcggctactcccgttccttttgatgcttcttccatcaagcggataaaccggcaactgaaggctgaggaattcaaatgacaagacatacagagagtaccaaattgtaaataataaattgtaaatagtaaatgttcttatttctgaaaaagacttggaagatagggttgtcgatactttttggcgtagcggtgcttctcttttggggaagcgtatatccggcccatatttcctatcaggagcagttccagcttttcttgttcgatgccgactactggtgggaacggatagtggttcccggtgggttggccgattatatcgctgagtatctgacgcagttctattatcacgtgtgggcgggagcttgtattctggcttttttgtacgtgttgttgcaacggttggtttggaaactggcgaaggagcagggtgcggctgatgtgtattatccgctgagttttctgcccatcattgtcttgtggcatttcatgggtgatgaaaatgcgatgctgtcattggtggtggctctgctgttagcattgtctgcatcctgctggtatgcggatttgaaagggaagtggcagcgtgtggcatacattctgatagcccttccgctgctttactggacagcgggtgcggcacacttcatctttatgggctgggtgattgtacgcgagttccggttgaatcttaaaggtaagaatttctggggtggtgtcggagtgttctggggtgtaggattgtggggtatcggttgtccgctattggcaagcatgtgggtacaattccccatttaccgtctgatgggcggtataggatattaccgtttcccggcagtgattccctggatagagatagggcttgccgtattactggttgttctccccttcctgctgtccgctttgcccgctttgaagaagaagccggtattttatggagttctgcaagtggtggcggtaacattgttcggctattactacgtggtggccggttgcgatatggataaagaggaagcgatggagtatgaccagctggtacgtaataaacaatggcaggagattatagaaaaggcagaagagaagtcaccggtttcacctttcggcgtgacctgcctgaatcttgctttgggaaagacgggacagatgggcgaccgtatgttcgagttttaccagaacgggacggaagggctgctgccggagtttcagcgtgattttacttctccgttgcccaccagtgaggcatactatcatttgggtatggtcaatacggcacagcgtttcacttttgaggcgatggaggccatacctaacttcaacaagagtggccgttgcttcaagcgtctggcggagacgaacctgataaacgggcaatacgaagtggcagccaagtacctgcgtttgttgaggaagacaatcttctacaaggattgggcggaggatgccatgacctatctgtataatgaggaaaaaatcaatgcccacaaggagtggggttggttgaggcagatacgctatacggaagacttcttgttcagcagccaggaaacggacatcatgctggggctgctttaccagcacaaccaccggaaccggatggcatttgagtatatgctggcctatgtcctgcagcaacgtgatttggaacgtttcatgaagtactatccgctgggcaagcatgccggctacgaccatattccccgcagctatcaagaggcgttgatatatgtatggacacagacgcacaagaacttccagggtatgccgtggagtatttcgccccaagtggtgcgggatgtaacggaatttgcgcggatatatacctcgcagcagaatgcccggcagatgttggaggcgcgtttcggcagtacatactggaattatttgctactaagaaagtaaaatgaaaaagatgaagaatatagctgtttgcataatggctgcatggtggtttgccgcttgcggcaatccggtgacttccccggaaagggtggatgaatggccggatatctatcccgactatatcggtgtgactattcctgcaaccattgctcctatgaatttcaattgtattggtggagcgtacgaacgtgtggatgtgaccgtgaccggaggaaagtccggagagatgcacgtaaatgataaaatagtatcatttccgcaagatgcatggcaagagcttttggaggagaacaagggtgatagccttctgtttacggtatgtatccggaaagacggcgagtggaaacagtaccgctcttttcccatgtatgtcagtccgtatcctatagattatggggtggtataccgcaagctggctcccggatatgaagtttatagcaagatgggcatttatgagcgtgaccttgcttcgttcgaggagcgtcccttgctggagaataccatggtgccgggcatgtgcctgaattgtcatgctttcaacaaaacaaatccggaccatctgagcctgcatatccgtggaaagaacggagggaccttgatgcagatagacgggaagcgcgaaatgctggatacgaaaacggattccactctctctgcgggggtgtacccttattggcatccaaacggcaaatatattgcctattctgtcaacaatacgcgccagtctttccatgcggtgaaggatgagcgtgtggaagtgctcgacttggaatcggatgtactggtctatcatcccgagacacatgaattactgctctctcccttgcttcagaagaaggaagtcttcgaaacctttccagtattttcaccggacggacgcaaactgtatttctgtactgcggaggccaagccgataccggcggaatataaggaaatacgttatagcttgtgtagtatagatttcaatccggaagacgggacatttggcgaaaagatagatacgctggtcaatgcggcagctatgaagaaaagcatctccttcccgaggccctcgtacgatggcgagtatatcatgtttactttgtcggattacgggaatttctcaatttggcataaagaagccgatttatggctgttggatttgaaggatggcggtatgcgtcccataaaggaggtgaacagcgatgatacggaaagtttccataactggagcagtaactcccgatggtttgtgttcagtagccgcaggggagatgggctttatacccgtctgtatctggcaagtatggatgagaatggggtggtgggcaagcctttcctgcttcctcaggaaaatccttgggagtattacgaccgtctggtctactcgtacaatgttcccgattttacaagcgaaccggtgaagctggaacgccggaaagtggaacggggaattgtctcgcggaagcgcgttccggtgaaagttagatgatacgttttttatattctgctttttaatacagtaaagggataaaattgtatcattttctcttggtgcaatccgctatctttgtgccaggaattagtgttaccaataacaataccagattgaaaaacatggatatgagaaaagtaaaatttgctatgatgattctggcggcaagtctgttgaccgcctgcggttcttccaagaaagaacagagtgtgaatgaagagacggctgctgcgcgtacgcaggaaacggagaacttactggctaacttgaaaaaaatcccttccaaaggtatcatgctcggccatcatgacgatacggtatatggtatcggctgggaaggtgaggaaggccgttcggatgtgaaaagcgtgtgtggcgactatccggctgttatcagctttgatttgggagagctggaacttgggaatgccgccaatctggataaggttcccttcgataaaatcaggaaagagataatcaatcagtatcagcggggcggcatggtttcgctcagttggcatgcgcgcaatcccaagacgggcggtgatgcctgggatgtatcggatacgacggtggtgaagtccatcttgcctggtggcgagaatcaccagaaatttgccggctggttgggaggagtggccgatttccttcattcgttgaagacggcggacggcgtgaagatacccgtacttttccgtccctggcacgaacacagcggcagctggttctggtggggcgaaaaactgtgtacccctgaagagtataaggcattgtggcacatgacagtggatactctgcaggccaaaggagtggacaatgcactttatgcttactctccgggcacggaacccaaggacacgacggaatatttgaagaagtatccgggcgatgagttgatagacgttatcggtttcgatacctatcagttcgatcgggatgcctatcttgccgggatggatagggcactttccattatcgacagtgtagggaaagcacacaataaggtgattgctgtgaccgaaaccggttacgaaggaattcccgatgccaaatggtggactggtactctgctgcctgcgttggagaaatatccgcttgcctatgtgctggtgtggcgcaatgcccgtgaaaaggtgacccattactatgccccctatccgggacagacatctgcggaggattttgtggagttctataacaatcccaagacgctgtttgcagctgatgtaaatctgtatcaataaacaaacaatcaatataacagacatggaagcttttaaagaaaaggtagagaggctctttcagagacacgaagagttgattacgagaaagaatgtggccgtggaagacggcaatggcatattcacccgctataaatatccggtagtgacggctgctcatacacctgtattctggcggtatgatttggatgagaagtccaacccgtacctgatggaacgtatcggtatgaatgcgaccatgaattcgggggccattaagtggaatggcaagtatctgatggtggtacgtgtagagggcgctgaccgtaagtcgttctttgccgtagccgagagtcccaacggcattgataatttccggttctgggattaccccatcagcatgcccgaagacacgattccggcaacgaatgtatacgacatgcgactcacggctcatgaggacggctggatttacggtatcttctgcgccgaacgccacgacgacaatgcgcctgccggtgatttgtcctcggctacggctacagctgccattgcccgcaccaaggatttaaagaactgggaacgcctgcccgacctgaagaccaagagccagcaacgcaacgtagtgctgcacccggagtttgtagatggcaaatatgccctctatacccgtccgcaggatggctttattgatgccggcagcggtggtggtatcggctgggcgctggtggacgacataacccatgccgaggtgaaggaagagaagattatcgaccagcgctactatcacaccatcaaggaggtgaagaatggtgaaggtccgcatcccatcaagactccgaaaggatggttgcatctggctcatggtgtccgcggttgtgccgccggattgcgttatgtgctttatatgtacatgacttccctggaagacccgacgaaactgattgccactcccggtggggcctttatggtacccgagggtgaggagcgtataggtgacgtaagcaatgtacttttcaccaacggctggattgccgacgaagacggaacagtattcatctactacgcttcttccgacacgcggatgcatgtggctacctctaccattgataagctggtggactattgcatgaatacgcctgctgacggcttgtcttcatcagcttcggtagaaacgttgaagaagctgatagacaagaatttgcagataatgaaataataaaaatacaacatactatggcaacactaaaagagaaaatcggttatggttttggggatatgtcttcctctatgttctggaaaatattctcctattacttaccgttcttctattcgaatatttttggtttgagcttggctgatgcaggattgctgatgctggtgacacgtatttgggatgcagtgtccgatccgatgatgggagtcattgcagaccgtactcatacgcgttggggtaaataccgtccttatttgttgtggattgcagctccttttgccattgccgggattttactttttacaacgcccgacatggggacaacgggtaagctggtatgggcttatgtcacttacatcctgatgatgacggtatatacggcaatcaatgtaccatacggggctatgttgggagtaatgactgatgattcgaacacaaaaacggttttctcttcttaccgtatgttttttgcatacggaggtagttttatcgctttgggagcatgggagccattgtgtaattggtttaaatcaatggactatagcaatgcttccagttggcaatatgccatggtatgcattgccacgctctgctttttgggttttctgttttgctttagcatgacgcgcgagcatgtcaagagtgtggcgtccgaatccatcggtaaggatgtgaagtcactggtgcgcaattcgccttggtggatattgaatggtgcggcgttgttgtcgaatttcttcaatacggtacgcggagctactgccgcctacttcttcaaggactatatcagtgccaatgcattcctcgatttcggggtgttcaatctggtattgtatgccggcttgttcctgatggtgggtgaagtgtgtaatatgattggtgtggcgctggctgtgcctctgtccatgaagtttggaaagaagtccacttatatcatttcgctcgtgtgcctggtagtgctcagcgtgctcttcttctttgtgccgaatgacgggctgggatggtggctgatgatgattttccaggtgcttatctccatctgcaccggtatcgtatctccgttgatttggagcatgtatgcggatgtggcggactatgccgagcaaaaggatggcacatcctctacggggctgatattctcttccggttctatggcgcagaagtttggcggtgcatttgcaggctgggcagtaatggcactgttggcattcttcggttacaataccgcagagaatgccgtgcagactcccgaggcgctggatggcttgaagtatctgatgagctttattcctgctgcgatagccgcactttccatcgttgtcgtattcatctatccattgaataagacgcgtatggcagccatcaatgcagacctgaaagagcgccgtgagaaccttcagcagaataacttataactcataactcaaaaacttgtggatatcaagaagatgaaacaggagatggaggaggagttggtctccaatatcctccccttctggataaacagaatgacggatgaagtgaacggcggcttctacggccgtatcacgggtcgagaggaggtgaagcccgaagctgaaaagggggccatcctgaacgcccgcatcttgtggaccttttcggctgcataccgcttgctgaggaggccggagtatctggaaacggctacgcgtgccaaacgcactcttatcgaccgtttctacgacaatgaatttggcggagtttactggtctctcgactataaaggcaatccgctcgataccaagaagcagatttacgctttgggtttcgccatctacgggctgagtgaatatgctcgtgccacgggcgatgatgaagcgctggcatatgccatccgtttgttcgagactatcgaagagcatagcttcgaccccgtgaagaacggttattgtgaagccttgacccgcgaatggggagagatagccgacatgcgcctcagcgccaaggatgagaacgagcgcaagacgatgaatacccatctgcatattctggaaccttataccaatcttttccgcatgtggaaggatacccgtctggagaggcaactgcgcaatttgataggccttttcacggaacggattctgaatatcaagaccggtcatctggaattgttcttcaatgatgattgggttagtaaataccgcattgtctcctatgggcacgacatcgaagcctcctggttgatacacgaggctgcccttgttctgggcgataaggacctcctggagaaagtggaaccacttgtagaatacatcgctgccgctgccgatgaaggattgacgcccgacggcagcatgatatacgagacttttctggataaaggaaagaccgatactgaccgccactggtgggtgcaggccgagaacgtagtgggacatgccaacctctaccagcactttgatgacgaagtggccatgcagaaggctctccgatgttgggacttcatcaagcagcatctggtagactacaagtacggagaatggcattggagcgtgcgtgccgacggcacggtgaacaccgatgatgacaaggcgggattctggaaatgtccgtatcacaacggacgtatgtgcatggaaattattgaacgtttttcataggttttctatcataagaagatgaatagattgatggttttggggattcttgtctggatggggattgcgctgcatgcgcaatctctttatccggacttcagcaagctgaacttcgggtgcgatggaaacagcattaccgcaggcgaacaatggtctaagactgtagtggataaactcggattcgctacacatcacaacgtggcggtcggttctgccacatgggcatgccatcccgatactcaggattatggcagcgaagcttttgccggcatctccggcggttggcaggttacggaggataagcatgagttacagatgcggcacaacaacgtgtcaaaggtgcatatccagaagttcatagccgaagtggaaagtggcgcttaccctgcgcccgatgtctttgtgttctctatgggaacgaatgaccgtaacttgggtagtgccgaagaggcccttaaagggaagacgctcgatgaagtagatgtcaacaccatggcgggcggtgcccgttggtccattcagaccattctggagcattatccccaatgccgcgtattcgtgtgcacgccgattcagaccggcaaccccgaacacaatgcactgaatctgcagaagattgccatcttgcgtgagttgtgccgggcgctttccgtgcagctgatagactgttactccaactgtggtatcaccgaaaagtttgagcagccttccggtagcgggcgctatctgcgcgacgggttgcatcccgacaaaccggggcaggagctgatgggccgttacatcgcgaaggagatacggaaccatttcttttagttccgttctgcatattccggttggaataacttatcatttagggcttgtaaagccctttttttgtctgtattcttaatgacgaatgccacgtcattattgctgctgccatatgaaatcatccgtagggggatgtcctttagcgcctccataatctttgcctcaaacccggcatattcccattgcatgttgcccaccacggagacgatggtcatgcggtcttctaccaatacatgggcatattggcgtagttcggagatgatattcgataaacgagtgcagtcgtctatagccacagatacgtccagattggaggataccagcaggcagaggggggtacggtacttggcaaaaatgtcgaaaatcttgctgatgaacagatagggacacagattatggttcgattcgaactttatgtatatgatgtggtccttggcggctatggccttgatgatattgtcgtcctgcaggttggaaatcaacgtgccttctgccgacggttccatagagttaagcagccggacgggaatattccttaggcgtgccggggcgatacagaagggatgcagtatcttggcaccatagaaggccagttgttcggcttcgttgaagctgaggcgtttcacggggcgggtacctgacacctcgcgcggatcattgttgtgcatgccatctatgtccgtccatatttgtatctcgtctgcttggagggcggtgccaatgagggaagcggtgtaatcactgccgccgcgtttcaggttgtctgtttcgttataggcattcttgcagatgaaaccctgagtgatgaagagattgatgccgggatggcaggcaagctgctctcggagtttctgttctatatattccaagtcgggttcgttgtcggggccgatacgcatgaagtcgaatgcacaaagcagtacattgggaactttcagctcgcgcaggtagaagtgcattagggcggtactgataagttcgccttgtgccagcacttccttctcttcgacagaggtgaaggaatctttggtaaatttccatagttgctggaagcggtcgaggatataatctattgcttcccgtttcagtttctcgtcggtcagcaacccattggcaaattcgatgaattggaattccagccgggtgatacggtcgtgagcttgttctatttcacggttgaacaagttggcggcaatctcctccagatggttggtggtgcctgcagtggcagacagtaccacaatcttgggtgttgcatctttaatgagtgttgctacatgtttcattctctctacggtgccgacggaagttccgccgaatttacaaactttcatttcttgtttcttttttaacagtttcataattgcattcatccggatgttcttccttccgacttttcatttcaggtggcctctttccaaaatggaagggggaggcatgaggggctttcactgggactaggcctgcataatgccgctgtggcattgctgtggtgagatattcatatcccggttggtggcaggctcttgccccttcacctataaaagttcaaaagatatgccgttggtatttgggaaaagcttatatttgcacaccctgttttttaccgttatcagtttaaaaacttatcgaatagatatgagtaagattctaatcattgatgatgaggtacaaatccgtacccttctgacacggatgatggagttggagggatatgacgtctgtcaggctggtgattgcagggctgccctgaagcaactggaactccaaaatcccgatgtagttttgtgtgatgtgtttctgcccgatggaaatggggtagacctggtgttggctatcaagaaggcggcacccaatgtggaagttattctgctgacagcgcacggcaatattcccgatggggtgcaggccatcaagaacggtgctttcgactacatcaccaagggagacgataataacaagattattcctctgataagccgtgctgtagagaaagcgcgtatgaatgtgcggttggaaaaactggagaagaaggtgggacagacgtactcttttgattctatcctgggagaatccaaagtcctgaaggatgctgtttcattagctcagaaggtgtcagggactgatgttcctgtactgttgactggagaaacgggcacgggtaaggaggtatttgcccaggccatccattacagtagtaagcgtgcacggcagaattttgtagcggttaactgttcttcgttcagcaaggagttgctggaaagtgaaatgttcggtcataaagccggttcgtttaccggcgcattgaaggataagaagggactgttcgaggaagcgaataatgggactatttttttggatgaaatcggtgagatggcgtttgaactgcaagccaagttgctgcgtattcttgaaaccggtgagtatattaagataggtgatacgaaacctacccgtgtcaatgtccgcatcattgccgctacgaaccgcaacttgtcccaggagattgttgccggacgtttccgcgaggatttgttttatagattaagcgtatttcagatacatctgccgccattgcgcgaacgtgcaggtgatatccggctgttggcgaaggcttttataaagagttttgcggaacagctggcgcgtccggtggttgaaatagctcccgcatttcttgaagcattggactcccaaccgtggaagggaaatattcgtgaattacgtaacgtgatagaacgcagtatgattgtttgcgagagcggatatctggacattgctgatttgccgtttgatattcagaatgcccattatgaacactccaatgattcaagtcccggcagttttgaactttcagctatggaacgccggcacattgcccgtgtactggagtatacaaaggggaataagacagaagcagcccggttattgaaaataggtttgacgacgttgtatcggaagattgaggaatacaagatctcagatctataatagggggctcagtatacgactgaggtaccttcgatataggaccgtggcaagattattcttgaaacaggcttagaagcagaaagtgcctatgggctaaaacatatcaaaacaggtttcaccctttcaaaatgaaaaggtgcaacctgtttctttttatacttgtttagtatgtattctgttgataattaatggtgtatggtatatgtgctctttttggcacatatttggcacattcctggcagacaaaaatatgtagtaacattttaaaaggtaaaaacatgggaataacagtatcatttattttttgcctattgagcggtttgttcgccttttggcttttctggaaatgcgtagattggtttgagaagatttaaaagagagaattatgtacacagctttatttgtattaggtattgtaatgttcgggtatctgacttatgtgctgataagacccgaaaagttttaatgaatggagagtggagaaatgaacactgaaattttaggtgtagccttgcagattgttctgctgattgtgatatcctatcctctgggaaagtatattgccaaggtttacaaaggcgaaaagacatggtcggatttcatgaagccggtcgagagattgatttataaagtggccggagtcaatccggaggaagagatgaactggaaacagttcttgaaagccctgctgattctgaatgccttttggtttgtatggggcatggtgctactctgtacacagcagtggttgccgttaaatccggatggaaacgctaaccagacaccggatctggcattcaatacatgtatcagttttatggtgaactgtaatttgcagcattattccggtgaaagcggactgacatattttacacagttgttcgtcattatgttgttccaattcattaccgccgctaccggtatggcagctatggcaggtatcatgaagggtatggctgccaaatcgacgaagactatcggtaacttctggaagttcttggttttgagctgtacacgtgtattattgccgctttcgttgattgtgggcttcatcctcattctacaaggcactccgatgggatttgatggtaagatggaaatccggacgatggaagggcaaacccagttggtttcacaaggtcctacggcagccattgttcctatcaagcaattgggtacgaacggtggcggttactttggatgtaactcttcacatccgttggaaaatcctacttatctgacggacattgcagaatgctggtctatcctgattatccctatggcaatggtccttgcacttggtttttacaccagacgcagaaagatggcctactctatctacggcgtaatgctttttgcttttcttgtcggtgtttgcatcaatgtttcgcaggagatgggaggtaatccgcgcattgatgagatgggaattgcccaagacaatggagcaatggaaggtaaggaagtccgtttagggtctgctgctactgctctttggagtattgtgactacagttacttccaatggctctgtaaatggtatgcatgattcaacaatgcctctttccggtatgatggaaatgctgaacatgcagattaatacgtggtttggcggtgtgggtgtaggtttcatgaactattatacattcatcattatcgccgtattcatcagtggactgatggtgggacgtactccggaatttctcggtaagaaggtagaggcgcgtgaaatgaagattgctaccattgtggcactgcttcatccgcttatcatcttgggcggtgtggcactttcttgctttttgttcgctcattatcctgaatttgtggcaggtgaaggcggctggttgaataatcccagtttccacggactgagtgagcagctttatgaatatacttcggctgcggccaataatggttctggcttcgaaggattgggcgacaatacttacttttggaactatactaccggctggacgctgattttgggacgtttcctgcctatcgtaggtcaggtagccattgctggtctgttggccggaaagaaatatgttccggagagtgccggtacgctgaagacagatacagtaactttcggtgtgatgacttttgccgttatctttattgtggctgccttgtcattcttcccggcacatgcattgagtacgattgctgaacatttcagtttgtaatagtagtttgtaaaaagtaatttcataggtatgaaagataataaatcagcttctctgtttcagaaggagcaagtaatggaaagtttgaagcaatcattcgtgaagctaaatccacgggtgatgataaagaatccgattatgtttacggtggaagtcgtaacagtcgtcatgctgattgtctgtttcctttcattgggtacttcggaatatggagcgttcggatataatttattggtattcatcatcttgtttgtgacgttgctgtttgctaattttgctgaagccatcgctgaagcgcgtggtaaggcccaagctgacagcttgcgtaaaacccgtgaagagactccggctaaagtgctggttgaaggtaaagtccataccgttagcagttcacgtttgaagaaaggtgactattttatttgtgaagcaggagatacgattcctgccgacggtgagattgtggaaggtttggcttccattgacgaaagtgccattaccggtgaatctgctccggttatccgtgaggctggtggtgacaagagttccgtaactggtggtacaaaagttctttctgataaaatcaaggtactggtgacgcagcaaccgggtgagagctttcttgacaagatgattgctttggtagaaggcgctacttgccagaagactccgaacgagatagcattgactattcttctggccggtttcactttggtattcgtcattgtatgtgtgacgttgattcctatggccgactatacgaatatcgaccatccgggaacttatatctccattgcagccatcatttctctgtttgtctgcttgataccgactactatcggcggactgctttctgccatcggcattgcggggatggaccgtgctttgcgcgctaatgtaatcacaaaatccggtaaggcagtagaaacagctggtgacatcgataccttgttgctagacaagaccggtaccattacaatcggtaaccgtaaagccaccaagtttcatccggcttcgggtgttgacgagaatttgttcgtagaggcttgcttgttgtcctcactttctgacgagactccggagggtaagtccatcattgaactgggacgtgaaaacggtcatcgtatgcgtgatttgaatactaccggtgctcatatgattaagtttacagccgaaacaaaatgttcgggtgtggatttgcaggatggtactcagatacgtaaaggcgcattcgacgctattcgcaagattgtggaaaatgccggaaataagttcccgaaagagattgaagaggtgattgctgtaattaccagcaacggtggaactccgctggtggtatgtgtcaatcagaaagttactggggtaattgagttgcaggatattatcaaaccgggcattcaggaacgttttgagcgtcttcgcaggatgggtgtgaaaactgtgatggtgaccggtgacaaccctttgacagccaaatatattgcagagaaagctggagtagatgatttcattgctgaagccaagccggaagacaagatggaatatatcaaaaaagaacagcaggccggtaagctggtggctatgatgggtgacggtacaaacgacgctcccgcccttgcacaagctaatgtgggtgtggcaatgaacagcggtacgcaggcagccaaagaagctggtaacatggtggaccttgacaacgatccgacgaagctgattgaaattgtggagattggcaaacagttgttaatgacacgcggtacgttgactaccttctccattgcgaacgacgttgccaagtactttgctattatccctgctttgtttatggtagccatccctcagttggctcctctgaacattatgggactgcatagccctgaaacggccattctctcggctgtcatattcaacgctatcattattcctatcttgattccgttggctttgaaaggtgttcagtataagccgatcggtgccagtgctctacttcgtcgcaatctgttgatttatggtgtgggtggcgtcattgctccgtttgtcggcatcaaactgatagatatgatagttagtctgtttttttaaaacttggataaaatgaaaactctttggaaatcatttaaaataacaattgcattttgcatatttttctctctgttctatatccttgttttgtggatatttgcacagttcgccggtcccaacaagggaaatgcagaggtggcaacactcaatggtaaagtggtaggtgcagccaatgtaggccagatgtttacgcaagatatttatttctggggacgcccatctgcgggtaattatacagccgatgcttcgggtggtagtaacaagggacctacgaacgatgaatacctggcagaagtggaagcccgtatcgatacttttctggtacatcatccttatctgagccgcaaggatgtgcctgctgaaatggtaaccgccagtggttccggtctagacccacatatcacacctgcttgtgcttatgtacaagtgaagcgtgtggctcaggcacgtggcatgaacgaggctgaagtgaaagccattgtagacaagaacatcagcaaaccctttttgggggtgtttggtacggaaactgtcaatgtgctggaactgaacattgcattagaagaagccgatcagaataaataattttttagttgtgtttgtcatgtgttatgggcaggagcggaagtatttctgttcaggcagcgaaagactgtcattttacagggggagccgaaacttccttcctgcctttcaacgattgattagtaatggtaaataaatagttggatatgaaaagtttaaaaatatcaattctagtttttgcgagtatggtagctgcttgttttatgggaaccggcaaagtgcaagctcaggaatttacaatacaaggtgatttagtcagttcttatgtttggcgcggcttttaccagacgggagtcagttttcagcccactttgggttttggggtcggtgatttttctttgacggcatggggctctaccgattttgacggagtttcttcaggggaaggggctgcggctaaggagattgatttgacggctgcctatgctttgggagaatcaggtctaactttttctgttgccagcttgtggtggggcggacaaggagcaagaaagtattttaattttaagagccacgaaacagctcatcactttgaagcgggattagcctatacattgccggttgaaaagtttcctttgtcaatcgcttggtacactatgtttgccggagctgacaaagatgataaaggcaggcagaattattcttcgtatgttgaactcaactatccgttcagtgttaagtctgtagatttgaacctgacttgcggatttctgccttatgaagctggggtaggagtatatggcgttcctaacagcgggtttgccgtaaccaatgtggcactgaaaggtattacggaaatcaagattactgacaatttctcaatacctgtatttgcacaagccatttggaaccctcgtatggaagatgcacatctggtattcggctttactttaaggccatgatttatttagatataactttagaactcatgaattagtgttggatgcccgtggcggtcgtgatgatcgttacgggttatatggcatatataagacaagtaaaaaaacagaagaaatgagtagggaagaaagcgtacagcattttcttgatttgattaaaaagtcgcggcgtggcaagttcaaagtctacatcggcatgattgctggtgtaggtaaatcttatcgtatgcttcaggaagcacacgagttacttgacaacggagtagatgtgaagataggctatatagagacacacgggcgtgccggtacggatgctatgttggaaggattgcccgttgttcctcgtcgtaagatattctataaagggaaagagctggaagaaatggatttggatgccattatccagatacaccctgagatagtagtggtggatgaactggcacataccaatgtggaaggtagccggaatgagaaacgctggcaggatgtgatggatttgcttgatgagggtatcaatgtgatttctgccgttaacatccagcacattgagagtgtcaatgaagaagtacaaggcatctcgggtattgaggtgaaggaacgtattcccgatagcgttttgcaagaggcagatgaggtggtgaatattgacttgactgcggaagaattgatagcccgtctgaaagctggaaaaatttacaagccggaaaaggtctctactgccttgaacaatttctttaaaacggaaaatattctccaattacgtgaactggctttaaaagaggtggctttacgggtggaaaagaaagtggagaatgaagtggttaccagtgtgggagtccgtcatgagagatttctggcatgtatcagcagcaacgagaaaacaccacgacgcatcattcgtaaagctgcacgtctggcaacccgctacaatacttcgtttgttgccctttatgtgcagactcccagagaaagtactgaccgcatcggtctggcaaatcaaaggtatttattgaaccacttcaaattggtgaccgaactgggaggggaggtcgttcaggtgcaatcgccggatgtgctgggaagcattgttgatacttgtagggagaaacagataacaactgtctgcatgggaagtccgtcactttcttttccgaaatcattgttcatgatattgaaataccgaaaatttgtgcgtgatttggcacaagtaaacatagatttgattatacttgcataatattaattcttaggaacattatgaatattcgtacaaaattgatactcagcgtaggggtattggctggaatgattattttgttggttgctctttctgtggtgaatctacagatactgacggctacagagccggatagtcctgctgctgtaccgggattgcaacgtgcattgctctggatttctgtgataggtggggtatgtatttttgccagtatcatattgttggtatggcttccccgttccatcagcaaacctattcaagaactgacgcgtgggattcttgaaatagcgaaccataattatgagaaacgtctggatatgagtggacacgaggaatttcgtgaagtggctgatagttttaatcggatggcggaacgactgacggagtatcgcgccagtacgctgaacgacatactttctgctaagaaatttcttgaggctattgtgaatagtattgatgaacctattattggtttgaaccgtaatagggaaattctctttatcaataatgaggctttaactgtgctgaatttaaaacgggaagaggtaattcgccgttcggctgaggagctttctttgaagaatgatttgctccgccgtttagttcgtgaattggtaaatccgggtgaaaagaaagaaccgttgaagatttatgcagacaataaggagagttactttaaagcttcttacattaccattataaatgcagaggctgatgatgacgaacctcataatcttggcgatgtgattttactgaaaaatattacagaattcaaagaattggatagtgccaagactacttttatctcgactatttctcatgaactgaaaacgcctatatccgctattctgatgagtctgcagttgttggaggacaaacgggtaggggtgttgaacgacgagcaggagcaattatcgaacagcattaaggaaaatgctgatcgccttcttgggattaccggagaactactgaacatgacgcaggtagaagccggtaaactgcagatgatgcctaaaataacaaagcccattgaactgatagagtatgccatcaaggctaatcaggtacaggctgataaattcggcattcagatagaagtggagtatccggaagaaaaaatgcctaaattgtttgtcgatagcgaaaagattgcttgggtactcaccaatttgttgagtaatgctatccgctattccaaagagaacgggagggtggttatcggcgccaagcatgacgaggattttgtggaaatgtatgtgcaggattttggaaaaggtatcgacccgcgttatcaccagagcatttttgaccgttatttccgagtgccgggcactaaagtgcaaggtagtggcttaggactttccatttcgaaagactttgtggaagcgcatggcggtacactgactgttcagagtgagctgggtaaggggagccgcttcgttatccggttgaaagcgtaacgttttctattttttgcggtactgttgcggagacatgcctgtttgtttcttgaaaaatgtaccaaaataagaagcattgggaaaattgaagaaatcggcgatttcctggatatttttctgggtgttcttgagtagtgagatgcttttgcggatgatggatttgaatatcagttcctgcacggtgaatccgcagacggacttggatagtgcagagaggtatttgggtgataagcagagtttgtctgcataaaactctacaccgcgttcttccgtgtagtgcgcatctatcaactgaatcagccggataaaaatttcatgtttgtggccaaccgttgttttaaggttcatcagtttacggttgtaaatggaacagatgcggtatgtgagtcccagcagaagcagcctttgttcgttgtcgttgaaggtgttgttgtctaagtgcagggtattgtccagtaaggacatgtatttcagaacttcttcttcgtctccggtgttccatacgtagcatggttcggtccggagctgcatgtataggtacatggttgccactgaattgcctatgatgtcccttatcggttctatctggtaaatgaatatgaatagttgcaggtcttccgattcgctcagcacttggaagagggaatcttccggaatgaaaactgtttcgccagcctgggccgagaatactttcatattgagcgaaaaggtgaagttaccctggcggcaaactatcagtcctgctccattaatcataaaaggtttcttcagggaggtgggaaaggagcagagcataccttctgaactacaaatgttttctccgtttgacaatgcgtggtccaagtgggataaacgttcttgttgggtatccataacagacaaaattacaggttgtactgaaaattgtccgctaagttagtaattttcgtttaggataccgcacgacaagcacaaatatcatgcaaatcaggcaggcatagagtgtccatcctgccatttcctttatagcagagagagtggcttgtacttggatgcgtcctttggtggatatggcagccatgttgattgcttcttgtttgctctttccctgatattgcataccttgtacagtttgggtaaacgaggcggacgcttcggggtgtagcatgtctacattctgtgcatagcgggtgacgtagtgctgctggcgttcttgcagtacattcgtatagagtgcggctccgatgctgggagccaataccatgcgtacggtaagcatggtgcatatccaggaagaaagatatttgtaaggcatgcgttgggtggcgtaggttggaatcagcgaatagaggaacatcataccggtagaacggatgatgaccggatacttcatccgttcgtacagtcctgcaccttgtacctcgaaatacatgaacatggtggaaagccccaatagaaggaaaccggcggcaaagagatatttgaagtgtacgcctttcacactgagccagatggtggctataccgccgatgaggtagcccagcatggaccagttgcctagggtggcgttctgaaagttgtccagtttcatgcctatgcctgtgaatacgttgacaaacatggcgctggaattcagtaccattaacagaaaatagaataggaaacccatacggatggtgcgcagtttgaatacatcgagttgatagtaaggattgcgttgggtagactcgatgtagaggaatataccaccagcaatgatggcgcagactgtggcccatcgtatggttgggtcgtcgtaccagtcgagcactttgccataagtaagcacgtaggtaatgcaagccagtgtgatgcagaagatggaggcattgccaaactgcttgaggttgatggggaagcggcgggtggtatatttatgataaggcatagtgatgaatgtgatgaggatgcaaagtaatagtagccccatcataaagtagtgtatgtactgccattcgtactcaaaggcgagccaggcggtgagcgaggttcccaattgtcccagtaccatgaagaataggtagatggcaggttgtgccgcactccgttcgatgtccagcttgtcccagccttcgccggttacaggctcgttgccgggtgtaatcttatcgtacgcttcgatatgccctgcatactttatgagggtgaagaggttgaccatcatcagtaccattcgtaggaatcccataaagatgctgcatagtgccagcaggaaaacactgtctgtcttggcacagatataactgaagatgtacatcagggagaatcctgccagacacatcattttctgccggcgtatgactaccagcctatatagaaaggggcagaatgccgccataccgatggaagtggcgaagttggcaaactggatatgctcggaaatgatgccgagcccgctcatcatttcggtgcttgccaccgagtaggtaccgcctacagtcagtatcggcaaaaagaatacgaataggatgatgatacctaccggcttaggtacccagttgtagaagggatagttcttgggggatgagggcatggataattaaaaattaatcattaaacactaatcattattccatcttcgctttgactattaccatcataccggcggcaaggctgctgttgtcttctttggacaaatcggtaaagtcgatgcggactgggatgcgttgctgtatcttcacgaagttgccggcagaattatccgtgggcactagggaatatttggagccggtggctccggagatggcagtgatttttcctttgaattctttgtcgctgatggcatcgacggtaatgactacttcttgtcccaagtgcagattctcaatctgggtttccttgtagttggctataatccacttttgtgtgtcaggcagaatgtaggtgatggtttgtccggcagtgatgaattgtccttcttcaagagtacgccgccccaatttcccatcacaaggagctactactacggtgtaggagagattcagtcgtgccatttcaagtgcggctgttgcccgttgtatggcagcttcggtattttcacggcgatgtgacacttcgttcacacccgacaaggcagctttctgttgtcgtttcacggcttccaacttcttgtgggtagctgcatattcggtttctatctgttccaattgaatgggggtggcagcgtttctcttcaccagattctggtatcgttggcggtctttctccagcttggtaaggcggatttctatctctgctatggaggcgtcgtagacagaggctgtagtttgcgtggtttgtagtgtggcaccaatgactgtggcaccggcttgtgcatccttgagtgcagcttcagcttccatgactctgattttatattcccggtcgtccaatataagtaaggtatctcctttgtgtacttcttggtgttctgtgaaacaaattttcttgatatatcctgatgcgcgcagattgacgggagatatgtattgttcaatctgtgcatcattactggtttccgtccgtttgtagttcaaaaagaggcagaccacttgaataattccccagataaggatagctattcctaataggctgacaacgatttgccaacggcgaagcttcttcaatttccgtgctttttcttggtgggtacttgcggtgttattgttctcttttgtttccatattttctatattatattgtttacttattattatatatacatccgtccttgaatacgggctctattcatcttcctctttaatgaattgaggggctcaacgtctccagctgtcccgtcagcttcagcaaagtcagattggttatccggtaattgtagtgggcactgatatagttgttttgggcttcgctcatccgcatttcgtcctgcaacacttcggtcattgaggcgattccttcccgataacggtccatggtaacggtatatacatcttcagcaagcagataattgtccttctgcttcttaaagttacgctggctgttcatcaggtcattggtagcattcagatattgtgtctgaagattttttcgggtattctcttgagcgagtttgatgttctctatgtcaatggttgccttacgcatcttgtagcgtttgtccagtccgtcgaaaatgggaatgcgcaaggagagtcccactccataggagcgataccaatggttggaagggccggaatggaaccaatggtaagctttgtccgtataggcagagaacatccagcttcccgtcaagctcaaggaggggatgtaaccgttgctgactattgttttttgttgctctgcgagttgtttctgtgattgcagcagctgtagttcatatagtgtttcagatagcccggtgagtgctgcgggcgtaatcatttctgtattcaccggtaccagtgctatattttcttctgccggatagtcgatgatgtatttcagtaggttcagttgctgttccatcatggcttgtgcgttgtcgtgttgcaccttgaggttctccaggttgatgttgacgcgtttcacatctacttccatagccataccgttgtcatagaaggcctgagtgatatctctcaactcttctaggcgagtgatgttggcttttatcaaaataatctgttcagctgtaacctgtcctaggtagtacatttgactaatttgaaggatgaggtcttctcttgccttttcataagaaaggcgattcatctcatccatggttttagctatggacagagtggtgtagagtgtttggttataaagtggtatctgcagctgtaatccgaagttggcgttgtattgtaaggtttgggttacattgtagggattgccgtacgctgagccgtcagtgacggatacgggtggatcgatgttgtcgttatagttggcaaaaccattgatttggggcaacagtttagcccggttttcagagatgccgtattttcctttttgtatttccttccgtttgctttgcaaggacaaattgttttcgatacctattttgaggcagtcctccaaggttagggtatcttgtgctcttgtacctagtgcaagcagacacagaaaggaaaatgtgaacagttgtcttttcataatagtcacttgatatttgcacacaaagttagtggcttaaaatgcaagaggactatccatatatcaactgtttgtattcatattttcctttttactataatttgaaaacaaaccatagtaaaaaacgagtattaaaaacaaaaaagaccgccaagagtggaagcctcctaacagtctaaatcttctttgtagcgggacccgggattgaaccggggacctcatgattatgaatcatgcgctctaaccagctgagctatcccgccatcatttctcgattgcgggtgcaaagatatagcttttatttaaattgccaaaacttttatggatattttctgctttttcttttgctgatagggtgctgaagtggtttgcagtactttttattaaaagtctttgtataacattatcaatgaattaggggtgtatggaaagggaggtataaataaatttgatgatttattttctgtaattagaaaaaagtatttatcttggctggcgcaataaaaagcagaatagactatggaaagaaagaaaatacatttggaatatctcttgaatgcgacttctaaaagtattctttgggcagcgataagtacccctactggtttggagggctggtttgctgatagggttcagtcagacgataaaacagtaacctttttttggggaaaaacagaaaaacgtgatgccgagattattgccgtgcgggcgtattcattcatccgcttccgctggctggacgatgagaacgagcgagaatactttgaactgaagatgacaaacaatgagttgaccaatgatttcgtattggagataacagactttgccgatatagacgaggtgggtgattcgcgtgaattatgggaatcgcaagtggatactttgcgaagaacttgtggtttttagttaactttagattaaaaatttcccgtactccctttttttgtactacttttgtgctctcattgcatgaaacgagtaaaatgctgcgcataaaaaagttagatatatttgttttgaagagcttttgcatgctctttatgggtactttcttcatctgcctcttcatctttatgatgcagtttttatggaggtatgtggacgaaatggtaggaaaaggattggagatgactgtccttgcacagtttttcttttattctgcgctttcgttggtacctgcgtcgttgccgctggctattctgctggctgcccttatcacctttggaaatttcggagaacgttttgaattacttgccatgaaggcagccggtatttctttattgaaaatcatgcggcccctgattatctttatttgtttcatctgttgtgtctctttctatttccaaaatgtcataggaccaaaagcccaaacaaaattatggactttgcttatttccatgaagcagaaatctcccgaagtggatattcctgaaggtgtgttctacgatgaaatagatggttataatctgtatgtgaagcataagaaccgcaaaactggtatgctgtatgacgtactgatatataattttgagaaaggttttgagaatgctcaaattatcaagtctgattcgggacgtctggagatgacggctgacaaacagcatttatatttgcatttatacagtggtgagcagtttgagaatttgaaatcgcagaacatgaaccaaaggaatgtgccttaccggcgtgagacattccgcgaaaagcatgcaatcattgagttcaattcggattttaatatggtggatgcaggtatcatgagtaatcagtccaacagtaaggatatgagaatgctgcaggcggatattgattccatgaaattgcagaatgacagtgtgggacgtggttattataaagaagctatggcaggaacttataaggtgacagccagcttgtctaaagaggatacattgaagattgaaaaggcctatttaggtgagtacaatgtagacagcctctacaatgtggctacactgatgcagaaacagaaggttatatccacggccgtcagccgtgcagagagtgcggggagtgactggagttttaagagctttaatatatcgcagactgaaagcagccttcgacggcacatgacttcctggcatgagaaactgactctttctctggcatgtctcatcttcttctttattggtgcgccactcggaggaattatccgtaaaggaggcttgggaatgccggtggtggtttctgtattgatttttattatctattacatcatcaacaatacggggtataagatggcccgtgacggacagtgggttgtctggatgggtatgtggaccagtactgctgtcttggctccattgggtgcgttcttgacatataaatccaacaatgattcagtggtattgaatgctgatgcttatataaattggttcaagaaggttgtgggtattcgcagtgtacgccatctgttccgtaaggaagtaatcatccatgatcctgattatacacgtattccggaagagctgaaggctttgtccgtagactgtcgtgaatatgctgatagaaaggggttgaaacgtgctcccaattactttaaattgtggatgactgatagccaggatgaggcagtggaagatattaacgaacgtttggagagtctgatagatgagatgtcgaatacaagatccgttactttgttgacagcgctgaacacctatccggtcatccccatccatgcgcatgtccgtccgttccgcaattattggttaaacttgctctgcggtattgttttcccgataggcttgttcttttatttccgtatctgggcattccgtatccgtctgaataaggatatggagcggattatcaagacaaatgaagatgtgattggaatcatagaaagagatcagaataaataaaaacaaaatagattatggaaaatgtaaagttgaatacgatagaagaggccattgaagacttcaaagccggtaactttgtgattgttgtggatgatgaggaccgtgagaatgagggtgatttgataattgcagctgaaaagattacaccggagaaagtaaactttatgttgaagcatgcccgtggtgtgctttgtgctccaattacagtttcgcgttgcaaggaactggatttgccgcatcaggtatcggataatacttctgtattgggtactcccttcactgttactattgataaattggaaggctgtagtaccggggtttctgcggcagaccgcgctgctactatccaggcgttggccgatccggcttctactccggccactttcgggcgtcctggccacattaatccattgtatgctcaggagaaaggtgtgttgcgccgtgccggacatacggaggctactattgatatggcacgtttggctggactttatccggcgggagcccttatggaaataatgaatgaggatggtacaatggcccgtttgcccgaattgcgcagaatggcagatgaatttggcttgaaattgatttctatccgtgacttgattgcctaccgtttgaagcaggagtctattgtagaaaaaggagtggaagtggatatgcctacagaccacggtcatttccgtttgattcctttccgccagaagtcgaacggtttggaacatgtagctttgttcaagggtacttgggaattggatgaaccgattctggtgcgtgtacattcttcttgtgccactggtgatatattcaattccaaacgctgtgattgtggcgagcagctgcataaggcaatggagatgatagagaaagccggtaagggggtagttgtatatctgaatcaggaaggtcgcggcattggcctgatggaaaaaatgaaagcatataaattgcaggaagaaggcatggatactgtggatgctaatatttgcctgggacatctggcagacgagcgtgattatggtgtgggtgcccagattcttcgtgagataggagtgcacaaaatgcggctgatgaccaataatcccgtgaaacgtgtgggcttggaggcttacggtttggaaataacggagaacgtagctattgagactactccgaatccatacaacgagcgttatctccgtaccaagaaagaacgtatgggacatacacttcatttcaataagtaactgtctttttgttttcttatatcaaagaaaatcgcttattttgcaaccggatttgcgtaacaatcattaaatagtaacaaaatgaaccaattatcagatcgtttaaacagtttgtcgccttctgcgacactggctatgtctcaaaagagcgcagagctgaaggctcaaggcgtagacgtaattaacctgagtgtgggagaaccggacttcaatactcccgaccacattaaagaggctgcgaaaaaggcgatagacgataacttttctcgctattctccagtgccgggttatcctgccttacgtaatgcaattgtagagaagttgaagaaggaaaacggtctggaatataccgccgcacaaatttcttgcgccaatggtgccaagcagtcggtttgcaatgcaatcctggtattggtaaatccgggtgacgaagtaattgtacctgctccctattgggtcagttatccggaaatggtaaagttggctgagggtacgccggttatcgtacctgccggtatcgaccaggactttaagataacacctgcacagctggaggctgccatcaccccgaagacaaaggcgctgattctttgctctccctctaaccctacgggttcggtgtacagcaaggaggagttggcaggcctggccgcagtattggcaaagtatccgcaggttgttgtgattgccgatgagatttacgaacatatcaactatatcggcaagcatcagagcatagcacaattccccgaaatgaaagagcgtacggtcattgtgaatggtgtttccaaagcatatgcaatgactggttggcgtatcggtttcattgcaggtccggaatggcttgtgaaggcttgcaataaattgcagggacagtatacttccggtccttgtgctgtatctcagaaggctgctgaggctgcttatacgggtacacaagttccggtggaggaaatgcgcaaggctttcgagcgtcgtcgtgatttgattgtaaagttggccaaggaagttccgggtttcgaggtgaatgtaccggaaggtgctttctatctgttccctaaatgcgattcattcttcggtaaatctgccggagaacgtaaaatcaatgattcagatgatttggccatgtatctgttggaagtggctcatgtggcttgcgtaggtggtgcttctttcggagctcccgaatgcattcgtatgagttatgcaaccagcgatgaaaatatagttgaagctatccgtcgtataaaagaagcactggctaatctgaagtgattctaacttctggcactataaaatattttgtgtaaatgtaaaatacgggattcagtatgggttccgtattttttatttaatagctttgcaaaatgaagaaaattatgaaagagaagaatcatgtagtgcctgatgaggtattaagtaaggagttccttagccagttcaagacagaagctgatgtcagcaagtttctgaagcagttacacgcgcaggtattggagaaaatgcttgaaggtgagatggatgcgcatctgggttatgagaagaattcggtttccggtcataacagcggtaattcccgtaacggcagctaccccaagaaaatccaaactgaacacggtgaagcggtcatacctattccccgtgaccgtaacggtgaattcaatcccatagttgttcccaaacacgagagtcgtgggctttccatagagaaacttgttatctccctatattccaaaggaatgagcgtgtccgacattgaagaggagatgcgtgaaatctatgaaatagaactgtccacatcagccatttccatcattacgaacaaagtcaaccaggctgctcaggaatggcagaaccgccctttggatcctgtctatctcatcgtttggatggacggtattgtattcaaggttcgtgacaacggaaaaatcatcaacaagactgtctatctctgtgtcggtctgaaacagaacggcttgaaagaagtccttggcatgtgggtgggaaaatcagaaagttcttcattctggatgggtgtcctgacagatttgaaggcccgcggagtacaggacatactgattacctgcactgacaacctgaacgggtttaccgacaccatacgtgccgtatttcctcagtcttccacgcaaatatgtgttgtacatcaaatcaggaactcctgtaaatatgtcgtttacaaggacaagaaagagtttacagccgatatgaagaacatctataacgcgcccaacaaggaggctgctgccgtggaactggataatctggaaaagaaatggggagggaagtacccttatgccatcctctcatggaggaataactgggatgacctgactgttttcttccagtttccattggaaatcaggaaaataatctacacaacaaatctcattgaaaatctgaatggaaaaatcagaaagtacactaaatcaaagctttcattcccgtcggatgatgctgtgaagaaaatggtatacctcgctttgatggagattgagaagaaatggacaatgccgattactaactggggattgattatgaaccaatttatgcttatttttgaaaacagaatccagatataagagaacttataactgaatcccgtttctatttacacaaaattatggatactgcctaacttcttctacaaacttattttagcaagacatctgtcatgctgtcacgaacagttcgtttcatcaaagcggactgttcgttttgttatgacgaacactttgttttgttatgacgaacactttgtttcattatagcgaacactctgttccatacagtataaacactttgttttatattatacgaacattttgttttctactatatgaacactttgttttatacttatggaacaaagtgttcatgtctgtgaactaacgtattatccgtatatagaaaataacaatgaggggggtgaaggtactgaatttcacgtgggggatataaaaaagcgcaggcagtttatctacccacgcttttgtttttgatactgggattgtattattctcccggatgaattgcttcagaaggacaaacatctgcacaagtaccacactctgtgcaagtctcagggtcgatatgatagatatcaccttcagagatagcgccaaccggacactcgtcgatacaagttccgcaagcaatacaatcgtcactaattacgtaagccattttcttttagatttaaattattattagtactaattcgtttggcaaaaatagtggttttctttattacttgctatcaatcttgattaaaaacgtataatttgtatgtcgtctaaataaggagtcgagaaagcgacacagcataccgcagagactgaaaaatgttcgtttttgaatttcgtaaacgaattgctctgatactattggctttagctggagcttaagccgattttcaacttttaagaaagagtcggataggtaaaagtaatcactgcgatttctccttcttcgacattctctgtttgataggtacctttgaaatgttcaaagaacaactggttgattttctgttgcactgatactttttgagaggcaaacctggaatcggctataggactgttctctatccggcatgcgatgatgtgtttgtccggatggttgaccaagaacatgctgactttgcgcgtttctttgcagtcgttcggataaagcagcatacttgtcactatttgtgtaaggcggttgacgtcggtatggatacgcacatctcccacctctacttgtagttccaggaggatacggccttcactacgcatttgtattagacaacctagttcgttgcaccattcttttacattacaatcctgcaattgaaatttcatcatattcgcttccaggcgtgagaggtccaatacgtcgtttaccagttggataagctcacccgaattggcttggataatacaggaatactcttttcgctcttcttcatccagctcgttgtcggtggaaagcagttgggagaaaccgactacattgttcagtgggatacggatattataactcatattggcaaggaaacggctttttatttcgttggcttcttcggcaataattgccaatttacgcatttccttctcatcttgttgcagccgcttcctgcttctatacatatgtaggttgaaaagtaacaaggctataatgatgatgatggaggtaacgagacagatacggtgaaaagtggcttgccgctgttctttttggaaaagcagttggtccatattatataggctttgtatctgttctatctgtgaggtggagaatactgtatataacgaatcttttgccttggttatttgtttatagacaggaagtgcgtcgtccggaaaccccatctttactaatatatccgctttctgaagtccataaatcatggcatcatccagtgaaataggggttacaagttcaatggcgtcttctaaataaaccaaagctttgtcgtattcttttgtcagttggtaatattcggcatatgctgccaaacgtatcaaccgataaggaagaaatgaagatgtactgagatgccgctctgctttctgcaaatattcccatgcttccgcaggacgttgaaggcgggtatagtaaagggcgtattgtaaatctatgagcagatacaaattggtatagccgtttgtcagtacggtggtgccttcttcctgcaatctgttttttgcattgttgagttcctccagataccggaacatgttgtcattgtcatgcagatatgagtaagccagtaccgcttttgtcaataaatcaatctgagtggcaagggaggaatccggacttgtcagttcaaaagccttgtttaggtaggtgattccttctttgtaacgtaaggtattgaaatatccagtcatcaggcataggcatgcttcgcgcataccgtcatggttgccaagactttgagccttgtcgtacatgtcttgtgcttgtttgagggctaattcaatcttctggctgatgacatagaattctatcatcatctttttgcctctgaagtaatgacggtagtagttgtgctcttcagacaactgttcgagcctcttcagccattgttctgcatgtttttggtccagtaggttgtagtaataaataatgtgcgcatatatggccgcactctggtaaagtatatttttctgggcgatggcctcttccagtaatttgttctcgtaatagatgaatgtcggtgacagttggtcaagcagtgctatctgatatagggtttccaatctggtggtatcggctggggaggcaagatatatacgtagcaggctatccttggcttctgtccgtcgcacatctgcgtgtgcggacggtaacagccagcataaggcaatgagcaatgtaaatatctgtttcatttcttattctcctttctgcctgtctggcttatggggtgggtgaagcagaagcgtgagccttcggcatactctgaatcaatccatatttgtccgccgatatgctctatgataagttggcatatggagagccccaacccactgccttgagcattctcattcagcttttcaaaacgttggaaaatgttggcttgcttgtctttgggaatgccgcaaccggtatctgttacggtgaatagtacggtgtcgtccgtttctttttccagctttaggacaatgctgccttgtggggtaaatttggtagcatttatcagtaggttaatcaggacttgctgcaggcgtgagtcgtcagtctcgatgggcatttcttccagctcggtggtgaatgtaagttcagcttgtgtctgtttcactttgttcacggtatctatcacgtttctgcagatgcttacggcatcatgttgtgcaatacagaattgcagtttgccgaattcaagactcgatagatctatcacgtcgttaataagcttcagcaatagttctgagttctgttggataacttcattgcactgacggcgtgtctcatcgtccagtccctcttccgtcaatagggatgaaaagcccgataatgcattgagtggggtacggatttcatggctcatgttcgagaggaacacgctttttgcacgcatggcattttcggcatttatccgtgatgttgccagtttttgggtggagagtttcaccttttcccgttgccttttgagtaggatggcaagtagaacaaataacgttactaatgccatcgttcctaccaatatgctggttatgattttattgtattcgttattgctggccgtctctgccttatctacctggtattttgcctttatcgtattgatttgccggatatagctttgtgaagcgagtgtatctataggaggatacaattcctggtagattcggcaggcttccatggccatgccttgtattttacagagatagattttttccagcgaagtccagcggtaatacgtggagcgcttattaccggagtattctgcttgcaatttggagtagatgtccagagcttgtttccagtattgtttgtcccaatttcccatggctctatagtaggcggcagtggtataatccaagtgaaaccgatagaacttctctgggtgcagttggtaaatggagtccattttgtggagccagatgtttgcttcatcaagatagtcttgtgagaggtgtccatgggaaatggcaaaattcgtcttttcgatgcagaaaaagaagtctgtcgggtagtcaggctcctgatataatattttctccagctcttccaggattttttccgcttcttccagacgtcctttccgttgcagaacgttggacatttttaaaagaagctgtgccctatatggatgctggtctgaaatgttggatagttcagtcaaagcatcctggtatgattccagggctttatcccccatgttggctattgtattataggcgtctccgatggcttggttggccactaccataccaaattggtagtctgttgctttagcttcttcgtacataagttgtgcccggttcgtcgctaagctgatatcgccgcgcaatgtataggcattggccaattgaagttgtaatagaaaatacgttgttctatcttcatttgattgttgggtgggaagaagttgctcgctccacgcaatgacactgtctatggatatggagtcatcatagagaacttgtcttttgaccaatgattgcagaatactctgcttttcttgattggctattgtatgtgctgataagacagaagtatacagtatctgccccaatagcatccatataatcatttttgttctcaaatgtttgtttgcctcttttgtttattattggcaaaaataaatataaatgaataaataaaaaattaaatagatgctttttttatcctttatactcaatttgttagcaactttatgcaggcgattggaagggattaatagagttccaaaccaaactcttcttttagttgtaatagtgcactgttcttttgtgccatcatttggaatttttcaacgcgtccataggcacgtaccttttcagtaggagcactaatccggacagtcatggtgactttgcggttctttagccgggtacgtaggtaattttgcagagtgggtatcatgccggtaaattccttggcaacgatttcattgtctaccacagcctcaaaagttgtgtcatttattaaagtgatgcgcatgttctgcatgcgcttggcaatggctacttgctccttgggcatacgtccggcatactcctgccagtaatagttcaaatccctttcattgaagatgtagtcttcttccggttgtgctgcttggtgggcggcagtagggttagatgaagggtttctttgttcctcttctatatgggggcgtttgatggagacccctaatccggacattttcatgaccggaatttttttctcttctctcccttgcgccattaatacggcagcaggtgtggcatgtggagttgttgcattactatgctgcgtggcagcaggttggggagtgctgtttgtctgtactgtcggctgtacggtttgttggggcatggcagcagtggcctgtggctgctgagcggcggcaggctgcgtgaatatgggttttatagcttgtttagggctgcgcccattggcaccgtcgtcctcctcggcggtcagttgtgccacttgtatcagagtgagctctaccagtagccgtttgtttttactggcacggtagttcaggtcacaatcgttgcagagcttcatggcacggtaaagaaaagggagggggcattgctgtgcttgtgcttggtaacgttcgcggatgcttgcgcccacttcaagcaacggcagtgtcgccgggtctttgctgacaagcaagtcgcgcaggtgggatgaaagtccggtgatgaagtggctgccgtcgaagcctttgttgagcacatcattcagtaatagcaacgcgtcactgattttgttctcaagaaagaatccggttagtttgaagtagtattcatagtccagcacattgaggttttcaatcacgctcttataggtgatgtgtcctccggtgaagcttaccacctggtcgaagatggatagtgcgtcgcgcataccgccgtctgctttgagggcaatgacattcaacgcttccggttcagcagtgataccttctttggaggcgacatatgcgaggtgtgctacggtatcttccacaccaatccggctgaaatcatatatttggcagcgtgaaaggatggtgggcaatatcttgtgcttctcggtagtggcaaggatgaatatggcatggcgtggaggctcttccagtgttttcaggaaagcattgaaagccgaggcggacagcatatgtacctcgtcaatgatatatactttgtatttgcctatctgaggtggaatgcgtacctgctccaccaattggcggatgtcatccacagagttgtttgaggcggcatccagctcatggatattgtaggagcgctgctcattgaaggcagtgcaggattcacattggttgcatgcctcgccgtctgctgtggggctcatgcagttgattgttttagcaaagatacgggcacaagttgtttttcccacgcctctcggaccgcaaaaaagataggcatgcgccagttttccggtggcaatggcattcttcaaggtagtggtcagtgcacgttggcctactacggactcaaaggtcgagggacgatatttccgtgcagatacgatatagttttccatatttgggatattctttgctttttgtgcaaatgtacacaaaaaaaagaaatctttcggttattcctcttatctttgtgacgtgaagttatatgatggacaagctccatcatgaatgataaattgctaaatagtagataacgagatggataaacttgcttctctttggtcttttgtccgcaagcataaatatctgattacgcttgcgttgtttgctgtaattatcgggttcctggatgagaacagtgttgtacgccgtttgggttacgcccgggaagaaagccgtctgcgcgatgaaatagaaaagtaccgcaaggaatacgaggagaataccgaacggctcaatgagcttgccgtcgactccggtgccatcgaacggattgcccgtgagaagtatctgatgaaaaagcccaatgaggatatttatgtatttgaagaagatatagaagaatgaaacaactgatacccgcccttttcgcagtaggggccgtgatgctcttggcaggagctgccgtttatatcacgggctggcctctttcaccttatatatatactatcggcgctacgatggttgctttggcccaaattaattctccgtccaaatgtaaaagtcccactgtcaaacgcctgcgccgacagcaaatattcggtgcgcttttgctggtgcttacgggggcattcatgctctttacaaggggcaatgaatggattgtgtctctgacgatagccgccattcttgagctttacacttcggtacgtattccacaagaggaggcgaaagaaggtttaagctaaatccggaacatatattctgcataaacaagaggggctgaactcttttatagagccagcccctttctcatttagttaatcttctgcgttatccgtctatctttctaccttttctactgtcagaactgccgaagagacacctgccgttacgtcaactgtgaaccggtaagcgacaccgttttccaggcttttgccttctacgaggcccaagttgccggcatcacgtccgttggtaccgtcacctataaatactaagtcactggtggtagacaaggcatcgtttttatattcacctccccaaccttgctggtggaagaacttgaagttgatgtcatcagatttgatttgctctcccgctactactgttacctgatacttcttcgcttcaatctgtgacatgcagagacctttttctgtagtccaacctacggcattggtcgctacggaaggtttaccgataccgtcaccgataatccaaagggcgccggttccgtcatcgttcagagtggcggtgcttgttccgttcattttcaatacttccagataattcagggccaggttggcaatgacgcgataagttccatcgatgggcaggaacttcagcgaaccgtcttcattcttttcgaagaagtcggggtctatccaatattggtcgaagttgggaatgtctgcagtgatgttgtccccttgcttcagattgaggtcgatgctgtaatggtcatcatccaccatctccatttcagaaccgttcagcagtagtttcacgaaaggagcggctgcataagtcaacgtattgaaggagatggaatattctccagctgacagattggagaaggtaatttcactggaggtaccttgtgtaatggcaccgttgctccatccgaagttgatttcattcccgttggcgcctactttaggagctttgatgtaacctttcactttttgtgcaaattcaccggtcacgctatactgattggctgcgactttttccatgcggtattcttggtctccggaaatcagagttaggtaggggaagtccggacgactcagcgccacgtcatagcttttttctgtaattgtgaaattgatgttctgcagaatgaacttcaatgtagctgttccgttgggaatatttgccagatagggaacatatattttcccggtatagtcttgaccgtttacttttgtacggattatagtctctgacaccatttcgtcgctgaagtataaccgcgcttttaacgtggaaaggggtacatctgcgtccgatgccttgattgtaaaaggcagactgtctccgaacaaggctgaagaaggttctgcctgaaagtccattgtcgggttgccgggaaccggatcgtcatcgctgcaagcattcagcatggctatgcctgccaatgccattagatagtattttaagcttttcattataatcttctgtttaaattattagttttattttttccaacggtaagaaacgactgctttggccggaacttcgtaggaaaagtagtgtgtgccgtcgcttacggtgattcgcttggcatctgcattgttgtttgccaatacgaatgcataggtaccgtccgtattctcgaaggcggagtaggtgattccgttggctgtgtaaccggtcgttccgatacgtacagctcccggtttcacgactgaagacatgtgcccgataaggtaataatgggaattacggacaattttagaatagtttgtattgtcaatatccactgcaccgtagcaggtcttgcaagaaccatctgaggggcttaccggtcccaggtcactgtctaacatcagattccacacaatggcaccgcggcaccagttgttggctgtccccaatgctatttcttccatatcgttaagcagacgtgcttctaaatcgcggccggagttccaggtgccgatagacgtttctgtgaaaagcaattccttgttggggtaaagcttatggatgttcagcagttcggaacggttgccgccataattgtggtaggcagcacctgcaatgtactgtgaggcttccgcatcatcataaatcttggtggggtaacttttttgatcggccagattgtcgtagttatagttatggtcgaaaacataaatctttgtagtaactccggcttctttgaaggcagggcccaggccggtcttgatgaagtcacgggcttcttcccatcccatgaacaaggatgctgagttaccgtggttcagcggttcgttctgcggagtcacagcgtggattttgatgccttccttttcgaaagcttgtatccattttacgaaatagtcgccatacgttctgtaatattcggggttcaagtgtccgctggcccatgagtcaaagggtacacgttcctccaggcttttcactttcatccacttcggacatgtccagggagcggcaattattttgacggcaggattgattgccagaatttccttcaatataggaatcacatatttggtgtcttccatcggaagggcaaagtgctcaagccccttttcgtcacagcaagtgaattcactgaatgagaagtcggaacaaccgatggcaatacgtacatagctgaagccatagccttctttgtccgagaatgtttcagtcagaaacttcgtgcggttctcttgtgtcatctgcatcaggttgtaaccggtagagccggtgatggctgcaccgaaaccgtccatttcctgatagcgggtggcagggttgagtgtcacggtagaaggtgacatgttgcttccggtgccgaaggccagcccggactttgtcaaatcataagtacgactggtgttcgttacatagagggtaacatcctttgcctcttccgtgggttggtctggcttgggttccggtgtaggggtgatgttactgtcattgtcattgccgcaggctgccagtatggtgaagcagcctaatgcggtagtgaatatatttcttaaattcatattcaattgatttttatattactcattagtattaatagcccgggttctgtatcagattttcgttctggtcgatggctccttggggaatagccagcagataggagttctcattgaacagattttcttgtgcatggcggccgctgtctttggcgtaaacggcgttcatcacttcttctaccttattgaggcggcaaaggtcgtaccagcgctgtccttcaaaggcaagctccatgcggcgttcgtccatataagcttggagcaatgcttctttactgctgcgggtgctttgtggaagtttgcccagtccggcgcggttgcggatgcggtcgatgatgtcggctgcaccgttcaggtcgggagcctctcccataatttttgcttcggctttgaggagcaggatatcggcatatcgcagatagataatgctgttgaacgcagagcggcatttgtacatgaaggcataatggtctgccggataatagttgctccatccgcagtcataccatacaacagattcattgtaacgtttcgtgtctccttgctcttcatagaggcggataaggtcacgggaaggggtaatccatttggcccaggtgaaactttcatcccagttgctcaagttacggccgaacatccaagtacaccagttgccggagccgggaggaaagtgggcttcgagaattgcctccttggtattgcgtacccggcagtcttttttttccgtatcatacgcccaaaggtcgctgaagtcttccacgaggtcgaagccgtcggcagcaagttcatcggcatatttgataacctttgcataatcgcgcagaggtttttctgcatagaccttggcaagcatggcacgtgccaccgatttggtaagtatgctcttgtctgatgtgtcgtttgtcggtgtgttggggttttccactgcttcagtcaggtctttctctatttgggcgtaagcctcttcagccgtattctgtggaggaaaataggtcgggtacatttcttctacgttgtcttcggtaatgtcaccgcccacggtagtgatgaccgggaagttaccccataagcgtaccatatcgaacatgaccatggcacggaatatcttggcttgtgactgatacttgccgcgttcactttcactgagtgccttgagctggtcacagcccacgatgatgcggttggcaacggcaatgtcgcctaagaaacggtcccagtcacgttttagtacagaattagagccttcaatggagttggtttcgtaaggcaccacttcggcccccgttgttccggcgtaggcattatcggaatgagcgtcaccgataagcagtttgtcgacataccagtgctcctgccggtcacgaaattttttgtgaagggttaccattgaagttttcacgtcttgcacactgttgaaaataggcttttcatcagttttgttcactccttccgttacatccgagtaggtgtctaccggattatagtccaagtcacatgaggttgcggtcattgccaacaatacaccgcaagctatacttttatatatatggtttagtttcataagttatttcttccttttttagaattcaacattgataccgaaaacgaatgatttgctctgcgggtaagttccatagtcgatgccctgtacagaaccgctgttgccatattggttcacttcggggtccatacctgaatagctggtccaggtcagcaagttgctggcggtaaagtaaggctgtacgcggctgataccccatttcttgaactggcggcaacggatgttgtaagagagtgaaatgtctttgacacgcaggtagctgccgtcttctacaaaataagtggagttcttgatgttgaagttggctttcgggacattcgtaatctgtccggggattctccagcgtttcaatacttccgttgactggtttttgccgtcgtacatgccttcggtttccatacgggacacattgaagatgtcgtttccgtagcttccctggatgaagatgctcaggctgaggtctttccatgtaaaggtgtttgtcaatccgtagatgaagtcggggttcgggtcgccgatataggtacggtcggaagtggaaatcttgccgtcttcgttaaggtcgcgatagatcaggttaccggtttcagggtctacgccgtcgctgatgtaaccgtagaaaccacccaaaggacgtccgggctcattgcgtacgatattctctttcaccacctcggcactgcttgctgcggtatagattttctgcaatgacagcttggtcagcttgttcttattgaaagaaatgttgaagtctgtatcccaggaaaactcgccggtcaggttgtgggagttgatggcgaactcgaatcccttgttggtcatctcgccttcgttacgggtgatgctggtggttgctgccgcacccgcaggcagacttacgttcatcaacatgtctgtggttttcttgtaatagtagtccatgctgaaggtcagtctgttgttcagtacggtcaggtcaaggccgatgttggtctggctggtggtttcccatttcaggtcacttgttctcaggttggcctggctgatgccgggaacagcatggtcgttgccctcttcgaaccacggtatgcggttgatgttgtagcgttgcagatacgagtaatcgcctatgccgctttggttaccggtctgtccccagccgccacggagtttcaggtcatcaatccaagtgatgtctttcatgaatttttccgatgaaatgcgccaggcagccgagaaggacgggaaaatgccccaacgatggtcgggatgcagtttggacgaaccgtcggcacgcatgttcatggtaagcatgtacttgctgtcataattgtaggacacgcgggcgaaataggaagagatagcccactgtgaagctcctgttccggtaccgtcccatgaaattttattggcggcattcagagtctgtatcttatcgtcccggaagtgtgagccgtttatccagctgttggtatagtccgatttggtataggaagaacctgccatgacgtcgataccatgtttcttgatgttggtgttgtaagtcaatatattgtcgaaaaccaatacggtattcatgtttcggttgtcggaagctgtaccgaagctgttgcgtccgtcggtggtcgatattggatcgaggaatgtggtgcttacaccgttacggcggtccagggctacggatgatttcaacttcaggttgggcagaaagctgatggtagcggctccggatgcgatgaggcggttctccttgttcttgttgtttttctggcgggccaggttttccatcgggttcatgatatttaccccgtagaagttcttattgtattgattcggcttttcagggtcccaaataggagcataggtcggtgtgttgataaccgagaggactacaccgccacggttggcacccgtaccggaaatgatgccggtgtttccgatattgtcggagtaggagatattggcacttacgttcagccaactgcgtatctggttgtcaatgttggcacggaagctatatcgtttgaagtacgtgccttccaaaatgcctttttcattcagataaccggcagagaggaagtatttcatcttttcgtttccgttagatacggacacctggtagttttgggtctgtccggttttgtaaacttcatcaaaccagtctgtctggtctgttagaccttcaagggcagcggggttgacagccccgatttcttcctgtaactcacggtattgttctgtattcagggcatccatgctcttggctacttttgtcataccatattgtacgttcagtgccactttggcattgccttctgctccggctttggtcgtaatcagtaccacaccgttggctgcacgcgaaccatagatggctgccgatgaggcatcctttaggatagagagactttcaatgtcgttgggagagagaaagttgatgttgtccacgggcacaccgtccactacgtagagcgggtcgttgctgccgttgaatgaggtggtaccacgtacgcggatgctcatgcctccgcccggttcaccgctgggttgcataaccgacacgccggctgctttgccttgcagggcttgggctgccgatacaatggggcgttggtccaaatcctttgtagaaaccgtggatacggctgtggttacgtctttacgcttcacacttccataaccgataactaccacttcgtccagcagttcgttatcttcctgcaatgtgatattcatgttggtggttgcttttacctctatcgttttgtagccgatgaaggatattaccagtgtggcattctgtcctacactcagggaaaactccccgtccagattggtaacaacaccgttggcggtacccttttccaatacggatgcgccaatgacctccaggcctgcagcatctgttactttacccgtagctgtcaatcgttgggcaaatgcatttgttgacattagcagtacgagtaatgtcaaaaggagcttgtaactccgcgtaagaagatttcttgtaatcattctcatagtactttaattgaaagatttaatttattattagaaaagtatgtcctaatagagattggtggttttccatagtacacttttctttctgtgctgcaaagatagcggacaaccctattcgtccgataggcaggtaatatggagaagtaagtctgtgtgaaatgtaaatatcagatatataataagttgtattcttgctgattactgtgtaaagtaaaggtcggccactatggaaggaggtctgtatatactgttttgtcgctttgagcggtcgaaatatctcttaaatttcatgtactttttagggtggaggtagtttatgtttagatagattaatttatctttgtgctctcagccttatatagataatagaaatgaaaagaaaaatcatagctttactatttttgctgatggggtgtacctttctgaatgcggcaccttacagtgaaaagataaaagaactgctggtgcgtcttgattctctgattgcgcaaaaaaacacgtttgctatgcttaaagaggcgaagattgcccagttgcacaagttgcgaaaggatgtgcgtactttggaggagagatattggctgaataaaaatctttatgatgagtattgtgtctataatgccgattctgcaatgaattatgtggcaggcaatttggacatagtttataagcagaatgataaataccggcagatggagtggaagataaaaaagtcttttctgttggctgccaccggtctgttgaaagaagcccaggatgagttggacggagtctcgggcggttcgctccccaaagaattgttagtggactattacggacaaatgttgtatctgtattcgcatttcaatcagtataccggtagtgaaatgggtactttgcatgaacattatgcacagttggagcgtgtttacaaggactctttgaatatggttcttacccctgaagaccccttgttcttgtggtataaagggcaggtagtacaaggtacggacagtatgtatgtttttaaagaacgtttgcagaagggaattcttaattctgcattcgacactcggcgcgatgccatgaatgcttacgtgctggcctgcttttatcgcgagtccgatgagcaggaaaattatctgacttacctgatatattctgctatggccgatgtacgtatctccaataaagatattgcttcgttggaagagctggcgggggtactttttagtttgggtgatattgaccatgcttatgtctacatgagttactgcttgcagaatgccttggcatatcggaaccgggtgagggtagtgggcatctctgcggtgcaggacaccattcatcagatctatcaggaacgtaatcagaggcaagaagcgcggttacgtatgtatttggtactggtcagtgtcttgtctttgatatccttgtttgccttcctatatatatacaagcagatgaagcggttgaagcagtcgcgccaacagctgaatgaggcaaacaaccgcttgaataagcatgtggaagagctttcgaaaatgcacggacaagtggcagaaacgaatgtacagcttacttctttgaatgaacagttgagggataccaataatcagcttcgtgaatccaactatgtgaaggaggaatacataggttatgtcttttccatttgttccaattatatcagtaagctggatgagtatcggaaaaatatcaatcgtaagcttaaggcaaaccagttggaggatgtgaaagcattaaccgatactcattctatggcacagaatgagttgaaagagttctatcataactttgatgctatcttcttgcacatttatccggattttgtaagtgacttcaatgccttgctccatcctgacgagcagattgtgctaaaagatggtgagttactgaatacggaattgcgcatttatgctttggtgcgtttaggtatcactgatagtgtgaagattgccgaattcttgcattattcacctcagaccgtttataataatcgtttgaaaacacgtaataaggctatcattcctcgggaagagtttgctgccgttgtgcgttctttgggtagggcacagaagtggatttgataaaggcttctactgattgtcgcagtatggtgcgtagatgacacctaagagttaggaaaaaaactgcgatgtactaccttgtttttctctaaaaactaatctttccacagcaatgttcttttcttaccacagctgtggaaagaaagaaacgcgggtgtggtaagaaagaaacatatctgtagtgagaaaagttgttcagtagttctcgtttagtatccgggctttccggatgtagcctttcgcaggtttattgtcagttctctttgggctcctcaagcgtggtgccggccgttcagtggtctatgtcaaggggtgaacttattatattccgatgcgcgcgcgtatatatataatgtgtccccttccttccttcctttctttccctttaaaaaacatgctttaaaacatatctatcaatcagctagttatgaaaaagttcacgtaaaccctcaaaaaaagcttgtatatattttgcagatgtccgtaaaagcgctacttttgcatccgctttcgggaacgaaggcggcgatgttttgacattctgacagtaaaacggagcggtaagcttccatttttctcttctttgccataggtttctttcggaacttcggtcttggaaaagaaaaatgaaaaaaaacttccgaaacatttggaagttatgctttaaagttcttacctttgcacccgcttttgaaaacgaaagcagcgcgagttgacattcttctttcaagaaacggtgaccgggttttttttcttcctttttctttttgcctccctttcgacaagagagacgacgaggaaagagaaaaaagaaaaaataaaaaaaacttccgaaaatatttggaagatatgctttaaagttcttacctttgcatccgctttctgaaaagaacagcaatcgtgaaacgagcgatctttgaacagatttacataaacaatacaagtagtacaagagcaggtgcttcgcaaattaataaatggaaactaatgattaaggcgcgtcgtacctgggtaaaacaaaagaaccgtcaatatctgttttatataaataggtaaagataaactttttgaattcgagcgtcctggacagataattaagctgccgcattttaatttttaatttgcgcagtcaagatacttttacaatgaagagtttgatcctggctcaggatgaacgctagctacaggcttaacacatgcaagtcgaggggcagcatgaacttagcttgctaagtttgatggcgaccggcgcacgggtgagtaacacgtatccaacctgccgatgactcggggatagcctttcgaaagaaagattaatacccgatggcatagttcttccgcatggtggaactattaaagaatttcggtcatcgatggggatgcgttccattaggttgttggcggggtaacggcccaccaagccttcgatggataggggttctgagaggaaggtcccccacattggaactgagacacggtccaaactcctacgggaggcagcagtgaggaatattggtcaatggacgagagtctgaaccagccaagtagcgtgaaggatgactgccctatgggttgtaaacttcttttatacgggaataaagtgaggcacgtgtgcctttttgtatgtaccgtatgaataaggatcggctaactccgtgccagcagccgcggtaatacggaggatccgagcgttatccggatttattgggtttaaagggagcgtaggcggacgcttaagtcagttgtgaaagtttgcggctcaaccgtaaaattgcagttgatactgggtgtcttgagtacagtagaggcaggcggaattcgtggtgtagcggtgaaatgcttagatatcacgaagaactccgattgcgaaggcagcctgctggactgtaactgacgctgatgctcgaaagtgtgggtatcaaacaggattagataccctggtagtccacacagtaaacgatgaatactcgctgtttgcgatatacagtaagcggccaagcgaaagcgttaagtattccacctggggagtacgccggcaacggtgaaactcaaaggaattgacgggggcccgcacaagcggaggaacatgtggtttaattcgatgatacgcgaggaaccttacccgggcttgaattgcaactgaatgatgtggagacatgtcagccgcaaggcagttgtgaaggtgctgcatggttgtcgtcagctcgtgccgtgaggtgtcggcttaagtgccataacgagcgcaacccttatcgatagttaccatcaggttatgctggggactctgtcgagactgccgtcgtaagatgtgaggaaggtggggatgacgtcaaatcagcacggcccttacgtccggggctacacacgtgttacaatggggggtacagaaggcagctacacggcgacgtgatgctaatccctaaagcctctctcagttcggattggagtctgcaacccgactccatgaagctggattcgctagtaatcgcgcatcagccacggcgcggtgaatacgttcccgggccttgtacacaccgcccgtcaagccatgaaagccgggggtacctgaagtgcgtaaccgcaaggagcgccctagggtaaaactggtgattggggctaagtcgtaacaaggtagccgtaccggaaggtgcggctggaacacctcctttctggagtgacgtctcgactcgatcgttggttcttgaagttatgcttccataagaacctcttgtactgcgcgtacttgtttattaaaatatacgagaaaagtagaagccgagccgtaaggcgagggtttgactgacagtcctatagctcagttggttagagcgctacactgataatgtagaggtcggcagttcaactctgcctgggactacttcaaagttgaaaactgaaaattgacaactgaaaatcgggaactctccggattttccactttccactttccgttttccacttataagaagggggattagctcagctggctagagcacctgctttgcacgcagggggtcaacggttcgaatccgttattctccactccgttttgattattgttttataattgaaacaccgttctttgacatgatgtgaccaaaaaaaagtaaagttaaaagctgaaagtatatatcgaccatacgtgatcggtaagacaaaaagtaagtaagggcacatggcggatgccttggctctcggaggcgatgaaggacgtgataagctgcgataagctgcgggtaggtgcaaatgacctttgatccgcggatttccgaatgggacaacccgatactttgaagaagtatcatcctgcattgcaggaggctaacgcagggaactgaaacatcttagtacctgcaggaaaagaaaataaacaatgattcccccagtagtggcgagcgaacggggaatagcccaaaccatccatgttacggcatgggtggggttgtaggaccacgccgtggcaagaaagttggtgagcagaatgttctggaaagtacagccatagagcatgacagctgcgtatgcgaagccaagcgaagcctagtggtatcctgagtagcgcggagcacgaggaattctgcgtgaatctgccgggaccatccggtaaggctaaatactcccgagagaccgatagtgaaccagtactgtgaaggaaaggtgaaaagcacttcgaacagaagagtgaaatagttcctgaaaccatgtgcctacaagcggtcggagcaccttctggtgtgacggcgtgccttttgcataatgaacctacgagttactttttccggcgaggttaaggatttcagatctgcagccgaagcgaaagcgagtctgaacagggcgtatagtcggaaggagtagacgcgaaaccaagtgatctacccttgggcaggttgaaggatgggtaacaccatctggaggaccgaaccaataagcgttgaaaagcttctggatgacctgagggtgggggtgaaaggctaatcaaacttggagatagctcgtactccccgaaatgcatttaggtgcagccttgacttatactggcatgaggtagagcgactgataagatgcgagggcttcaccgcctatcaagtcttgacaaactccgaatgcgtgtcagttctatgtcaggagtgagggcatgggtgctaaggtccatgtcctaaaggagaacaatccggaccaacagctaaggtcccgaaatgaatactaagttgaactaacgaagtcagattgctaagacagctaggatgttggcttggaagcagccattcatttaaagagtgcgtaacagctcactagtcgaggagtttggcgtggataataatcgggcataagtattctaccgaagctttgggatgagaaatcatcggtaggggagcattccactcggcgtcgaaggtgaggcgcgagccttgctggagcgtgtggaaaagcaaatgtaggtataagtaacgataaggcaggcgagaaacctgcccgccgaaagactaaggtttcctgatcaacgctaatcggatcagggtaagtcgggtcctaaggctcagccgaacggcgaggccgatggcagaaccggttaatattccggtactacctgtgggagtgacgtggagacggagtcgtgacagcgccgcggactgacggaatagtccgttgaagggtgtagatgctgattgttccaggcaaatccggagcaagagtcgaacctgatagtatggagcgttcttagaacaatccaatagtgcgtgtaatcatacttccaagaaaatccgctaaacttaatcctgcaggtacccgtaccgcaaacggacacacgtagtcgggttgaatatactaaggcgcttgagtgattcacggttaaggaactaggcaaactgaccctgtaacttcgggataaagggtcctcgcttaacggcgaggcgcagagaataggtccaggcaactgtttaacaaaaacacagggctgtgcaaaattgaaagatgaagtatacagcctgacacctgcccggtgctggaaggttaagaggagatgtcatcgcaagagaagcattgaattgaagccccagtaaacggcggccgtaactataacggtcctaaggtagcgaaattccttgtcgggtaagttccgacctgcacgaatggtgtaatgatctggacgctgtctcaaccgtgagctcagtgaaattgtagtatcggtgaagatgccgattacccgcgatgggacgaaaagaccccgtgaacctttactatagcttaacattgaatttgggtaattgatgtgtaggataggccggaggctttgaagcgggcacgccagtgtccgtggagccgctgttgaaatacggccctttgattatttgagttctaacccgttgttgcggggacactgtttggtgggtagtttgactggggtggtcgcctccaaaagtgtaacggaggcttctaaaggtgccctcacgacgattggtaaccgtcggcagagtgtaatggcataagggcgcttgactgggagacttacaagtcgatcaggtaggaaactagagcatagtgatccggtgtttctgtatggaaaggacatcgctcaaaggataaaaggtactccggggataacaggctgatccctcccaagagctcatatcgacggaggggtttggcacctcgatgtcggctcgtcacatcctggggctggagaaggtcccaagggttgggctgttcgcccattaaagtggcacgcgagctgggttcagaacgtcgtgagacagttcggtctctatctatcgtgggcgcatgaaatttgcgtggctctgacactagtacgagaggaccgtgttggactgacctctggtttaccggttgtgccgccaggtgcattgccgggtatctaagtcgggattggataagtgctgaaagcatctaagtacgaagccagccacaagattagatttctcagggtcgttgtagactacaacgttgataggatgcaggtgtacaggcagcgatgtcatagccgagcattactaattgcccgtccactttttgccttccgtgtatggaggtatatacgttcagcaatatatggacactttacttttttctcatcatgtctgccttattcaggtgactatagcaccggggttccacctcttcccattccgaacagagaagttaagcccggtcacgccgatggtactgcgtaacagtgggagagtaggtagtcgccgttttcagaagaagcctccgtgtctgataaggatacggaggctttgttcgttttatatctttacatatacttggatgccggcatggattgttcttgtgttttaggccatgagttttctgctgatttgtagtgatatcagggtgaaatgaacataaaaaaatgaatattttactctaaatactacataatgaggataattattcgtatctttgtcgcccgaataaacaaaagaagctttgggaaagtttgataaatacaaaatagacctgaaaggtatgcaagcagattcatgcaaatatgagtttgtgctagacaaccttttctttgccaatattgatggaccggaagtgcagaagggtaaagtcaatgtggtgttagttgtaaagaaaacatctcgtgctttcgaattgaacttccagacagacggaatggtgtgggtgccatgtgaccgttgtttggacgatatggaacagcttgtcagctcgacagataagctgctggttaagttcggtcatgaatatgccgaagaaggtgacaatctcattgtaattcccgaagaggaaggtgagattaatgtagcatggtttatgtacgagtttgtagctttggccatccccatgaagcatgtgcatgctccgggtaagtgtaacaaggcaatgaccagcaaattgagtaagcatatgcgcactactccggatgatgatatggctgaggacacatttgctccggaagaagaggtggagctgatgaatgaagaagaaacgcaggtagacccgcgttgggacgaattaaagaaaatattagataacaattaaagattaaagaaaatggcacatcctaagagaagacagtcaaaaacaagaactgcgaagagaagaactcatgataaagcagtagctcctacactggctatttgcccgaattgtggtgagtggcatgtatatcacactgtatgtggtgcatgtggttactatagaggtaagcttgcagttgaaaaggaagctgccgtataattacggtcagtttgactaaaacttatacttgaatatcgggcgtctaaaaagatttgtaatttaataagcaaacctttttagactaccgttgtttcagtagttctataagtaaacaagattttaatggaaaaaataaatgcagtaattacaggagtcggcggttatgtacctgattacgtcttgacgaacgacgaaatctcaagaatggtggatacgaatgacgaatggattatgactcgtatcggagtaaaggaaagacgtatcctgaatgaagaagggttaggtagttcctatatggcgcgtaaagctgccaaacagctgatgcaacgtactggcgcggatccggatgatatagatctggtgattgtagctacttccactccggattatcatttcccttctacagcttctattttatgtgataagttaaggctgaaaaatgcatatgcttttgacttgcaggcagcctgcagcggatttctctatctgatggagactgcggccaatttcatccgttctggaagatataagaaggttatcattgtgggagccgacaagatgtcgtcaatggttgattatacagaccgtgctacttgtcctatctttggagacggtgctgcagctttcatgctcgagccgacaacagaggatgtaggtattatggatgctattctgagaaccgacggcaaaggtttgcctttcctgcatatgaaagcgggtggttcggtttgtcctccctcttattttaccgtagacaaccacatgcattacatttatcaggaaggacgtactgtgtttaagtatgccgtatccaatatgtcggatgttagcgcggccattgccgagaaaaacggtctgacaaaggatagtattgactgggtgattccgcaccaggccaatcttcgtatcatcgatgctgtggcacatcgtctggaagttcctcgtgagaaagtactgattaatatcgaacgttacggcaataccagtgctgctacgttgcctctttgtatctgggactttgaagataagctgaagaaaggcgacaatcttattttcactgcattcggcgcaggatttacctggggagccgtgtatgtgaagtggggatacgacggaaagaagcagtaacatactattgctaaatataatatgataaaacgcatcctatttcgattcgatgcgtttttttgtctcaattcaaatactgaagtcatgcacaaagcaggttttgtaaatatcgtgggaaatccgaatgtgggcaaatccacattgatgaacgttttggtaggtgagcgtatttctatcgccactttcaaggcgcagaccacccgtcatcggattatgggcatctataatacggatgacatgcaaattgtgttttcggacactccgggtgtattgaagccaaactataagttgcaggagtccatgcttaatttctccacttcggcattggcggatgcagatgtgttgctgtatgtgacagatgtggttgagactcccgacaagcataatgattttgtggagaaagtaggacacttggacgttccggtattgctgcttatcaataagattgatttaagcaaccaggaaaagctggtggaactggtggaagcatggaaggaattgctgccgaaggcggaaattattcctatctctgctacttcgaaatttaatgtggattatgtcatgaagcgggtgaaggagctgttgcccgactctcctccctatttcgacaaggaccagtggacggacaagccggcgcgtttcttcgtgaccgaaataatccgtgagaaaattctgttgtactacgataaggaaatcccttattcggtggaggtgatggtagaacagtttaaggaggaggcaaagaagattcatatcagtgccgtaatctatgtggagcgtgattcgcaaaaaggtattatcataggcaagcaggggaaggctttgaagaaagtggctactgaagcgcgccgtgatttggagaggtttttcgggaaaacgatattcctggagacgtttgtgaaagttgataaggattggcggagttcggacaaggaactgcgtaattttggttatcagctggattaagagttattcatacgactgtgacagtcgcaaaaaacaaagagtgtgaactatgggaaatttagttgcaatcgtaggacgtcccaatgtgggaaagtctacattatttaaccgtctgaccaagacacgtcaggcaattgtgaatgaggaagcgggaaccacccgtgaccgccaatatggaaagaccgaatggttgggacgtgagttctccgtggtagataccggcggttgggtagtgaactctgatgatattttcgaagaagagattcgtaagcaggtattgatggcggtggacgaagccgacgtgatactgtttgtggtggatgtgatgaatggggttacggacctcgacgagcaggtagctgccatcttgcgtcgtgccaagaagcctgtgttgctggttgccaataagactgataatcatgaactgcaatacaatgcccctgagttctatagcttgggtttgggtgacccttattgtatttctgctgtaacgggtagcggtacgggcgatatgatggaccttatcgtcagcaagttcaagaaggaatctgatgaaattctggacgaggatattccccgctttgcagtagtgggacgccctaatgccggaaagtcttccatagtcaatgcctttattggagaagaccgcaacatcgtgacggagattgccggtaccacgcgcgattctatctatacccgctacaataaattcggttttgatttctacctggtagatacggcgggtatccgtaagaagaacaaggtgaatgaggatttggagtactactccgtaatccgttccattcgttccattgagaatgcagatgtatgtattttgatggtagacgctacgcgtggcatcgaaagccaggatttgaatatcttctccttgatacagaagaatgccaaggggctggtggttgtggtgaataagtgggacttggtgaaggacaagactgtgaaggtgatgaagactttcgaagatgctatccgcaaccgtttcgctccgtttgtggattttcctatcatctttgcttcggcactgaccaaacagcgtattctgaaggtattggaagaggcgcgtgatgtgtacgaaaatcgtatgacgcgtattccgacagctcgtttgaacgaggaaatgctgccgcttatcgaggcgtatccacccccttcaattaagggtaagtatatcaagataaagtatattacgcagttgcccaatacccaggtgccgtcatttgtttattttgcaaatcttccacaatatgtgaaagagccttacagacgattcctggaaaataagatgcgtgagaaatggaagttgaccggaactccgataaatatctatatccggcagaagtaaaatatatcgtgatgatatagtcgattctattaactggttttatgaagagaaagcgtccggaacatagcttccggacgctttcttatgtaataggttagaaaatgaggtgtggttttatccttcaaggttctgtatctccacttctttgactttccggaataggtcagatgcaaatatgaaactgttcaaccgctcgttggtggaagtgaagatatcgtctttattgccttcccattctttgtgtccttcgtaaatatagatgattttttctccgatacccattacagagttcatgtcatgagtgttgatgagagtagtcatattgtattctcgggttatatcttgtatcagttcgtcgatgacaagcgaggtcttggggtcaagtcctgaattcggctcgtcacagaacaagtattgcgggtttagggcaatggcacgggcaatggctacgcgtttctgcataccgccgctgatttctccgggaaatttgtctttggcttcaatcaggtttacacgctccaagcagaacatggcacgacgagtccgatcgcgcagggtatcgttgctgaacatgttcagtggaaacatcacattgtccagtaccgtcatggaatcgaacagcgcggcactttggaaaatcattcccatttcccggcggagcgctttcttttccttctttcccatggcgaggaagttgcggtggtcatacaacaattctcctttgtccggtgtcagcagacccacgatacatttcatgagtacggtttttcccgaaccgctctgccctataatcaggttggtctttccattctcgaaagtggcattgatatctttcagtacctctttttcttcaaatgatttgcaaagtcctttcagttcaatcatcccattaaaagttgagttaatattaggtcggcgaataagataagtacgctgctgcatactacggagtcggtggacgccttgcccacttcgatggaaccgccttcgacggtgtaaccgaagaatgccgatacgctggcaatgataaaggcaaagaacagtgacttgatgatgccgcaccaaataaaccattcgacaaacatgtactgcaagccgtattccaaatctaccgccgacatgatgccgccgaaccagcaagtacagaaggcacctatgatgccggcgaatatactgaacgtcaccatcagtggaatggttgtcaccatagcggcaattttcggtaggatgagatagttggcggaattgacacccataatttcaagggcgtctatctgctgggtgactcgcatggtgcccagctccgaggcgatgtttgacccgacctttcctgccagaatcagacacatgatggaggaggagaattccagcagcatgatttctcgggttacatatcccactgtccatcgaggcatgaaaggactctcgatgttcaactttatctgtatggtgattacagctccgatgaagaacgatatcagcaatacgatgccgatagagttcacgccgagctgttccaactcgttgacatattggcggaaaaacatacgcatacgttcgggacgggcaaatacgcgtcccatcagtatgatatatcgtcccactgtcttaagtgctttaaacatgacatataagtatttgaatgcaaatgtacactatttcggcttatttttgctacatttgcggcgaaaacctttagagtatggaagaagaaaaaggcataaaggacaatgtagaggaagttaaggaaaatctgcaggccggaccaagcttgactgccggggcagagccacgggaggaaggtagcatggtgctgcgtacggaggatttggtgaaaaagtacggaaagcgtacggtagtgagccatgtgtccattgatgtgaagcaaggggagattgtcggtttgctggggccgaatggcgccggtaagacaacttcgttttatatgaccgtagggctgattactcccaatgagggacgtatcttcttgaatgatttggatataacgaaatatccggtatacaagcgtgcgcagacgggtatcggttatttggcgcaggaggcttccgtgttccgtcaaatgagtgtggaagacaatattgcatctgtactggaaatgaccgacaagcctttggagtatcagaaagacaagctggagagcctgattgcagagttccgcttgcagaaggtaaggaagaacaagggtaaccagttgtcaggtggcgagcggcgccgtacagaaattgcccgttgtctggccattgaccccaaatttattatgttggacgagccttttgccggtgtagacccgattgcagtggaggatattcagcagattgtgtggaagttgaaagataggaatatcggcattttgattactgaccacaatgtgcaggagacgctgagcattaccgatcgtgcttatctgctatttgaaggaaaaattttgttccagggtacgccggaagagttggccgagaataagattgtacgtgaaaagtatctgagtaatagcttcgtacttcgtcgcaaggattttatgaagtaatcccggatactgtcgattgatagaaataaaaaaagaccactcattcagtggcctttttttatttctccttaaatctctatgattaatattttggaggtcttgcttctttcactaccatctggcggccgaagaattcagcaccgtctagttcggcaatagctttagctgcagcagcgtcatcttccatttctacaaaagcgatgcctctgaaacgtccggtggtgcggtcattgataaattttacagaagatactgtaccgtaatcttccattgccttctgcaggtcactctccttaacgcggtagttaaggtttccaacataaatgttcataatgaaattgataaaataaatataatgaataaaactctcttggaaggaaggctgaataataaatggattacaacgacagagagtttacaaaagcgttcttgaaaacggaagtaaaaaccatgtaatggaaatcgaaaaactaatgcgccatcattccgcgacaaagaaacgcataaaattcggataaacaatgtttttccttaattatttttgtagattgtcgtgccttcgggcaactcccatttctcttcatagaaactggacggttcggtttatcattgtcttttccctgagtatctttcccataaacgtcctccgttgtcagtccgatggttgggctcttctaccgctctatccaagaattaaactgaaataaatcggcaatgttcttttgataattgaaagaataacgctaattttgcacgcccatttgagatatggaacaaagtataaatcaaataaataattgtcagaatgaacgtttcattacaaaacattgacaaagtaagcgcactgcttactgtaaagcttgagaaagcagattatcaggaaaaagtagacaaatcattgaagagcttccgtcagaaggcacagattcccggtttccgtaagggaatggttcctatgagcttagttaagaaaatgtatggtaagtctgcattggctgaagaggtgaacaagctgctttcagaaacagtatataagtatatccaggacaataaggtaaatatattgggcgagcctttgcccaacgaagacaagcagcaggaaattgatttcgatactatggaagagttcgaattcttgtttgatattgctttggctccggaatttaaagctgaagtcagtgcaaaagataaggtagattactatactattgaagttacagacgaaatggtggataaccaggtcaaggcttacactcaacgtaacggcaagtatgacaaggtagacgtttacgaggacaatgacatgctgaaaggtttgcttgctgaactggatgaagaaggtaataccaaagagggtggtattcaggtggaaggtgctgtaatgatgccttcgtacatgaaaaatgatgaacagaaagctatctttgccggtgcaaaagtgaacgatgtgcttgtattcaatccgaatactgcttgggacggaaatgctgccgaattgtcttctttattgaagattgacaaggaagctgctcccgaagtaaaatccaatttcagcttccaggtagaagaaatcacacgtttcgttccgggtgacttgactcaggaaattttcgaccaggtatttggcgaaggtaatgtgaaaacggaagaggaattccgtgccaaagtgaaggaagttattgccaaccagttcgtggcagacagtgactataagttcttgattgacgcacgtaagatgctgacagagaaagtaggcaagctggaattcccggatgcattactgaagcgcattatgcgtctgaacaatcctgacaaggaagaaagctttgtagaggacaactatgacaagagcatcgaagagctgacttggcacctgattaaagaacagctggtgaaagccaatgatatcaaggttgagcaggaagacatcacaaacatggctaaggaagctacccgcgcacagtttgcacaatatggtatgatgagtgtgcctgaagaaatcctggaaaactactcaaaggaaatgcttaagaagaaagagagcatagaaggcttggttaatcgtgtggttgaatctaaattggctacagcattgaagtctcaggtggaactggagcataagaacgtttctgctgaagagttcaataagatgtttgcataagagtaatgtgagcctacggctaaaatttataaagaaacacagagtttgacaaactataactctgtgtttttttgtgtctctgtgttcttttttgtttctttgtatccttataaattaaaaaatagaaagaaatggatgattttagaaaatacgctaccaagcatcttggtatgaacagtttggtgctggacgatgtgattaaatcacaagccggctatttgaatccctatatcctcgaggaacgccagctcaatgtaacgcagttggacgtgttttcccgtctgatgatggaccgcatcattttcctcggtacgcaggttgatgactatacagccaatactttgcaggctcagttgctttatctggattcggtggatccgggcaaggatatttccatctatatcaattcgccgggcggttcggtatatgccggtctgggtatttatgataccatgcagttcatcagtagtgatgtggctaccatctgtactggaatggcggcaagcatggcagccgtattgctggttgccggtgccgaaggcaaacgctccgcattgacccactcccgcgtgatgatacaccagccgatgggaggtgcccaggggcaggcctcggatattgaaatcacggcacgtgaaatccagaagttgaagaaagaactttataccattatcgccgaccactcccacactccctttgacaaggtatgggcagattctgaccgtgactactggatgacagcccaggaagccaaagaatatggtatggtagatgaggttttgattaaaaaataaatatggcagattcaagaaagaataaaaatagatgcagtttttgcggtcgcaccgaagatgaagtcggatttctcataacggggatgaatggctatatctgcgacagttgcgccacccaggcttatgagattactcaggaggctttgggggctggcaagaaggcaagtgccacgaagctgaatctgaaagaacttcctaaacccgtagaaataaagaagttcctcgatcaatatgtcattggtcaggacgatgccaagcgtttcttgtctgtgtcggtgtacaaccattacaaacgtctgctccagaaggacggcggtgatgatgtggagattgaaaaatcgaacatcatcatggtaggcagtaccggtacgggaaagacgttattggcgcgtactatcgcaaagttgctgcatgttccttttactattgtagatgcaacagttctgacagaggcaggttatgtgggtgaggacattgaaagcattttgacacgtctgctccaggtggcggattataacgtgcccgaggcagagcaaggtatcgtgtttattgatgagatagacaaaatagcgcgcaagggtgataatccttccataacccgtgatgtgagtggtgaaggcgtgcagcagggattgctgaaactgctggaaggttctgtggtgaatgtgcctccccagggtgggcgcaagcatcccgaccagaaaatgattccggtcaataccaagaatattctgttcatttgcggtggggctttcgatggcattgaaaagaaaattgcccagcggctgaatacgcacgttgtcgggtatagcgctgtacgcaatacggcaaccattgataagagcaacatgatgcagtacattgctccgcaggatttgaagtcgttcggactgattcccgagattatcggccgccttccggtgctgacttatctgaatccgttggaccgtgcggcattgcgctccattcttacggaaccgaagaattccatcatcaagcaatacatcaaactgtttgagatggacaatgtgaagctgacgtttgaagatgctgtatttgaatatatcgtggataaagcggtagaatataagttgggagcccgcggcttgcgttccattgtggagacaattatgatggatgccatgttcgaaattccgtcagaacagaaggacaattttgttgtgacgttggactacgccaagcgccagcttgaaaaggcaaatatagcacgactgcaaagtgcttaagaatcagatggtaatacggggtaaaaccgactattttactttttattgaaaaatattcgatggattatgcttgaaatttaagaagttgtttataactttgttagggttctttgtgaaaacaaggcggagtaccactattaaaagttaactcaataaacaacaacctaatgaatcatggcagggaagaagattaatttgatagaccagctgaagaaatacttcgggttcgatacatttaaaggaaatcaggaagcaatcatagagaatctgttggcgggtaatgatacattcgtgttgatgcctaccggtggtggaaaatctttgtgctaccaactgccgtccttgttgatggagggcacgggtatcgtgatttctcctctgattgccttgatgaagaatcaggtcgatgcgatgcgtaacttcagcgaagaggatgggatagcccacttcatcaattcttccctaaacaagagcgcgatagaccaggtccggtccgacatactcagtggtaagacaaagctgttgtatgtagctccggaatcactgacgaaggaagagaatgtggagtttctgaaaacggtgaagatttcgttctatgccgtggacgaagcccattgtatttctgaatggggtcatgacttccgtcctgagtatcgccgcatccgtcccattatcaatgaaataggaaaagcccctctgatagcgttgactgcgacggctacaccgaaagtgcagcatgacatccagaagaatctgggtatggtggatgcacaggtgttcaagtcatcgttcaaccgcccgaatctctattatgaggtacgccccaagactgcaaatgtagaccgggacatcatcaagttcattaagaacaatcccgaaaagtcaggcattatctattgcctgagccggaagaaagtggaggaacttgctgaaatcctgcaggcaaacggaatcaatgcccgtgcctatcatgccggaatggattcggctacacgaacacagaaccaggatgatttcctgatggaaaaaattgatgtgattgtagctaccattgcttttggtatggggattgacaaaccggatgtgcgctatgtcatccattacgatatacccaaaagtctggaaggatattaccaggagaccggacgtgccggaagagatggaggagaagggcagtgtattactttctataccaataaagacttgcagaagctcgagaagtttatgcaaggcaaacctgtagcagagcaggaaattggcaagcagcttctgctggagactgctgcgtatgccgaatcttccgtatgccgccgaaaagcattgcttcattacttcggcgaagaatatatagaagaaaattgtggtaattgtgacaattgtttaaatccgaaaaaacaagtggaagctcaagaattattgtgtaccgtgattgaagctattctcgcggtgaaagaaaattttaaagcggactatattatagacataatacaaggtaaggaaacttcagaagtgcaggcgcatctgcatgaagatctcgaagtgttcggctctggtatgggcgaagaagacaaaacgtggaatgctgtgatccgtcaggcacttattgccggttacctgagtaaggatgtcgaaaactatggcttgctgaaagtgacagatgacggtaagaagttccttaaacatcccaaatcattcaaaatagtggaagacaatgactttgaggatgtggaagaggaagcacctgcacgtggaggcggtgcgtgtgcggtagacccggcattgtactccatgttgaaggacttacgaaagaagttgtccaagaagttggaagtgcctccttatgtcattttccaagacccgtctttggaagcgatggcgaccatatatccggtgactttggacgagttgcagaacataccgggtgtaggagccggaaaggcaaaacgctacggcgaggaattctgtaaactcattaagcggcactgtgaggagaatgagattgaacgtcccgaggacttgcgtgtgcgtactgtggccaataagtcaaaaatgaaggtggccatcattcaggccattgaccgtaaggtggcattggatgacattgccatgtcaaagggcattgagtttgaagagctgctggatgagatagaagctatcgtctactccggaacgaaattgaatatcgactatttcttggaggatattatggatgaagaccacttgctggatatctatgattatttcaaggaatctaccactgataagattgacgatgctctggatgagttgggtgatgactttacggaagaagaggtacgtttggtacgcatcaagtttatttcagagatggcaaactgattggttttagttgataaaaaagaaaaaaatgttgcgtgcaagtatacggaatggaataaaaaccgtatatttgcacgcaataaattttaaacgcatagccctatgtcatttattgctgataagattgtaatggatggattaacttatgacgacgtactgttaatccccgcttattctgaagtcttgcccaaaacagtcgaactctcgactaagttttcacgaaacattgagttaaaaatcccgtttgtaactgctgccatggatacggttaccgaagcgaagatggctattgccattgcccgcgaaggtggtatcggagttattcataagaatatgtccattgaggagcaggcacgtcaggtagctattgtgaagcgtgccgaaaacggtatgatttatgacccggtgactatcaagagaggttctacggtagctgatgcgctggctttgatggctgaatacaagattggtggtattccggtggtagatgatgaaagatatttggtaggcattgttaccaatcgtgaccttcgttttgagaaagatatgaataagcgtatcgacgaggtgatgactaaggagaacatcattactaccaatcctacgacggatatggaggccgtttctcaaattctgcaagaacatagaatcgagaagttgccggtagtagataaagacaacaaattggtaggtctgattacctataaggatattaccaaggcaaaggataaacctatggcgtgcaaggatagcaaaggtcgtctgcgcgttgctgccggagtgggagtgacgaatgacactttggagcgcatgcgggctttggtggatgcaggggcggatgccattgtcattgatacggctcacggacattccaaaggggttattgaaaaattgaaagaagccaaagagcatttccctcatattgatattgttgttggtaatattgctactggtgaagctgcaaaggcattggtcgaggctggtgctgatggagtaaaggtgggcattggtccgggttccatctgtactacccgtgtagttgccggtgtgggtgttccccagttgtctgcggtttatgatgtggcaaaggcactgaagggcacgggtattcctttgattgccgatggcggtttgcgttactcgggcgatgtggtgaaggcgttggctgccggtggttacagcgtgatgatcggttcgctggttgccggaacggaagagtctccgggcgatacgattattttcaacggtcgtaagttcaagtcctatcggggtatgggctcgctggaagctatggaaaatggctctaaggaccgctacttccaaagcggtaccagtgatgtgaagaaattggttccggagggcattgctgctcgcgttccttataaaggtactttgtatgaagtgatttatcagttggttggcggtctgcgtgccggtatgggatattgcggtgcagccaatatagagaaactgcacgatgccaagtttacccgcattactaatgcaggtgtactggaaagtcatccgcacgatgtgtctataaccagtgaggcaccgaactatagccgtcctgagtaagataataacaaaataatagtgaatgcctggagagagattgccgctttccgggcattttgtttatatttgcagccgtataaaaagaacggatggtgcttatggttagattgttttgggtgtttttcttcctcgggttcggattggctgtttcggcccaggacgatccggtactgatgcgtatcaatggaaaggaggtcctccgttctgaattcgaacgtagctataataagggcggtacctctgtcggtgcaggccggaaggcattggatgcatatgtgaataagtttatagacttcaggctgaaaatagaggctgccgaagttgtgggattggatacttcccgtgtcttccagaaggagcaggatgagtatcgccgctgtctgattaaatcatacttgacagatgaggagacggcagagcaggaggcacggcagtattatgacaagatgaaatccggccggcgtgcgggccgggtatatgtgaagcatatttttaaatatctcccccagaatatttccggtcataccttgcgtgagatggagtccaggatggattctatctacagggctcttgcaaaggaagggggagctgtgccgtctttcgatgcttgcgtcgagcaattttccgatgagaagaaagcgttttgggtgggttggctgcagatgccggtggagtttgaggatattgtattcgggttgaatgccggagagatttcccgtccgttcctcactcctcaaggcattcatatcgtgaaagtactcgaacagcaggaaatccttccttttgagaggatgaaggacaagataatccgttgtcaaacccgtcgtcatggaatggataaaggaacgcgggcttttgtggataaactgaagaaagaatatcactatatgccggataaagccggtatcgacgaactgctggccaaaggaagcacttcccgtgtattgtttacactggatggcaaggcatacggtggaaaagagtttgccggatttgccgctgtttatccggcagggacgcgcagacagttggaggcttttacagtaaaaacgattctggactatgaaaactcccgtctggaattgaagcatcccgaattctgtgcgttggtgcaggggtatcgtgacagcatgttgcttgccgaaatcactgaccgtgaagtgggaaagaggagtgtggtggatgaagcgggattgaaagcatattttgaggcgcaccgttcggacttccattgggacgaaccgcgttataagggtattgtgctgcattgtactaccaagcgggtggcgaagcaagtacggaaatttctgaaacagattccggaagaggagtggatggatgccatccgtctcactttcaatgccggcgatactcccaaggtgcgggcagagcaaggattatttgctcccggtgataatgcatatgtggatgaattggtgttcaaagggaagaatgcaaccccggttttgtcatttccctttactgctgtacaaggtcgtaagcagaagggaccagatagttggcaagaggtgcgagagccgctcgtaaccgcttatcggaactatttggaaacgcattgggtggcaaagttgcgtgctgccggtaaggttgaaattgaccaagaggttttaaaaaccgttaataatcactgatgcaaccgattaaaacactatcttcgtacctcaaaacgaagtaaatatcagttggtgatgcgaacaacctgctttgggcttttaattttccttctctgtgcggcgtgcagcgagcagcacgaccataaagggcggacaccgttagtggagttggacggcaatttcctttaccgggaagatttgcaatcggtacttcctgccggtttgtccaaagacgacagtctgttgtttgcagaacattatatccgtaattgggtggaagatattttgctgtacgataaagcgcagagcaatattcccaataacggtgagattgataaacttgtggagaattatcgcaaagcattgataatgcatacctatcagcaggctttaatacatcagcggctatcagaggagatttcagaacaagacttgacggagtattacgagaagaaccaggcgctcttcaaggtggaacgtccgttgatgaaaggcttgttcatcaaagttcctttgacagccccgcagctgggtaatgttcgtcgctggtacaagacggaaacccgtgaggcggtggaacatctggaaaagtacagtctgcagaatgctgtgaagtatgagtatttttatgataaatgggtgccggtatcggaagtgctggatatgctgcccttgaaggttcctgatgtggacgagtatctggacaagaatcgccatgtagagctgaaggatacggctttccattatttcctgaatgtgagcgattatcgcccgatgggagagcaggaaccctatgagtttgcccgtgggcaagtgaaggatatgctgctgaacgtgaagcaggtggaattcatgaagcaagtgaaggatgatttgtaccaacgggcggtgaaaagagacaagattaaatattatttagaataagacaccaagaatgaaacagtgtatgaactttaagtttgtaattttatttgccttgacgctattagtcggttctaccgtttatggacaagacaacgtgattgacgaggtagtgtgggtagtaggtgacgaggctatactgaagtccgaagtggaagaggcacgtatgagtgcattgtatgaaggacgcaaatttgaccgtgacccttattgcgtgataccggaggagatagccgtgcagaagctgtatcttcaccaggctgccctcgatagtatcgaagtatccgagagtgaggttatccagcgtgtggactatatgacgaacatgtacatcgccaacatcggttcgcgcgagaaaatggaggaatacttcaacaagacttccagccagattcgtgaaacgctgcgcgagaatgcccgtgaaggattgaaggttcagaagatgcagcagaaactggtgggtgagattaagataactccggctgaggtgcgccgttacttcaaggatttgccgcaggacagcattccttatatccctacccaggtggaggtgcagattatcactcagcagcccaaggttcctttggaggaaatagaagatgtaaagaggcgtctgcgtgagtataccgaccgtgtcaataagggcgaaagcttttccatgttggctcgtctgtactccgaggaccgtggctcggccatgcgtggcggtgaaatagagttttcgggacgcggtatgctggaccccgcttatgccaatgtagctttcaacttgcaagaccccagcaaggtttccaagattgtagagtctgaatatggtttccatatcattcagttgatagagaagcgcggtgaccgtattaaaacacgccacattctgttgaaaccgcatattccggaagaagctctggctgccggttgtgcccgtttggattctattgccgatgatatccgcaataacaagttctcttttgaagaggctgcctcagtgctttcgcaggataaggatacgcgtaacaatcatggtttgttgccgaatcccaatacgaacacttcccgttttgagatgcaggaacttccccctgaaatagccaaggtggtggataagatgaaagtgggcgaaatctccgaagccttcaccatgattccgcaaaagaccggaaaagaagagtgtgtgattgtgaaactgaagagccgtacgacgggacacaaggctaccattgccgatgactatcagaacttgaaagagattgtgttggagaaacgccgcgacgaagtgctggacaagtggattcgtgagaagcagaagcacacatatgtccgtatcaaggataattggaagaataactgtacgttcaagtatccgggctggattaaagaataatccggaagaatttacatagatttgtatgcaaaagaagaatacaaaaaatcatttcctgaacaagcatagatacctcctggtaggtattctatgcttgtttggtatctgtctgctgagtgcgcaggacaagaagaagagtactggtgcaccagagaagaagaaagtggactcgattgaacagaaaaagacggagacgccggaaaagaagaagacgcgcgtcgatttgttgtacgcagatgaggcgcaggcggacaaacagttgcgtcctgatgtgcaggtactcatcggctcggtgaggatgaagcatgacagtatgtacatgttctgtgacagtgcgctgatattcgaaaagataaattctgtggaggcattcggcaatgtgcgtatggagcagggcgacaccttgtttatctatggagactatctgtattatgacggcatgtcgcagctggccatgctgcgtgagaatgtacgtatgataaatcgtaatacggtgctgacaaccgacagtttgaactatgaccgtctgtacgatttgggctattacttcgaaggcggtacgctgaccgacgaggataatgtgctgacttccgaatggggagaatatagccctgccaccaagttggctgtcttcaaccacgacgtgaagctggtcaacccgaagtttgttttgacttcggataccttgaagtatagtacagctactaagattgccacaattttaggaccctccgacattgtgagtgaccaaaatcatatttattccgaacgtggcgtgtacaatacgactactgagcaggcagaactgctcgaccgttccgtactgactaacgaaggcaagaaactgaccggtgacagccttttctacgaccgcatcttgggatacggcgaggcttttgacaatgtacagatgaatgatacggtcaaccggaacatgttgactggcgactattgtttctacaacgaactgaccggaagcgccgttgccaccaaacgtgccgtagctatcgactattcgcagggcgacagtctgtttatgcacggtgatactttgcggctgattacctaccatatgaataccgattccatgtaccgggagatgcatgcctatcataaggtgcgtgcttatcgcacggatgtgcaggccgtatgcgattcgttggtgtataattccaaggactcttgcatgacgatgtacaccgaccctatcttgtggcacggggaacaacagttgttgggcgaggaaattaaaatttacatgaacgatagtaccatcgactgggcacatatcatcaatcaggccctgacggtagagaaaaaggacagtattcactataaccaagtttccggtaaggagatgaaagctttcttcatagatggagacatgcgtctggtggaggtaaacggcaatgtattggtggtgtattatccggtagaggagaaggacagttcgctgattatgatgaactattcggaaggtggacttttgaaaatgtacttgaaggagagaagaatggagcgcggagtctttgttggaaagactaccggtacagcctatcctttggaccagattccaccagataagagcaggctgccttcttttgtttggttcgactacatccgtccgctcaacaaggaggacatcttcgagtggagggctaaaaaagcaggtgaagtattgaagaaaagtgaccggaaacctgtaacttcgccaaggaatatgcatattaaacgaaataataagtagcgtcatgggaatgtttgcaatgcggaagcctcgtggcttcaatcatagctatatctatgtggatgagcggaaagagaagttggcgaagatggaagaaaacgccaagcgtgacctgggtatgctgccggaaaaggaattctcgcccgaggatatacggggcaaattcatagaaggaacaactcacttgaagcggcgcaaggagagcggacgtaagccgatgcatttgggcataatccttgttgtcatagctgtgctgatttatctgtggtatgccatcagtaacggaatcatttaataatgattaatcattaatctctaatcattaaacattatcatgagcgatatcattcatttgctgcccgattcggttgccaatcagattgctgccggagaggtgattcagcgtccggcatctgttgtgaaggaattggtggaaaatgcaattgatgccgaagcagaggaaatacatgtgctgattaccgatgcgggcaagacctgcatccaggtgattgatgacggaaaggggatgtccgaaacggatgcgcgtctttcttttgaacgccatgcaacttcaaagatacgcgaagctgccgatttgtttgccctacgcaccatgggcttccgtggagaagcgttggcttccattgctgcggtagctgaagtggagttgaaaacacgcccagccagcgaggaactggggacgcgactgttgattgccggctctaaagtcgagggccaggaagccgtttcctgccctaagggaagcaatttttccatcaagaacctattcttcaatattcctgcccggcgtaaattcctgaaagccaactctacggagttgagcaatatccttacggaattcgagcgtatagcgctggtgcatcctgaggtagccttctatctgtatagtaatgatacggaattgttcaatcttccggtaatgcctttgcggcaacgcatcatggcagttttcggaaagaaactgaatcagcagttgctgtccgtagacgtcaatacgacgatgataaagatttccggttttgttgccaagccggaaacctcgcgcaagaaaggagcgcaccaatacttttttgtgaacgggcgttatatgcgtcacccctatttccacaaagcggtgatggacgcttatgagcagctgattcctgccggtgagcaaatctcctactttatttatttcgaggtagaccctgccaatatcgatgtgaacatccatccgacgaagacggagattaagttcgagaatgagcaggctatctggcagattctgtcggctgcggtcaaggaatccttaggcaagtttagcgctatacctactatcgattttgataccgaggacatgccggatattcctgcattcgagcaggctcgtccgatagagcctccgaaggtacactataacacggatttcaatcccttcaagacgtcttccgcttcttcctatggaggcggtggcaattattcgcgccccaaagtggagtgggaggggctttattccggtttggaaaaagccagcaggatgaacgagccgatggaggaagagccttttgtagaggatacggttaccggtacggctccaagagaggaggagagggttccttatttccaggaaacggttccttccggggcaagcgcctctttctatggcaatgaggcaacggtagagaaaggagcgcaacacttccagttcaaggggcgttttattctgacttccgttaaatcgggtctgatgctgatagaccagcaccgggcgcatgtccgggtattgttcgaccgctatatgagccagattcgacagaaacaaggcgtatcccagggggtattgtttccggagattatccagttgccggcttcggaagctgccgtactggaaagtatattggaagatttgtcggcagtaggcttcgatttgagcccgctgggtggcggcagctatgccatcaacggcataccttcgggcatagaggggttgaacccggtagaattggtccggaatatggtacatactgctatggaaaaagggaatgacgttaaggaagaggtgcagacaattcttgcatcgaccttggcacgtgctgcggccatcgtctatggacaagtgctgagcaacgaggaaatgtccaatctcgtggacaatctgtttgcatgcccatccccgaattatactccggacggaaagacggtgctggcgaccattaaagaagacgacatagaaaagcttttctccaaataaggaagagtactttcttttgcatcaaggcaaaaaaagtacaaatattcagaaccttttagttctgttggcgttaattagacagtttgaatgataaagagtttaattaaccacttaactattttaaggtatatgaaaaagattctaatgttactggctttagctggtgtgtcttctgttgccatggcgcagcaaaagactgaagttgtggaagaatttggtgttatccaggttcaggataaatatcaggtaatcactaatccgttctggagtaattggtttttctctataggcggtggtgccgaagcaacttttggagataatgataaggcaggaagttttggcaagcgtatcagtccgacgctgaattttgccatcggcaaatggttcaccccgggactgggagtacgtctgcaatatagcggccttcaggcaagaggatatacgtatgatgcaggtgctgactacgtgaaaggcactcagatggatgacggctactacaaacagcgtttcgactatatgaatctgcacggagatgtgatgttcaatctgaatgcgctgtttggaggatacaaccagcaccgtgtgtatgaaatcattccttatgtaggtgctggcttcactcacaactacacaaagcctcaccgcgaagctctgtctgtaaacgcgggtatcatcaatcgcttccgtatttccaatgcgatagatattaacctggagctgagcgcaatgggcgttgaagataagttcgatggcgaagttggcggcgatcatggatatgatggcgtgctgagtgcaacggtagggttgacataccgtttccccgcccgtggattccgtcgcccgatgcctcagttgatttctcaggtagagctggctgccatgcaggcacagcttgcagagatgggagctgccaaccagcagctgcagaatgcattggtggctgcacagaaccagccggtggccgaagttacggaaaccgaagtgattgttcccgatccggatatagcaccgcgtaccgtattcttcaatatcggttctgccgaagtctctccacgtgaagcaatgaacttgtcttatctggcagaccagatgaaacagttcccgaacgccacttacactgtaaacggatatgcagactctgcaaccggtacgccggcattcaacaaagagttgagtttgaagcgtgcacaagccgtggtcgatgtattggtaaaacaatacggaattcctgctgaccgcctgaaggtggatgccggtggtggtgtcgataagttcggacagccgattctgaaccgtgtggtattggtgaaatctgccaattagaaagctacgagctacaagctacaaggagttacgagttatagaaatgagaaggggcatgcgttattatgacgcatgcccctcattttttgtaaccagtaacttgtaacaggtagctccttgtaactcgtaacttctgtaactcgtatctcctatcccttattctccgccgaatttctttacttgctctgcaatcagttccgcatcatcaaagtagtttatcttcatagccttgcgtacatcgtccaaggttgcggcagcggtttccctggcagttccgcaacctttcttcagcatgtcgtagatggcggggatgtctttttcaaactccttgcggcggttgcggataggctccagtgtctcctgcataatttcgttgaggaacttcttcactttcatgtcgcccagaccgccacgttggtagtgggctttcagttcgtccagattcggatattcgggcagataaaggccgaagtgttccggacggcaaaaggcatccaggtaagtgaatacggtgttgccttccaattttccggggtcttgcacacgcaggtggtcggggtcggtatacatgctcttcaccttcttctgcacctcgtcggcagagtccgaaagatagatacagttgccgaggctcttgctcatcttggctttgccgtccgttcccggcaggcgcaggcaggctgcattgtcgggcaacaggatttccggttccacgagggtttcaccatatatatagttgaaacggcgtacgatttcacgagcttgttcaatcatcggctcctggtcttcgcccacgggcacggtagtggcgcggaaggcggtaatgtccgctgcctggctgatggggtaggtgaagaaacctacggggatgcttgtctcgaaattacgcatctggatttcggtctttaccgtcgggttgcgttgcaggcggctcacggtcaccaggtccatatagtagaaggtcagttcgcagagttccggtatctgggattggatgaagatggtactcttcgtcgggtccagtccgcaagccaggtagtccagtgccacctcgatgacgttctggcgcaccttttccggattctccatattgtccgtcagcgcttgtgcgtcggcgatgaagatgaaaatcttgtcgtacaagccggagttttgcagttccactcttcttctcaatgagcctacatagtgtcctatgtgcaggcgtcctgtggggcggtcgcccgtaaggatgattttttcttttgccatattatgtattttttagtttcttcattgtataaaagccattaagaccggcaaagatacctataattatcgaaacctcaagggatgacgctttctttccttttcacgtataccttatggcttccgatgccgcttgtatcgattccgctgccgggagtatgtgcccatttgcgcagttccacggtggcggtggagcggacgagtccggtcagttgccggtagatgctgacagtaaggaaggcgtgcttgtccagatactgatgcgccagagccagacgttgttcgggggtgtatttcttcgacgaacgtgcgggtttccaggaggcacgttccagttcgcaccaatggttggtttctctaatcaaggccttgtccgtgcggaagttcacgccacttacgtagatgctccgcgcgtttcgcttcgtggtgctttcttggggctgttcgcgttccttgtcggggtagatggacagtgcgggggtgaatacgcccaatccttctatcttcaccgagcgtcccattcccatttcgtgggccagggcttcgcccagctcgcagataattccttcggttacgcctttagagaatcccgaggtcatggcgatgtattccgccagttcgcgcgtgccggtctgtccggtcatcaccatcttggggtaggtgattggttcgcccgtgccttgcaagtcgggcatttctttcatttggtagcgtgtggtcattgttgcgttctcctttcttttctttccttcgttgcaaagtccttttccctgcggagcaaagttcttttggtggcggagaaatcttagaataaagcctttattccaaggaatagaaattttatttttaagaataaaggctttgtttgtagaaacagaatccttgttctatttttgtataggcacaaaggtaagtttccgtggcgagaaaagcaagttttggtggggagaatcttcatatttatccgcaaatgcctttactgagatatagtctttcttttttatatggaatcgcatttttcggaaaaagatttcggttgtgggcgacggccgctcttctattatggaggatgacgtttcttttatgcaaaaaaatatgccacaatttgctcttttcgtaaataagtcgttactttgcacaaattttaaagagactatgcaatcgcaggaaatgagaagcaaatataacctccgttcgaatgaatttcattcgggagccgtcagtttctcttttttcgagaaagatatttttagttctttggtaatgcgttaatcctttattgggtgacgcattttttttgtgaaatagctacaactcgtagttcgtagcttgtaactcgtaacttaatagacaacaagagaatatggaaaagaatttaaagaaagtgcttgtcttgggttctggtgcgctcaagattggtcaggccggagagtttgactattccggttcgcaggcgctgaaggcgttgcgcgaagaaggtatcggttctgttttggtaaacccgaacattgctactatccagacatcggaaggtatcgccgatcaagtttatttcttgccggtaactccttatttcgtggaagaaatcatcaagaaagaacgtcccgacggcattttgctggcattcggcggacagacggcgctgaactgcggtacggaactctaccagaacggaattcttcagaaatatggcgtgcgtgtgctgggtacttccgttgaggcgattatgtacaccgaagaccgtgacctctttgtgaagaagctggacgagattccgatgaagactccgaagagtcacgctgtagagagcatggaggacgcactgaaggcagcccgcgagattggctaccccgtgatggtgcgctcggcttatgctctgggtggactgggaagcggtatttgtccggacgaggaagccttcattaaattggccgaaagctctttcactttctccaagcagattctggtagaagagtctctgaagggttggaaggaaattgaatttgaggtaatccgcgatgccaacgaccactgcttcacggtggcaagcatggaaaacttcgacccgctgggtattcatacgggtgagtccatcgtagtggctcccacttgctcattgaccgacgagcaggtgaaaatgttgcaggagctttccaccaaatgtatccgccacctgggcatcgtgggcgaatgtaacatccagtatgcgttcaacgccgagacaaacgactatcgtgtcatcgaggtgaacgcccgtctgtcccgttcttccgcattggcttccaaagctaccggttatccgctggcatttgtggctgccaagattgcgttgggctatacgctcgaccaaatcggcgagatgggaactcccaactcggcatacgcagctccgcagcttgactacctgatttgcaagattccgcgttgggacttgacaaagttcgtaggtgtcagccgcgaaattggttccagcatgaagtcggtaggcgaaatcatgtctatcggacgttcctttgaagaaattatccagaagggcttgcgtatgattggtcagggaatgcacggattcgtgggcaatgagggagtggagttcgatgacttggattacgaactgtcacatcccacagacctgcgcgtctttgccattgccgaggctctggaaaagggatatgccatcgaccgcatctttgagctgaccaagattgacccctggttcttgggcaagctgaagaacatcgtagactacaagcagaaactttcccaatataataaggtggaagacatccccgccgacgtgctgcgcgaagcaaaagtgcttggcttctccgacttccagattgcccgcttcgtgctgaatccgcaaggcaatatggagaaggaaaaccttgccgtacgcgcccgtcgtaaggagctgggcatcctgcccgccgtgaagcgcatcaatacggtggcctccgaacatccggaactgacgaactacctctacatgacgtatgccgttcagggttatgatgtgaactattataagaatgaaaaatcagtggttgtgcttggttcgggcgcttaccgcatcggttcgtctgtagagttcgactggtgctcggtgaatgccatccagactgcccgcaagctgggctacaagtccatcatgattaactataaccccgaaaccgtttctacggactacgacatgtgcgaccgtctctacttcgacgagctctccttcgaacgtgtgctcgacgttatcgacctggagcagccgcgcggtgtcatcgtgtccgtgggtggacagattcctaacaacctggctatgaagcttcaccgccagtcagttcccgtgttgggtacttcccccatctccatcgaccgtgccgaaaaccgtaacaagttctctgccatgctcgaccagctgggcatcgaccaaccggcttggcaggaactcaccagcctggaagatgtgaaaggctttgtagagaaggtgggctatccggtactggtgcgtccgtcttacgtactctccggtgctgcgatgaacgtatgctacgatgaagaagaactggaaaacttcttgaagatggctgctgaggtatctaaggaatatccggtggtggtatcccagttcttgcagaacaccaaggagattgagttcgacgctgttgcccaaaacggtgaagtggtagaatacgccatctccgagcacgtagagtttgccggtgtacactccggtgacgctacgctggtattcccggcacagaagatttactttgcaacggcacgccgcatcaagaaaatcagccgccagattgcgaaggaactcaatatttccggtcctttcaatatccagttcctggcacgcaacaacgaggtgaaggttatcgagtgtaacctccgtgcatcgcgcagcttcccgttcgtatccaaggtgctgaagcgtaacttcatcgagactgctacccgcatcatgctggacgctccctatacacaaccggacaagtcggcattcgacatcgaccgtatcggtgtgaaggcaagccagttctccttctcccgtctgcacaaggcagacccggtattgggtgtggacatgtcgtctacgggcgaggtaggctgtattggcgacgacttctccgaagcattgctgaatgccatgattgctaccggattcagaatcccccgtcccgagaagggcgtgatgttctcctccggagccatgaagtccaaggtggatttgctggatgccagccgcatgctctttgccaaaggctataagatttatgctacggcaggtacagccgctttcctcaacgcccatggcgtgacgacggaagccgtttactggccggatgaacgcccggatgcggaaaacaacgtgatgacgatgattgccgaccatgccttcgacctgattgtcaacattccgaagaaccatacgaaacgcgagctgaccaatggctacaagattcgtcgcggtgccatcgaccacaacattccgttgattaccaatgcccgcctggcaagtgcctttatcgaggcattctgcgaaatgaagctggaagatatccagattaagagctggcaggagtacaaataaattgtttgctctataaacgattgcaggagcggaaagccgaaaggttttccgctcttttggtatactgcgtttatttccgtatttttgttcggggctgagtctctgtatgaatcaaaagaagaaacaatatgaatgaagtggaaaaaatgcgtagctcccagttggcggatatgtccgttccggagatacaggtgaagttcgagcatgccaagcgcttgctggcaaaaatgcgtgtgatgagtacttacgatgaggattaccggagcttgctggaggagctggtaccgggcattcccgccacgtccgtcatctgtccgccgttccattgcgaccatggggatggtatccggctgggtgagcatgtctttgtcaatgccaattgcactttcctggacgggggatatatcacgattggtgcccatacgttggtcggtccatgcgtacagatatacactccccatcatccgatggattatatcgagcgtcgtacggaaaaggaatatgcctatccggtgacgataggagaggattgctggattggcggcggtgccattttgtgtccaggcgtcaccatcggcgaccgttgtatcatcggtgcgggtagtgtggtgacgaaagatattccatccgatagcatagccgttggtaatccggcaaaggtcatccggaaaaatgaggcaaaaaagtgaacgtactaaatgcttgagaaacagagcgtgtcgctaaatgactaaaaaaatatcgaaaaatattatgcaaaagttttggtaatgtcaaaataagctgtacctttgcatcgcttttgaaacggaagtgtacgggcgtttagctcagctggttcagagcatctgccttacaagcagagggtcggcggttcgaatccgtcaacgcccacacaaaatccaagcactttcgttcatcaaaagggcgtttagctcagctggttcagagcatctgccttacaagcagagggtcggcggttcgaatccgtcaacgcccactggaaattttcattcgaaggtggtcttgcaagtgattgtaaggccattttttttatccgttaacttccttttcttaaaatgggtcaacgtaacaatctgaggtattttatatttaagcatataatttagcaagtctatataagaaaaaagctctatctcttactcctctgaactgtgctctaaatgctttgattttagcattgaatgactctgctgcggcattggttgccctcctttcaaaaaaattgattatattcagataatgtgtttgtatagaacgtgcgacccttccaaaggtgaggaaccctgatttatctacttcatcataccaccttgccagccttgtcaaagcaatatccttaaacttacactgatgatagattaagcctaaccgcatagacagataatatcctttctttatatcgggatattccttgaaaagaatttcagctcgtattctttgagactgagtccataaggattccttcttgtaaagcagataaatgcttctcgctaacaactgctttcttgtatctccattagcgaaaacaggtgcatgatacatctttccacaggcctttgcataagcaatctgagtggactcttcatccaaagcctcccagcgagcttttacacgcatctcctgcaccgcttcataagctaacttctgtacgtgaaagcgatcggtaacacgtttggccgcaggaaagcagatgcgggcaatctgctccatgttaggagccatatccaaagtaatctcgcgcacttggtaacggcggagacgggatagcttaagcaggacagaagtgaccgtatgaacgtccgtacctttaatgatagcaatcatactacctttaccaccgtgagcttctttattgatcagtacagtatagagttctccacgcgagagggctacctcatcaatacagatataagcaccgatattcttttcgaatagtagccaatcctctgcatgaacaagttggtcccaatggagataaccacttagatggttacggtattgacgctccaataaatctccgtcaactccatataaaacacctaagagcttacaactgatcggatagctatcaatatagttcttttaaaaaagacgcaaaatcttgcgtcatacgagtaccttcagccaccatacgccagttacgagagatatactcattatgcttctttaagatccagcgacgacgacgaatattaaggaagaccttcttgccacgaagaggaaaatcctgaacaataacaggatcataaaagcctttactctcagtatcctgatctgcatacttctcaggaacgatatttttttcctcaaggtagatcacaacttcatttacgctttccttcacatcaacaagagcaaagtactctaaagtgccttcaggaagaagaaggcgataaccgtttaactccataagctatgaatttggagacaaagataataatttataaatttacccctcaggtttttacattgaccctattttatatttaagcatataatttagcaagtctatataacctcaaatccgcaactacgcgcctaatatgatacagaagcgaaaagaatctgcatcgttagtaaaaagggggcacagtgcatcgaatgtcaccataaagacatataaatgccccttaccccaccatgcgacttgaggcaatacgcaaaatcacgactataagttgtcggtgttatccaaagtcattctggaacacattggcataagcattgttgcatgaatagatattcagcacatacttccttgatgtcctgacccatttggctggcacagagatgaacttaaagacaaacgtcttgatgcggcttgttgctttgagtccgaacctcttcacgtcaagcctcgccatgatgaatttatagaagttgcgtatgagtgccataagcagaagaaacaccgtgttttctcccataaaggattttggaagcctgttccagccgaatccgttattcatatcatcgaagatgcgttccttccctccacggaggttatagaattcgacaatctctttctcggaagactcgtagtcatttgtaaggatgcagcggtaggtgtattctccttcccacaggtcgagttcgccgtctatccgcttctgtctttgaatcacaagacggtatgccttccctttccatttctcgatgagaatggaggccagctcaaactcaatgccgcccaattccactttcttccaacctctgagggcaaagatgtcattgtagagcgaactgcatcggttagcacggatatagaaggtcttgcagtgtttagcaatctcttccactatctcttcagaacacgagccgcaatcagctctgaaacggttgataataagcttgttttgttcaaacctttcaaagaacctcttcagcgtgtccttctggtggaaacggacatttgtgttgccgtcgctgttctcaatgccgacaatcaagttgccaataaccgccacgccagggcgataaccaaggaacttcttgtatgtaggcttcgcatcaaacttctcagcctctatgaactggtggtcgaagtcaacgtcatacccctcgccctctttcagctgccctgtggacaataggcaattgaggagcagtgtattcagcttgtctgccgtgttgaagtcgtaggtcttgccagtgtcggatgtgtaggaaatgttatcctgggtcagttcctttatggctctaagaatcgtgtcggcactgcatgtgcgaagtgtcggatgaagcgaaaggtggtacatcagatgagtggtgacatcctcgatgcatgagccgccacaaaaataaacgctcataagcgaacggatgatttcgctgtattgataaccatacagcctgcatctcataccgagggttgagtcgattacagatgagagtctggagtcaaattgctccattattgaaaatattcctccaaaaggagtgagtttctcggatttaattgctacctttgccatgtctgtcgggtttgatacatattttgatttgcaacactaagataggtgaaaaatctgacatggcaaattcctgagcaactttttgttgctcaggtacttaaaaagttatatttgtaatagtgttgcggaattaaggtataagaaaaaagctctatctcttactcctctgaactgtgctctaaatgctttgattttagcattgaatgactctgctgcggcattggttgccctcctttcaaaaaaattgattatattcagataatgtgtttgtatagaacgtgcgacccttccaaaggtgaggaaccctgatttatctacttcatcataccaccttgccagccttgtcaaagcaatatccttaaacttacactgatgatagattaagcctaaccgcatagacagataatatcctttctttatatcgggatattccttgaaaagaatttcagctcgtattctttgagactgagtccataaggattccttcttgtaaagcagataaatgcttctcgctaacaactgctttcttgtatctccattagcgaaaacaggtgcatgatacatctttccacaggcctttgcataagcaatctgagtggactcttcatccaaagcctcccagcgagcttttacacgcatctcctgcaccgcttcataagctaacttctgtacgtgaaagcgatcggtaacacgtttggccgcaggaaagcagatgcgggcaatctgctccatgttaggagccatatccaaagtaatctcgcgcacttggtaacggcggagacgggatagcttaagcaggacagaagtgaccgtatgaacgtccgtacctttaatgatagcaatcatactacctttaccaccgtgagcttctttattgatcagtacagtatagagttctccacgcgagagggctacctcatcaatacagatataagcaccgatattcttttcgaatagtagccaatcctctgcatgaacaagttggtcccaatggagataaccacttagatggttacggtattgacgctccaataaatctccgtcaactccatataaaacacctaagagcttacaactgatcggatagctatcaatatagttcttttaaaaaagacgcaaaatcttgcgtcatacgagtaccttcagccaccatacgccagttacgagagatatactcattatgcttctttaagatccagcgacgacgacgaatattaaggaagaccttcttgccacgaagaggaaaatcctgaacaataacaggatcataaaagcctttactctcagtatcctgatctgcatacttctcaggaacgatatttttttcctcaaggtagatcacaacttcatttacgctttccttcacatcaacaagagcaaagtactctaaagtgccttcaggaagaagaaggcgataaccgtttaactccataagctatgaatttggagacaaagataataatttataaatttacccctcaggtttttacattgaccctattttatatttaagcatataatttagcaagtctatataacctcaaatccgcaactacgcgcctaatatgatacagaagcgaaaagaatctgcatcgttagtaaaaagggggcacagtgcatcgaatgtcaccataaagacatataaatgccccttaccccaccatgcgacttgaggcaatacgcaaaatcacgactataagttgtcggtgttatccaaagtcattctggaacacattggcataagcattgttgcatgaatagatattcagcacatacttccttgatgtcctgacccatttggctggcacagagatgaacttaaagacaaacgtcttgatgcggcttgttgctttgagtccgaacctcttcacgtcaagcctcgccatgatgaatttatagaagttgcgtatgagtgccataagcagaagaaacaccgtgttttctcccataaaggattttggaagcctgttccagccgaatccgttattcatatcatcgaagatgcgttccttccctccacggaggttatagaattcgacaatctctttctcggaagactcgtagtcatttgtaaggatgcagcggtaggtgtattctccttcccacaggtcgagttcgccgtctatccgcttctgtctttgaatcacaagacggtatgccttccctttccatttctcgatgagaatggaggccagctcaaactcaatgccgcccaattccactttcttccaacctctgagggcaaagatgtcattgtagagcgaactgcatcggttagcacggatatagaaggtcttgcagtgtttagcaatctcttccactatctcttcagaacacgagccgcaatcagctctgaaacggttgataataagcttgttttgttcaaacctttcaaagaacctcttcagcgtgtccttctggtggaaacggacatttgtgttgccgtcgctgttctcaatgccgacaatcaagttgccaataaccgccacgccagggcgataaccaaggaacttcttgtatgtaggcttcgcatcaaacttctcagcctctatgaactggtggtcgaagtcaacgtcatacccctcgccctctttcagctgccctgtggacaataggcaattgaggagcagtgtattcagcttgtctgccgtgttgaagtcgtaggtcttgccagtgtcggatgtgtaggaaatgttatcctgggtcagttcctttatggctctaagaatcgtgtcggcactgcatgtgcgaagtgtcggatgaagcgaaaggtggtacatcagatgagtggtgacatcctcgatgcatgagccgccacaaaaataaacgctcataagcgaacggatgatttcgctgtattgataaccatacagcctgcatctcataccgagggttgagtcgattacagatgagagtctggagtcaaattgctccattattgaaaatattcctccaaaaggagtgagtttctcggatttaattgctacctttgccatgtctgtcgggtttgatacatattttgatttgcaacactaagataggtgaaaaatctgacatggcaaattcctgagcaactttttgttgctcaggtacttaaaaagttatatttgtaatagtgttgcggaattaaggtataagaaaaaagctctatctcttactcctctgaactgtgctctaaatgctttgattttagcattgaatgactctgctgcggcattggttgccctcctttcaaaaaaattgattatattcagataatgtgtttgtatagaacgtgcgacccttccaaaggtgaggaaccctgatttatctacttcatcataccaccttgccagccttgtcaaagcaatatccttaaacttacactgatgatagattaagcctaaccgcatagacagataatatcctttctttatatcgggatattccttgaaaagaatttcagctcgtattctttgagactgagtccataaggattccttcttgtaaagcagataaatgcttctcgctaacaactgctttcttgtatctccattagcgaaaacaggtgcatgatacatctttccacaggcctttgcataagcaatctgagtggactcttcatccaaagcctcccagcgagcttttacacgcatctcctgcaccgcttcataagctaacttctgtacgtgaaagcgatcggtaacacgtttggccgcaggaaagcagatgcgggcaatctgctccatgttaggagccatatccaaagtaatctcgcgcacttggtaacggcggagacgggatagcttaagcaggacagaagtgaccgtatgaacgtccgtacctttaatgatagcaatcatactacctttaccaccgtgagcttctttattgatcagtacagtatagagttctccacgcgagagggctacctcatcaatacagatataagcaccgatattcttttcgaatagtagccaatcctctgcatgaacaagttggtcccaatggagataaccacttagatggttacggtattgacgctccaataaatctccgtcaactccatataaaacacctaagagcttacaactgatcggatagctatcaatatagttcttttaaaaaagacgcaaaatcttgcgtcatacgagtaccttcagccaccatacgccagttacgagagatatactcattatgcttctttaagatccagcgacgacgacgaatattaaggaagaccttcttgccacgaagaggaaaatcctgaacaataacaggatcataaaagcctttactctcagtatcctgatctgcatacttctcaggaacgatatttttttcctcaaggtagatcacaacttcatttacgctttccttcacatcaacaagagcaaagtactctaaagtgccttcaggaagaagaaggcgataaccgtttaactccataagctatgaatttggagacaaagataataatttataaatttacccctcaggtttttacattgaccccttaaaatctttatcctttatgtcttgttactcagaaaaaagcagtaattttgcagtccgataattatcatcataaatacgacgtatgaaacttgatttacttaccgcaatctctccgattgacggtcgatacagaggcaaaacggatgttttggctgcctatttttcagaatttgcactgattaaataccgtgtacaagttgaaatagaatactttatcacgctgtgtgagctgcctttgccgcaactgaaaggggtggataagggcgttttcgaaaccttgagaaacatttaccgtaacttctccgaagccgacgcgcaacgcatcaaggatattgagagcgtgacgaaccatgatgtgaaggctgtggagtatttcttaaaagaagagtttgacaagttgggtggtatggacgactataaggagttcatccattttggcctgacttcacaagatatcaacaatacgtctgttcctttgtctgtaaaggaggcgctggagcaggtgtactatcctcaaatagaggaactgatagcgcagctccgtgcttatgcggaagagtgggccgctatccccatgcttgccaagacacacggacaaccggcttcgcctacccgtttgggcaaggaggtaatggtgtttgtctaccgtctggaacgccagttggcaacgctgaaggcttgtccggtgacagcaaagttcggtggcgctacgggtaattacaatgcccatcatgtggcttatccggaatatgactggaaggcattcggcaataagttcgtttccgaaaagcttggcttggaacgcgaggagtatactacccagatatccaattacgataatctgtctgccatctttgatgccatgaagcgcatcaatacggtgatgattgatatgaaccgtgacttctggcaatatatctctatggaatatttcaagcagaagattaaagccggtgaggtgggctccagcgcgatgccgcacaaggtgaacccgattgactttgaaaatgcggaaggaaacctgggcatggcgaatgctattcttgagcacttggcggtaaaactgccggtttcccgtttgcagcgtgacttgacggactctaccgtgctccgcaatgtgggtatgccgttcgggcatatcattattgccatacaaagttctttgaagggtttgcgtaagttgctgttgaacgaaccggccatctaccgtgacctggacaattgctggagcgtggtggccgaggctatccagaccattctgcgccgcgaggcctatccgcatccttatgaagcgttgaaagcgttgacccgtaccaatcaggccattacggaagcgtctatcaaggaatttatagagggactgaatgtaagtgaagagataaagaaagaattgcgggtgattaccccccatacttatacgggaatttaagcaaccacagaagtgtaccggaggaatttcaactttttactccggcaattgttatagaaacatataaaattcaaggtataatagagacaatgaatggccgtgaggccaaggtttaattttattcgaataaaaaacaatgagtacagaaaacgaaacttggcgtgatgcttcttccgcagaggagaactcaggtgccggccgcgatggtaaccaatttaacaaggaaggtggctacagccgtccgtcttacaaccgtgataatggcgaccgtccttatcgccccagatttaacagtgaaaacggggaccgcccgcagcgtccttataacagtgaccgcccttatcgcccgcgctttaatcctggtgcggacaatggtgaccgtccgcagcgtcctcgttacaataacgataatggcgaccgtccctatcgtccgcgctataacagcgaaggcggcgaccgtccgcaacgcccttatggaaacaattcgggtgaccgtccttaccgtccgcgctataacagcgaaggtggcgaccgtccgcaacgcccttataatagtgaccgtccgcagcgcccgcgttatggtaatgaaggtggtgaccgtccgcaacgtccttataacagtgatcgttcttataatacagaccgtccctatcgtccgcgctataacagtgaagatggcgaccgtctgcagcgtcctcgctacaataatgagggtggtgatcgtccttatcgtccacgcttcaattcgggtggtggaaggcctggcggatatggtaacagagatagctatagtcgtcctgtccgtcgttcggccgattatgaccccaatgctaagtacagcaagaagaaacagatagagtataaggagcagtttgtggacccgaacgagcctatccgtctgaacaaatttctggccaatgccggtgtttgttcccgtcgcgaggctgatgaattcatcactgccggagttgtttctgtaaacggagaggtcgtgacggaattgggaaccaagattaaacgtggtgatgaagtgaagttccacgaccagacggtcagtatcgaacgtaagatttacgtcctgctgaacaagccgaaagatacagtgactacttcggatgacccccaagcacgtcgcacggtgatggatttggtgaaaggcgcttgcaatgaacgtatttatccggtaggtcgtctggaccgcaatactacaggtgtgttgctgctgacaaatgatggtgacttggcttccaagctgacgcatcccaagtatctgaagaagaaaatatatcatgtgcatttggacaagaatctgacaaaagccgatatggagcaaattgcggccggtattcaactggatgacggagaaatccatgcagatgccattagctatacggatgacgtaaagaaagatgatgtcggcattgaaattcactccggtaagaaccgtatcgtgcgtcgtatcttcgaatcgctgggatacaaggtgatgaagctggaccgtgtatattttgccggtttaacgaagaaaggcctgcgccgcggcgaatggcgttacctcacggagcaagaggtgaacttcctgcgcatgggttctttcgagtaatatataataaggtataataactgttttatggaaaagattagtagaacaaaggtggttgacctgctgaagcgtgaagattttggcgctatggtcaacgtgaagggctgggttcgtacccgcagaggtagtaagcaagtaaactttatcgcgctgaatgacggttctacaataaataatgtgcagattgtagtagacttgggtaacttcgatgaggagatgctgaaagagataactaccggtgcttgtttgagtgtaaacggggtgctgacggaatctgtcggttccggtcagaaggccgaagtgcaggcccgcgaaatcgaagtgctgggagcttgcgataacacgtatccgttgcagaagaaaggtcattccatggagtttctccgtgagatagcccatctgcgtccccgtaccaatacgttcggggcggtgtttcgtattcgtcacaacatggcgattgccatccataagttctttcatgacagagggttcttctattttcatactccgatcatcacggcttccgactgcgaaggcgcaggccagatgttccaggtaactacaaagaatctgtatgacttgaagaaggacgagaatggttccattatttacgatgatgacttctttggaaagcaggctagcctgacggtttccggacagttggaaggcgaacttgccgctactgcattgggagccatctatacattcggtcctacgttccgtgccgagaattccaatactccccgccacttggcagagttctggatgattgagccggaagtggcgttcaatgatattgcggacaatatggacctggcggaagacttcatcaagtattgtgtgcagtgggctttggacaactgtgccgacgatgtgaagttcctcaatgacatgtttgataagggattgattgaacgtctgcaaggtgtcttgaaagaaaacttcgtgcgcctgccctatacggaaggtatcaagatactggaagaggctgttgccaaaggacataagtttgaattcccggtgtactggggagttgacttggcttccgaacacgagcgctatctggtggaagaccacttcaagcgtccggttatcctgactgactatccgaaggaaatcaaagcgttctatatgaagcagaacgaagacggcaagaccgtgcgtgccatggatgtgctcttcccgaagattggggaaatcattggcggttccgaacgtgaatcggattacaacaagctgatgacgcgtattgacgaacttcacattccgatgaaggatatgtggtggtatctcgatacccgcaagttcggtacatgtccccactccggatttggtttgggctttgagcgtttgttgctgttcgtgacgggcatgacgaatattcgtgatgttataccgttcccacgtacgccgcgcaacgccgagttctaagtttcggaatatacaaactggataaaatcatccgcacaaacattctgttgtttgtgcggtttttttatacccaaaaatgttataatctcaaaataaatctttatatttgtgtctaacggaacgacataacgttaaccaacatcatacgaatatgaaacggaactatttctttaccatgctggcagcggtgctgcttgcggtagcgggagccaatgcgcaggagagcgcagagtttaggcctgcggaactggcaggaatttggcagttatgtcattatgtgtctgaaatcccggatgttcccgggatattgaaaccgagtaacacctttaaagtgctgagtgatgacggccgtattgtcaattttacaattattccaggcaaagatgccatcatcactggatatgggacttatcagcagctgacggataattcctataaggaaagcattgagaaaaacatccatttgcccatgttggaccataaagacaatatactggagtttgaaataggggacgacggggtaatgtacctgaagtattttatagctaaggacttgaatggtaatgaactgaatacatggttccatgaaacatggaagcgggtgggcatgcctgcaaaatttcccgaagaccttgtccgttgatatttctttctctttcccgtttctttctcatgcagctttgaaagccttctatgacggcaccgaccgatgaaggccgcatcataaagagttgttctgcggagattcttccctttctccgcaggataactttgtctgttgtatatcagccaagtggctctctaaaaaaaagtggaaaacttttgccagttctaagaaaaaccgtacctttgcaagccgattattatctcaaaaggataagcatttaattcatagcgagttaatcttccattgtccgggatgactggcttgcggtgaagaaaaaattttagtagtaacattttaaaaaacaattaagagtggatactttaagttacaagaccatttctgcaaacaaagctacagtgactaaagaatgggtcattgttgacgctacagaccaggtattgggtcgtctgggcgcaaaagttgcgaaactgttgagaggaaagtataaacctaactttacccctcacgtagattgtggcgataatgtaatcattatcaacgccgacaaagtaaaattaaccggtaacaagtggaatgacaaggtatatctgtcatatacaggttatcccggcggccagagagaaatcactcctgcccgtttgcaggcaaaaccgaacggtgatgacaagttactgagaaaagtagtaaagggtatgttgcctaagaacaagttgggcgcaaaattgctgggcaatatgtatgtatatgccggcagcgagcacaaacacgatgctcagaacccgaaaatgattgatattaacgtacttaaataagagataatggaagtagtaaatgcattaggcagacgtaaaagtgcaattgcacgtattttcgtaagcgaaggtactggaaagattactattaataagagagacctcgcagagtactttccatcaagcattcttcagtatgtagttaaacagccgttgaataagctgggtgttgctgaaaagtacgacatcaaagttaatctctgcggtggcggtttcaccggccagtctcaggctttgcgtttggcaattgcccgcgcactggtgaaaatcaatgctgaggacaaggctgctctccgttctgaaggtttcatgactcgtgatcctcgttctgttgaacgtaagaaaccgggacaaccgaaagcacgtcgtagattccagttcagtaaacgttaagagttggagaacggttggggcggacaagttgcttaattctcgactttcacctctcaactctcaactgaaaaagcgtttagtatctaaactaccgggactcttcagattcagactacccggcggttggtttagaagaaacaaaaaagaaagtaaacgattaatttaaaagaaaatgtctagaacaaattttgatacattattagaagccggttgccacttcggtcacttgaaaagaaagtggaaccctgcaatggctccttacatcttcatggagcgcaatggtattcacatcattgacctcaacaagacggttgctaaaattgacgaagctgctgaagctttgaagcaaatcgctaaatcaggaaagaaagtcctgtttgttgctactaaaaaacaagctaagcaggtggttgccgataaggctgcatctgtaaatatgccttatgtaatcgagcgttggccgggtggtatgttgactaacttcccgactatccgtaaggctgtcaagaagatggctaccatcgacaagttgacaagcgacggtacctattcaaacctctccaagagagaaattcttcagatttcacgtcaacgtgcaaagttggacaagactttgggctctatcgctgacctgactcgtctgccgtctgctctgttcgttatcgacgtaatgaaggaaaacatcgcagttcgtgaagctaaccgtctggggattcccgtattcggtatcgttgatacaaactccgatcctacgaatatcgatttcgtaatcccggcaaatgatgacgctactaagtcagtagaagttattcttgatgcttgctgcgctgctatgcaggaaggtctggaagaacgtaaggccgaaaaggtagacatggaagctgccggtgaagctcctgccaacaaaggtaagaagaaagctacaaaagcaagactcgacaagtccgacgaggaagcaatcaatgccgctaaggctgctgctttcatgaaggaagaagaggcttaatcatactggtgagagttgagaattgaaagttgagagttactttacggcaattctcaattctctattctcaactctcaattactttataaggatattattaacaattaaaataaaaagatattatggctgtaagtatggctgatataaccaagctccgcaagatgaccggtgctggtatgatggattgcaaaaatgctttgactgaagctgaaggcgatttcgacaaggcaatggaaattatccgtaagaagggacaagctgttgcagctaagcgttcagatcgcgaggcttctgaaggctgtgtgctggctaagactacgggtgactttgccgttatcatcgctctgaagtgcgaaactgacttcgtggctcagaatgctgatttcgtgaaattgactcaggacattctggaccttgccgtggctaacaagtgcaagactctggacgaagtaaaagctctgccgatgggcaacggtactgtacaggatgctgtaacagaccgtagcggtatcactggcgagaagatggagttggatggttacatgactgtagaaggtgcaagcactgtggtttataaccacatgaacagaaatggcctctgcactattgttgctttcaacaaggctgttgaagaaggactggctaagcagattgccatgcagattgctgccatgaacccgattgcagtagacgaagatggcgtatctgaagaaatcaagcagaaggaaatagatgttgctatcgagaagacaaaagctgaacaggtacagaaggctgttgaggccgctttgaagaaggctggtatcaacccggctcacgtggacagcgaagaccacatggaaagcaacatggccaaaggctggattactgctgaagacgtggcaaaggcaaaggaaatcattgctactgtttctgccgagaaagctgcacatctgcctgaacaaatgattcagaatattgctaagggccgtcttggcaagttcttgaaagaagtttgcttgctgaaccaggaagacatcatggacggcaagaagacagttagagaagtcttgaaagaagctgatcctgaattgaaggttgttgacttcaaacgttttactttgcgcgctgaataattccgcttagaaacgattctataaaaagaagtggccgtatatggagttgaattcctaaacggtcacttttttatgcctctacagttgcagtgagacggatgatgcgtttatcccacgggcttggtttgcgtgtatccttctgccttcaggaggtcgatgacacgttgtttgaagtcgccttgcacgatgatttctccatctttggcacttccgcctactccacatttacttttcagcaatttgcccagttctttcagattattgtcggtgcccacgaaaccggtgacaagagtgacgactttgccaccccggttcttgcggtccagctgtacacgcaggcgttgttgtgcaggggggagggtagcttgctcctcatcgtcattcatctcatagttgtagtccgggttggtggaatagactatattcaaccgttctttccaatcattattcttcatacttctttcttttaaacttcccaaaagtacgatattatgtggaattatgcaattagaaattatgttaagcttttgttgcatccgtgttactgattagaaaaaaagcactacttttgccaatcgcaatattgagaacttaaataagaaactatgagcagtccgttacagaaaaaagaaaccatgaaggtgccggaacctaccttgcgccggcttccgtggtacctttccaatgtaaagttgctgaaacaaaagggggaacgattcgtatcatccacccagatttccaaggaaatcaatattgatgcttcacaaattgccaaagacctttcgtatgtcaatatctcgggacgtacgcgtgtaggctatgaggtggacacactgatagctgtgctggaggatttcctgggatttaccaatatacacaaagcctttctgttcggtgtcggaagcttgggaggtgccttgctgcgcgactcgggtctgagccatttcggtttggagatagtagctgctttcgatgtgaagcccgaactggtgggtacgacactgagcggcatccccatctatcactcggacaagttcaagcagaagatgcaggagtacgatgtcaatataggcgtgctgacggtacctatcgaaatagcccagcagataacggattccatggtagagggcggtatcaaggccgtatggaacttcaccccgttccgtatccgtgttcccgagaacattgtcgtgcagaacacttccctttatgcccatctggccgtgatgtttaacagactgaactttaatgagatcaagtaatgaagattattgctgtaggaatgaactatgctctgcacaacaaggagctgggacatacacatgagaataaggaaccggttatttttttgaaacccgattcggctatactgaaagatggcaaacctttctttatccccgacttttccaacgaagtgcattatgagacggaagtggtggtgcgcatctgccgtttgggcaagaatattgctcctcgctttgcccatcgctattacgatgcggtgacggtgggcatcgacttcacggcacgcgacttgcaacgtaagttccgtgaggcgggtaatccgtgggagctttgcaaagggttcgacaattcggcagctatcggcacctttgtccctttggaacaagtgggcggcaatgtacagaatttggacttccatttgacgattgatgataaggaggtgcaacgcggtcatacagcggacatgctgttccgggtagatgaaatcattgcttatgtcagccgcttcatgaccttgaaaatcggtgacttgctgttcacgggtacccctgtgggagtaggtcccgtcagcatcggacagcacttgcagggctatcttggggaagagaaagtactcgacttcaatatccgctgagcggcattcgggatttttgtccgtaaacctctatgttagcttactaaacttctgctttataaagctaaagtacccctttactaatttcgtccaaacatcttttgtccaaagaactttgtaatcaacgggtaaatgtttacttttgtgatgtaatcttgaactatagacagagaaaccgtactgcatgaaacgtttgtttgccatccttttcgctttgttttgcactatgcctttattctgccaagatagagaggtggattcattgcttcgggtgcttgatgcatctgtgcaggggcgtgaacgatatacactggaacgtcagtctcaaatcaatgccttgcagtgccagctgaaggctacccgttccgatgcggaattactggaaatctaccaggagttgttcggcaaatacagcgcctaccgcatggactctgccttgtgggcagcaaatcgttgcgtggaagtagcccagcgtatgtccgtagcatcgcatctctactctgcccgtatgcgtgtggcagaggtgatgattggtacaggaatgtataaggaaggactggaaattttggaagacattccccaggaggaactgggtgcgatagatatgttctactactataatctttatcataaagtgtacacgctgatggcatcctatgctttttcagaagaattgcaggcgtcatactcccggctggcatatcagtacaaagactccattctgcgtgtgaagcgtcccgattcgcaaggctatcaactaactttgggcgacaaactactgtatgagggtaagtatgacgaagccataggtgttttggagggttgctatgatatccatagccagaaggacttcagccttgccattccttctgttgcattggcaagcgtttatggtgccaaaggagaccacaagcaggaaaagaaatatcttaccatctcggcaatagccgacgtgcaaagcggaacaaaggaatacatttcgctttggaaacttgccaacctgctctatggcgagggcgacatagaacgtgcgtatacctatatggaatgctccatgcaagatgctaccttctgtaatgctcgctaccgtacgatggagatttcggggatgttgcccgtcatcaactccacctacgaggccaagttgcatgaggaaaaagaacagctggtcaccttatttatatggatatccatcctggcggcagtattgctggtggccttggtctatatttatcatcagatgaagcgcctttcccttgccagaaagaccatggatgacatgaacaaggaattgaagcacatcaacggtgacttgcaggaactgaatgctcggttgcaggagtcgaaccgtgtgaaggaggagtacatcggctacgtcttcaacatgtgttccgtctatatagacaagcaggaagaattccgcaagatgctggcaaggaaagtgaaggccgggcagctggacgacctggtgaaaaccatccactccaccacctttgtcaccggcgagttgaaagaattcttccatacgttcgacagcgtcttcctgaaactctatcctaagtttgtgaacgactttaataaccttttgcaggagaacgagcgcatctatcctaaagagggcgaactgctgactccggaactccgtgtgtttgccttgattcggttgggaatttcagatagcggaaagattgccaccttcctgcattactcttcgcagaccgtatataattaccgcttgaaagtgcggagcaaatcctttctttctaaagaagatttcctgaatatggtgcagaaaatagggtaaaactcctcctatgccctttatgtgaatctactttcttactttctgctgattttcacaatatgctgttttttaatgttttatagataaagctaatctgcttgcgtctactttaagcttctactcgcctttttcgcgggacagttaatcatatacctttgcaacatcgacaaaagattaaagttaactgtagttttttgataagtattagttaagaagattgggtataaggattgcatggaaccgggcgtgcttggttccttttcttggcaaacattatttttattaactatatattgtattatatgaaaagcatgattaaaatcgcaaagagtattctcccgttgctgggattgctcttgtctttgtcactttcggcacaagatattgcagtgaaaggacatgtgaaagaccacacaggtgaaccactgattggggctaacatcttgataaagggtacctctgtgggaactatctctgatgtggacggtaactttactttgaaagctgccgtcaatgatattctctccattacatgtatcggttttaagggccaggaactgacggttaccggcagcaatacaccgctcgtcatcactttgcaggaagacacggagatgctggacgaagtcgttgtaatcggttacggtcaagtgaagaaaggagatgtcactggttctctgctaactgtgaagccggacgagctgaacaaaggaaagcaattgactgccgaagacgctctggtgggtaaggttgccggtgtgaacattgtaccgggcagcggtgctccgggcagcggcggtaccatccgtatccgtatgggagcttctttgtcagcagacaacgacccactgatagttatcgacggtgtgcctgtcagcaacgcctccatcagctctatcaacccgaatgacattgcttcgtttacggtattgaaagatgcttcggcaacagccatctacggttcgcgtgcctccaacggtgtcatcattatcactacgaagaaaggaaacaccgacggtgtttcacgtccctctttcagctacagtgccaacgtgacggtgggcaatgtgtataagaaactggatgtactttccgcttccgaatatcgcgaagcctttgccaagtatgccaatgctccggaggctttcaagctgggtgatgtcaataccgactggcaggatgaaatctaccgcgtggcaatgggtacagaccacaacctctccatgactggtgctttgaagaatatgccttaccgcgtgtccgtgggctataccaaccagaacggtacgttgaaaaacaacaactaccagcgcctcaatgccagtatcggtttgtcgcccaagttcttcgacaagcatctctctgttgacatcaatatcaagggtagcatcgaggacgaaaagccggtttccaccagtgtcatcggaagtgccgtaggtttcgaccctacacgccctgtatatcagaactatgacggtaatgtaggtttggggtactatatgtggatgggtgtaagtaatacccccatcacgctagctgcctcaaaccccgtctccgacttggaacttgccgacaagcagaacaagaccaaacgctccatcggtaatattgccctcgattataaaatacacggttttgaagactttcgactgaacctgaacatggggtgtgatttcctgacggaagacaaacacgataacatgcctgacttggcccccgccatgtacaccggcaacgaacaggatggtaccggaaagcgttatacatatcataacgacaaacgcaatacactactcgacttctacgccaactatgccaaagacttcaacgaccataacctcaatgccatggctggttacggctggcaacgtttctggtacaagaaccatgataccactaccgacaccaagggtgaggatcttacctctcccaagcacgaggaagctgaactctacctgctctccttctacggtcgattgaactactcttggaaacagcgttatatgctgactgctacgttacgtgccgatgcttcttctcgcttctagcccgagacccgttggggctacttcccttccgtagccgctgcatggcgtgtgaacgatgaggctttcttggcagacaacaaagtagtgtccgacctaaaactccgtttgagctacggtcagaccggccagcagtccatcggttcctactaccagcatttgtccacctatactgcatcttacgatgagtccagatacttgttcggtaacaagtggtacaccacctaccgccccaacggctacgatcccaacattaaatgggagactacggaaacttacaacatcggtatcgactacggtttcttgaacaaccgcatctcgggtacgattgactactactggcgtaacacgaaagacctgctgaacgacatttttgtacctgccggcagtaacttcaccaaccgtatcgaaaccaacatcggtgatatggaaagcaaaggtcttgaaatcggtgtgaacttggttcccatccagaccaaagattgggaatggaacatcagcggtaacttcacttggaatgcctcaaagattaccaagctgaacaccatcgacaacgagagcaactacgtaaagacaggtaacgccggaggtacaggccgctatctgcaagtacacatggtaggagagactccgaatacctactatctactgaagcaagcttatgacgaaaacggacagccgctggacggtaaatacattgccaaagacggctccatcacttctagcgaagaagactctaacaagtacgtcactggtaagagttccaaggccccttactattgcggtctgtccacccgtctgtcctacaagaattgggatttgggcatcaacggacacggtagcttcggtttctatgtctataactatgtggctgcttccaactccttggatgcactctatggcagcaacggcgtttccagcaacatcctgcgttctacgctcgaaaacaagtttacgcaagaccgccagtttaccgaccatttcctggagagaggcaacttcttccgtatagacaatatcaccatcggtcatacgttcaataaactgtggaacgacgggacatcgctccgtctctccttcgccgtacagaatgtatgcactttgagcggatactccggtcttgatccggagctttatgacggaatcgataaaaacatctatcagcgtccgcgtacgttcatgctgggagttaaccttaatttttaatgactaaaaacagatacatgattatgaaaactagatatttcaaattagtaacagtatgtttgctggctgtgtcactttttgcttcttgcctgggcgacctggatacattgccgctggatgataacgaactgaccggtgagatggtgtactctactcccgagggctatatcggcatgattgccaagtgttatgctgccctgatacagacagggcagaagggtggtgacggaggagacggcgatgtgtcgggcatcgatgaaggatattctggttatactcgtgccttgttctacttgcaggaagcttgtacggatgaaatcgtattccagtccggtggcagcaagggtgtacgtgccatgctttacttgaattgggatgcttctactgagattgtgggttatccttattaccgtcttttcatgaccattaactattgcaacgagttcctacgtgaatgtacagagagcaaattgcaggagagaggtgtgtatgaagccttgaaagacgagtatcaatactattgtgccgaagcccgcttcatccgtgcttatagttacagtatgctctgcgacctttacggttctacacccttcgtggacgaaacgatggaagtaggtgacatgcccgagcaagccactcgcgaggaaatctacaactttgtggtgtccgaactggaagaattgaccaccctgctgaaagaacccaaaaagaacgaatatgcccgtgtggaccgtgtagcagcctggttcttgctgtcacgtgtttacttgaatgccgaaacttgggtaggaaagaatgaatacacaaacgcatacaaatatgccaaaaaggtaattacggaaggtaattatccgctggcttccgattatcgccacatcttcttggcagacaatgaaacttgttccgaaatcatctggccgctggtgcaggatgcagactatgcgcaaggcagcgcaggtactaacttcctgattaaggcgttgatgaatggagatatgggcaactatatccggataggtgtgaacggcacctggggcaatgcccgcgtaaagacacagctggtggatatgttcgaagaagaagaccagacttttgtggcagacgacatctgggggaacggcaagaaagacaagcgtgcccaattcttctctattggccacaccaaagaaacttgggtagaaggcaaggagttccagagcgatttcaataacggctacgcctgcatcaagtggagaaacgtgcgcaaagacggcagtgaactggaaccaggcggcacgaagtactcctctgtcgattatccgatgttccgtacggcagatgcctacttgatggcggctgaggctattctgcgtggcgccgaaggtggttcgcgtaccgaagcgttggagtatgtgaatgaaatcagagaccgtgcttacatgtccggcaaatatggtaatggcgtatcgggacgcatcagcgacagtcggttgaatcttgatttccttttggatgaacgtgcccgcgagttgcacatggagttggttcgccgtacagacctgattcgttttggtaagttcaccaagggatataactgggactggaaaggtagtgacaatggcgtggcaggttcttacataggtaaggatgtggacgacaaatacaacctcttccccattccgcaggacgagtttaccaccaatcctaatttgacacaaaatcctgatttcttgaactgaaaagctttattatcctatgaattttagattgaaacgaatcgttttttctaccattctttttgccgcatcggctgtgcatacatcgtcgtatgcacaagccacgcgcgaagaaatcttcgataacattgccgttaccggaggagtgtattatgcctatctggcaccgggtgtacagaccaaggcaccgaagggttacgagcctttctatatcagtcacttcggacgtcatggctcgcgctggctgatttctgacgaggagtatatccgtgtgatggaagtgtttgaaaaggcacatcaggcaggtaaacttactccgctgggcgaagatgtgcgcaagcggttggctattgtctgggcagatgccgaaggacgcggtggagacttgagcccagtgggcgtggatcagcagcgcggtattgccgaacgtatgtatcaggcatttcccgaagtctttaaaggtgcgccggagatgtcggcatgtgctacactcgtaatacgttgcgtactcagtatggatgccttctgcgaacgtctgaaggaattcaatccccaactgaagattgagcgtgaatctagcaacaaatacatgccttacttgaactttcatacgcaggaagccatgaagttcacttcgcacaagggcccttggtacgaggagttccgcaaattcgagaagagccatgttcgtcccgaacgtctgatgaactcacttttctccgataaagagtttgtccataaacgtgtgaatccggaggaactgatgcgcggtctttatgcgatagcctcggacatgcaggacgtggagcaggaagtatcgttctatgatatttttgagaagcaagagttattcgacatttggcagatacacaactacaagaactacgtgtgcgacggtccctcgcccatgaccaacggactgatggtggcaaacgccaaaccgacactggagaacatcattgccgctgccgacgaggctattgcttcgggtagaaactcggctactttccgctttgcacatgatggaaacattatccccctggcaggattgatgaagttggagaactgctataacgaggaggccgaccccgataagttctatcaggcgtggtgcaactacaaggttgcgccgatggcaggaaatatacagctggtgttcttccgcaagaaaggctcgccggaagatgtgattgtaaaactgttgctgcacgagcatgaagtaagtatcccggtgaagacggatatggctcctttctatcactggcaagatgtgagagctttttataaaggaattgtagacagtctgcccgacagaccgtaacatattcttcatactccataccgattgcacggtttacgttcgattttctttccacaaggggagcaaaaaacggcgtaatccgtgcaatttgtgtcttgttccttctcttgttcctattttttccgtactttcgtatcaacttaaagaagtaacgatatgaagatacgtgtaggtttcggctttgatgtccaccaactggtggcagggcgcgagctttggctgggcggtatccgcctggaacatgaaaagggattgttggggcactcggatgcagacgtgctcatccatactatctgtgacgcattgctgggagcggcgaatatgcgcgacatcggctatcattttcccgatactgccggtgagttcaagaatatagacagcaagattctgttaaagaaaacaatagaactgatagctgctaaaggctatttggtgggtaatattgatgctaccatctgcgctgagcggcctaagttgaagtcctatattcccgaaatgcaacgtacgcttgccgcggtgatgggaatagacgaggatgacatctccatcaaggccaccaccacggagaaactcggctttacgggcagggaggaaggtatatccgcctatgccactgtattgatagtgaaggaatgacatgaaataatatcaactcaatttaatcatccacttatatgaagaaaatctccttgaccttttgtctggcacttttatcctccttgttctgcccggcacaagtatcgcctttacagttcaacaagaatggagagtttaaaatcgtccagtttacagacatccactttaagtatggtaatccggcttcagacattgctttgaagcgtattggcgaggtgcttgatgctgagtgccccgatttagtagtctttaccggcgatgtggtttatgccgcacctgccgatacagccatgcgcaaggtgctttcctatgctacggaccgtaagattccttttgtcgtaacctttggcaaccacgacaacgagcagggaaaaacacgtgctgagctttatgacgttatccgttccatgcctttcaatatccagcccgaccgtggcggagtagaatctcccgactatgtcctcacactgaaatcctcggacggcaagaaggatgcagccctgctttactgtctggattcccattcctactccaaactacccgacgtaaaggggtacgactggctcactttcgaccaggtgaactggtaccgccagcagagtgccacttataaagcaaagaacggtgggcaacctttgcctgcactagcatttttccatattcctttgccggaatataacgaagccgcttccgacgagaacgccatactgataggtacccgcatggaaaaggcttgcgctccggaactgaatacgggcatgttcactgccatgaaagaggctggtgatgtgatgggtatgtttgtcgggcacgatcatgacaacgattatgccgtaatgtggaaaggtatcctgctggcttacggccgtttcaccggtggtaataccgagtacaaccatttgtccaacggtgcacgtgtcattttgatgaaggaaggtgcccgtactttcaccacctggattcgtctgaaaggtggcgaaattattgataagacggtctacccagacagctatatgaaggacgattggcgtaagcgtccgttggtgacggaataatggtgaacttaaaaagaacgatatggacaagataaggaccggattagccgcttacggaatgtcgggacgtgttttccatgcccccttcatctccactaaccctcattttgaattgactgccgttacggagcgcagtaaggaactctcccgggagaagtatcccgacgcttgtattgtgcggagttttgaggaacttatcgaagtggaagagctggatttggttgtcatcaacacgccggacagcactcattatgagtatgcccgccgcgccctcgaagcaggtaagcatgtggttgtggagaagcctttcaccaccaccgtggcagaagctgaggaacttgtggcatttgccgcaagccgggggctgaccttgagcgtttaccagaaccgccggtgggactgcgatttcctgacagttaagcaaatactgtccaaaggcttgctggggcatctggtggagtttgaatccaccttcccccgttatcgtaattttatcaagccgaatacttggaaggaaaccggacaagatgggggcggcttgacctataacctgggtgcccacgtcatagaccaggctgtgcagctgttcggtatgcccgaagccgtctttgcagatattgccacgttgcgcaaggacagcaaggtagacgactatttcatcatccatttgctacgtccctcaaaggcgcccgaagtgaagataacgctgaaatccagctatctgatgtgtgcgagcgaaccccgtttcgtcctccacggtagggaaggttcttacgtgaaatatggtttcgacccgcaggaagccgccttgaccgagggcgtattgcccggcacttcgcactggggcgaggaggacaaatcctcttggggactgctttatacggaaaaagacggtagaattgtttatgaaccctatccaagtcttcccggtgattatgcagctttttatgagaatatctatcggcatatccaccacggcgaacctttgcagagcgatgcccgcgaggtggtcggagtcatccgcttgattgaggcagcctgggaaagcagccgtatgcagcgtgtggttcgtatctgatagaaaatcttttacccggtagggacgtgtaactttacatgtgtcaatcgggtgtatttcgtacttcctattatataggtacgcgcgatgcgtgccgatgctatcttcattacttctcccatctggtaggcatgttccacggcgggcagctggcatgatttccggcttgccgtgcgtgcattcagccggatgctgacgaagttgccgatggagtctttcagtttcaacacttggcgtacatagaaataaggagtggtccctttgagctgcgtcttgtaggggttgtcttccagtcgcacgctgagtacggtcagtgtcaggttctccactttttccccttccttccccaggaaacgtccgccggtggtttggtacgtttttcttcgttgtatgtcgaggtggactgaatggtaaatcttggcaatctgtacgaaacgttcctgcttggggatgcgtggctggaatttgaaggctatccacgtaagataggcagggtctatacggagaatttcgtgcaggaaatgtccgtggtatttgcctatggagataatgtcgtcccctttgctctgcattcttttggcattgtactccacaagcagcaggctgcgcggtgagtagaagcatagcgtgcttgccatccgcaacgtttcgtgaatgtcggtggaaaggtcgcaaatgtagaagatggactgtctcccgggcagtggagagtaaatccacaaagtatattggagatactcaggccggggcagtacgataagataggcccctacttccttataagaggctctcccttgattgtatgcattcagtttactatacaataagtcttgttcagtctgcggtataccgggtatgattggatttgccatagctcggaataatttattccaaatatacatttttggaatgaaagaaacaaggggaagccaagaaatatcagaagcgtaccatcaattccaatactactttgtcttgttccgactccttcgctatgctgtttttggcatagaagtatttctcgtaattcaaccggaggtctgtgcggaatgctttgctgaggctgaaggtgatgccgcccgttaggcgttggcgtttgtagtcggtcaccgtcaatctgccggtttcttcatcggcggttttggcgtcgctctggtcggtcatcatgtcgtagcgcagcaggaaagacattttgttgaatactttccgtaacggcagatcgtagttgatgaaggtgttgacagcgtgtacatctttgaaagcgttgtcggaatattgcttgtacaaatattcgccttcgatatggaaacggccggtttcatagtaggcaccgatgtcgtaggattgcatacgtacttcttccggctggatgctctgcacgctcagtgttaggttcagtcctttggtgaagagaaattgggctttggcggagtagttcacttccttgtgccattctttctggttagtcagtccggaaccgttgaaaagtcctccttccacagtgataggtacaccggtaggcagggtatatcctactgtgaaccccacgtcccgtacattgcccacttgcttggcgatgaacgagcggttggggaagtattgctggtgcggtgagcggtgggcgtcgatggtgaaggggacgcgcatttgtccggcggtgactgtcagtccttttgtcgggaaaagccgggcgtaggcatccagcatcttgatttgaccttcgtcggagaggtctatctcggctttgtaggctacgctgggcaatacgttacccgtcacgctgacgcgggcattgcgtacttcgaaacgtcctgcacccatggtggtctgatattcgtatttggcgcggatggttccgtggacttccggcaggtagtctttggtttccatcttctccttttcaatcttttttccgtcctcgttgatggagggcgtttgggcaattgcggccaacggcagcagggcaatcagtactgtcaatgcactttttttcataatctgttgttgtcgaatgatttgtcggcgacaaagttcggacatacgtgttgtgtttttgtgtcatatatgttgcattgttgttacaaaaactgttagagagaagaactgtgataggtgccgttttaatctttttatggcttgatttagtttcttgtttttattaaaacgttggttgttaggattatatgtgcactgagcaaaagtttcagtctgaaatatcaatgaaatattcctatctttgaagaaaatatcaagaacgtttgttttagaactctgatgcttatgaaaagacagttgtttttagcaggaataagtttgatgctggggggcatgtcaatgcttgcccaagatatatctccggtgaattccgtttcttacgaatggaagagcgtaccgatagtgggaggaggctttgtggacggtattgtttttcacccagaagctcccggtatccgttattgccgcaccgatatgggaggggcctatcggtgggatgctgcttcctgccagtggacgcccttgttggactggataagtctggatgaaagcaatctgcagggagtggagagcattgccattgacccgcagaatccatagaacgtgtatattgcctgcggtacgtataccagtagctccaatggggccatactctgttcttatgatggcggcagaacctttgctcgcgttgatgtgccttttacgatgggtggcaacgagaatgggcgtggtaatggggaacggatgatggtggacccgcagaatgggaatatcatttatatgggaacccgtttgcatggcttatggcgcagtacggataaggggaggagctgggcacgggtagcgtctttcccgaatgtctccgagaagcttaatcccgtcgaccgtgccgcatgggggaatcgcggcagtggtattgtctgtgttgcctatgatgcacaaggcactcgcgacgagcgtggcacccgtgacatttatgtggcagtgtcattgatgggcagggaaaatctgtttgtgagtcacgactatggtgaaagttggcagccggtcgggggacagccgatgcagtatcgccccacgcatatggtcttgaccggtgacgggcaattggttctgacgtatggagatactcccggtccaagccagatgggggatggaggtgtgtggaaatacgatatccgtaaaggcaaatggacagacatttctcccgtcagactgccaggtggcgaaaaggcaggatttggctatgcagccgtatctgtagattctcgtaatccgaagcatctgattgccagtacacacagtctagggggcaagcacggttataaaagtgatgagatgttccgtacgactgacggtggcaagagctggaaaccgattttcaagacgggatatgagtatgattattccaaagctccctatacaaaggtagcgcccctacactggatgttcgacatagagatagaccctaccgacgctgaacatgccatgtttaccaccggtttcggtggctgggaaacttttaatctctctgccgtggaacgcgaggaaccggtgaaatggagtatcatgtctgccggtatcgaagagaccgtgcctctcgaactttatgctcccgaaaaaggggcgcgcctgatttccggtatcggtgattatggtggctttacgcatttcgacctcaatcgacccgattcgttgggcagccatgccaatcctcatttcggaaatacgaatggagtgacaggcgcttggctgaagcaggatttggtagtcagggttggtacactgtttggccatcagccggatgcaaagactatctcatattcagaagatgggggcaggcactggactatgtgtgccaccgttccaacagagaagtctcgtaatgggcatatcgccgtggcagcagatggctcttcttggatttggatacccgaccgctcgaaggcttatctgacccgtgataagggggcttcttggcaagtttgccgtggtttgcctaagaatatccgcgtcatagcagataaggtgaaccccaaacgtttttatgctgtagatgctgtggccgaaatattgtatagcagcgaggatggtggggcgacttttcatgccgacacattgaatttaacggttaaacggtcccaacgcggtaatgccggtgccgctgtacgaagaggagatctgcgtggagggcaagaccgtatctatgctactcccggtcgtgaaaaagatttgtggattgcagcttatgatggtttgtaccactctgtcacttcagaaaaatttgatttccgtgttttggataaggtacgtaccatctatgcttttggcttcggcaaggcaaagccgggtaatgattatcctgccatctatctgataggcgtaatcaacgggcaatatggtttcttccgttctgacgatgcggctaactcttgggtacgtatcaacgatgatgcccatcaatatggcttggtattgcatatctgcggtgacatgcaggaatatggacgggtttatatagggacacatggccggggaattgtgacgggagtacccgcgtcatagcttttcttcatgcagttcatgtaatctcctttgtgcctacttttcatcaagtccgtacatctgcagcctttatgggcactgagatgatacggacttttagtttcttatattgtcattatgtactgtaggttactgccgtcatttcggtatttgcagtcattacctccataatctcttctcttacgaatattgtcttttcatttagtataaatttagtcaacatccgtttggaaagtcttgtgactgtatgatatattactttttcaaagaaaatatttttcgttcgtttatattttaatatatttgcattccaatcttcccatcatttgttaataaatgttggctagtgtttgatgatggtattgcataaccttaaatgaaacctaatggtacacttgtatagatatatcatttttataattggcctttgcactacccaactggtttccgcatacggattaagatttcgtggcgcggtcagtcctattgatcaaagaacatcctatgatgtgtttgctcatagttatccttctttcagagactattttgacttggagttcaatatagctttgtattctaccgagagcgtcggttatatcttgcgtgttaaggggaaggatgaaggacagattttcaatcttttttttgattttcgtggtgatgatatcttgttccgtttgaatcaagaggggaagtgtgtgttgatagccttgcctgtcaataaggctggagcgatgaaatcccattggtttagggtgaagatagcctttaacttgaagcaggatgagattactctcaagattcatgatcaggaaaaagtatgcaagggtgtagcacttgccgatgagttcagcccgaaaatagtgttcggtaagagcgaccacattattgacgttccagagatagctattgataagttggttgtgcacgctgaccacacttacacgtttcctttggatgaggcggaaggagaatcggtttttgaccgggaagggattctttacggtaaagtggaaaatccggtgtggctgattaatgaggcctttcactggaagcgggagggcggttttgcgtcggcttcagaagcaggttcttgttataatattggtagaaatgagatttattatttcaatcgtgattcgttgtttgtctacaatatggagacgggaaatatttctgccaaggcttttaccgaacggtgtcctgtgaagttgtttcttgccggtagtttctttgacagtgccagtgaaaggttatatgtctacgaggtatatacagagaatggggatgcggagcctatgatagcaagtctagacttgaatacattgggctggagagtagagagttacagtcggctcagcatgcagttgcatcatcattgttcctattatgatgcagtccgcaagcgttacatcatcttcggtggtttcggcaatatgtattacagtaataaattctatatattcgatccggaagaagcgcgttgggatacacttggttctctatccggtgattttctttgtccccgttatttctcttcggccggttatttggacagtaaccattctgtctatatttttggcggtatgggcaatgagtcgggtgaccaggtaataggccgccgttattttcacgatctttataaggtggatttgcaagagatgcatgtgcagaaactttgggatatttcggaaggacagcccaatgtggtgccggtgcaggatatgctgatacagaatgattcttgtttttatgtcttgcgttatcccgagagtgtgtctaactcgtttttgcatctctaccgttttcttataaaagatggcagctgtcagatattgggtgattccattcccatttactctgataaaatcacgacaaatgctcgtctttattataacgagcgtttaagcaggctttttgtgacggtgcaggaaacacgtgatgacgtatcttccaaattttctgtttattcgttactctttccaccggtttctcttgaaaaatatattgcgaataacagtggaggaagtgtttcacgtgtatggctagtgctggcggtcgcggttgtagttggtggaggcgtatggatagtgtacaagtggcgccgaaactccggtaagggcgaggccggcaaagctgtgagacaagacaaggaacagcttcttgatgcttctgataccactaagatggagaggcaggcagtagatgcgggaactgccaactccatgtatttattcggtgatttttccgttttcgaccggagtggtcgcaacatctcttatatgttttccttgcgtatcaaacaaatattctgtctcattttgcgttatagcgatgccgacggaatttcttccaaacaactgagtgacttgatatggcccgacaagccaaaagataaagtgaaaaactcgcgtggagtagccatcaatcatttgcgcaagattctgaaagaactggatggcatagaactggtttatgagaaaggatgttttcgtttcacgctgtcttctgtcttttattgtgattatctgcgttttatggcgatagttgctgaaaaccgggtagagaattgccggcaagagttcctgcatattgtagggcgtggcaagtttgtcggctttatggacgatccgttgttcgacggttttaagcaagatgtggagtgccgcctggaagtgcttgttttacagttgatgaaagaggcttttgaggctcaggattattcggaagctgtgagtttggctgaagcggaattcaatattgatccggtgaacgaaacagccttgtcttgttgcatcaagtcacttttcatgcttaagcatgaaaatgctgctattggtacttatcaaagatttgtggcagaatacaaaaaacatacgggggaagactaccctactcctttcagcctttattggaattagctttcccggtatgctgcatccggtattttttgtctttgctttttcttttatttttctgtctgctttcctgaagttcttgttgttgttcttatatgcaattgaaaagtatttataaaatatttttaagtttaggcacatatgtaggctatctcagtcgtatactgagatagcccattatttctcctctgataattaggctcccaaaatcgatgaattcaatatggtaaatgaagacaaatgggctgttgaaaataaagatttagtaggacttatacgataattgttttattcgcggcactacttttgtggcttaaagtgttaggcgaagtctgtactttcttttatgggttaaaatgatctggattaatgttttttttatgccattatacccaaattaaccctaaaattaacccatgtggaatcaattttgcaaataagggggcggtttgcaacaccctgaggctgatgtgggcgattggcatcggctcctttgttatattaacttctaattaataatttaagctatgaaacagttgaaaaagctgaaagtttttggactgatggccatgcttataagtatggtcatcatggcgagctcttgttcggacgatgatacgggcggaagggctttatcttatggaaaggtgacgggtgtcgtcacggatgatttatcttcccctcttgaaggggtcacagttttagtcgatggttccggtataacggctgcaccggacggtcctcagaccacgacaaattcgcagggtgtatatacactcgaaaatatttcaataggtacacatataattacatttacgaaagccgattaccagacggtaagtgttaccgttgtggcaggaaaattcaatgaagaacaagtggctgaagttagccctaaaatggagtatgcagccgcaaaaatcaaaggaaaagtagttgatgcaggaaagggaaatactccgttggaaggagtgacggtcagcatcagttccacacagactgccaccaccggaagcgatggtacatttgaaattggtaatttgccattggcagactacaccgttacttttaccaaagcaggctatgcttccattgcgaagaaggtagctatagctgactttgtggatggcattgccactatagaggttcgcatgggtgggacagaaatattgcgcggactaactcttgatgatttgaaagctgcagaaaaatggtattataacgaataccgtggcggacgaaacgctgaaagctatccccactgggattgggcttgcaactacatgtgtacgatggacttccgtggcgactgggaagagcagaacgaaggaaccactctccacattcgtaacaatgaagaggaccgcaagaatcctgctgacttggagatattcgattcctttgtattcggaagcaagctgattacagaagataactacatgatgaccctccagatccgtacgcacagtgccgacgaagctgctccggtatattatggcgtgcaggtggtagacctgactgctaccgatccgaaggctgagatggtgggtgatgtcagaacctatgcctcggaaaattacatttctgttccagtagacttgagcaaatacatcggtaaggaagtaatcattgccatcggtacattccgtgcccagactggtgattactggaagcagttggtattgcgccgcatcgcttttgctaaagaagccgttgaaggatggggctggttgcccggaacatcggtcgaagagttggatggttgggagatgacccgggaaatggtacgctctaccatgccgcaaatgaagtcgaagttcactggcttgagtccggttgagggaaatcgcgataactatgtggacgcctatcgtgcatggcgcgaggtggaccatatttgtgccgagtggtcgtatatgccgctcagtaaagatcctgaggtattcccttccgaaggctatctgataaagacacgtagtggaaacaacgtaagtaccaccgttcccgaatcttatttctatgccaaattctccattgcgtctgggtgtgataggatgacattgaagactcgcaacttcagtggaacgaatgctaccttcttcaaggtgacagctatccgtatggacggaactgtcgtacacttggcacctgcatcccatacggctcagtttgctgaggctgctgccgacggttgctggaaatttatccatcaggccggaggaaagggggatccggaggcatatgccgattttgtctatgatttgtctcagttcaacggagaagatgtaatgttgactattggtgtctttaagggagaagagaacggcgacgagaacaaactggtgctgcgtgacatcacaatggagtgacaaactgctgatatttaattttttttgtttttccctctttatctccttttgcatcttgtgaggggagagacggggactgaagaaactaattgtatgaatataatgaaaaatttatttactttattgactttgctcttattgacgttagtggcttgcagtaatgactctgctgttgatgaaaagccggacaacggaggtacgtatgttccaggtaatctgccggtgcagaatgtggcacgtgccatagagctgattgacaatgctgtagagtactattttacgggtacgggcatggctatgtcacgttattataacccttataccggaaaccgttccagtgagttgggcagtgtgtggatgtacactagctccattgaggccgtgaatgctgcgatgaaagccatgaagaccgggaagacaaagggagagacggctctttatgactctcactttaaccgctacaaggaacttttagctcaactttatgacaatctggagttttatgcaggtacttttacgctgacctcttatacgcagaccaaacagtggacggtatacggcgtaaaccgcggcaacggcaagggagctgcacaagtggaaggtaccctcaatgtttacgatgaccagatgtggctggtgcgtgaactgttggaatcctatcatattactggtgaacagcgctatctggaaaaggcagaatacctgacagaatacgtgcttgacggttgggactgcacccttgatgagcaaggtagtccattgggaggcatcacatggggaccggggtatatcaccaagcactcttgcagtaatggccctattgtcagtcctctggtgtggctgcacgaaatttacaaaggaaaacctgacgaagtgacctatggctacgtggctgccgacaacagtcgcaagctacgcactgagaagaaatctgactattacttgaattttgccaaagctgtttacgattggcagaagaaacatttgctgagaccagacggggtgtacgacgatatgatgggtggttatgattcaccggacataaaatatgttaccattgatggtgaacgctaccggactggttccaaactgcgtgatcgtgtaggtccggccatcacttacaatagtggtacgatgctttccggtgctgccgaccttttcagagttacaagcgatgcgacttatcagacggacttggcggaattgaccgataatagttttgcttactttgccaaacctgaagctgccaaaccgggctgttatacatttgatgtcagcggattctgcaactggttcaacggtgtactgatgcgtgggtatgtggatgcttattcaacccacactgctgccgcaagctgtatcgaggcattccagaataatctggattatgcctacgaaaactatcaatacaaacatatgcttcccaccaatctgctggtggggtggtacaaagctgaaaagaacaagaacaacgtggaaggaatgttcacttttgcttttgccgccgaatatgcagtgttggcgaattatgaatggagcaagaaataattttaaaattaatggactatgaagaattttagcaagatgcgacaaggattatcctacatggtaatggcattccttctgatgctgattccggcaggtgttttcgcacaaaactctatttccgtttcaggaatagttatggatgacaccaatgaacctgtcattggcgctgccgttatggtgaagggcaccactataggtgtcattaccgacattgacggacgttacaccatcagtactcctgcagatggtattctcagtttctcttatgtgggattgaaggacaaggaagagaaagtgaacggacgtaccactatcaacatcattatgcagactgactccaagatgatagacgaagtagtggtgataggttacggaacacaacgccgcggatcggtgacgggtgccgtttctgccgtcaaagggcaggatatgataaagaccaagaacgaaaatccgcagaatatgctgacaggacgtattcctggtttgcgcgtatggcagaagagttctgagcccggaactttcaataacagtttcgatattcgaggtatgggatctccattgattatcatcgatggaattcctcggagtacggaagaattccagcgtttgaatgcaatggatatcgatgatatttctgtgttgaaagatgcttctgccgctatttacggtgtacgtgcagccaatggtgtagtgttggtgaccaccaaaaaaggaggagctggaaaaacggaattctcttacaatggttcctacactttccaacaaccttcacgtatgcctgaactgtgtgatccttatgaatctatgacgctgttcaacgaaatgtcgatgaataacatcaatggcggttcatgggtcttcagcgaagagagctttgaagcattccgtaacggtacgcgccgtacgacggactggaatgacttgattatctctaatgtggctccacagacacaacacgacatcagcatttccggtggcaacgagaagacgaagttctatatcagtatgggctacttttaccaggaaggtatcttccgttcgggagacttgaattataataagttcaacctgcgttccaacatttcaactgaagttgctaaaggtataaaattcgaacttggtgtaagtggcatctccgacgaacgcaatacgccttacagtagcgcacaggatatcattcgtaactattggcgccaaggtgtactttatcctgcatacgctgatcctgaagggacgatgttgaactacaacggtttggacatggaacagaatactgtggctatgatgacggccgatatttccggttacaagaagtacaagcagaaatatttccagtcttcggctactttgacggtagatttcagtgaatacacaccggtattgaagggattgactgccaaagctatgttcagttacgattatcgtgctgacaacaacgaggctttccgcaaagagtactaccagtatgcttatgacgagcagaccggtacctacaatcagaaggtttataacgaaagttcgcccagcaacatgcgtcgcgagttctatgacaaatcacagatgttgggacaattcacagtgaactacgaccgcacttttaacgatgtccaccatgtgggtggtgttgtcggttgggaggtacagaagcgcaacggtgacaacttctacgctgtccgcgacctggcattctctatgccttacctgctggctggtgtgactgaaggacagatcggcgccatgcagactggtaataatgatttgtatgaacaagctaacgaagctttgataggtcgtgtcaactattcgtttgccgaccgatacctgctggaagcacagtttcgttacgacggttccagcaagtttgccaaggggcatcaatggggtttcttcccttcagtatcggctgggtggagagtatccgaagaacctttcttcaaaagcatagatgctttgaagtttgtcaatcagctgaagctgcgtgccagctacggtgtgctgggtgatgatggtgacttgaattatgactgggctatggggtacacttatcctgcaaccagcggtaacatgtctaatggcgactataacggttattcaccgggctatatcttcggtggcaaattcatcagtgcagcaagcccgatggcattacctaatgagaacatcacttggttcaagtcgaagacattcgacgtgggtttcgattttgaagcttggaacggtctgctgggtgtttcgttcgactattttaatcgtctgcgtactggccgtttcgctcgccgtaccggtgatttgcctacggtggtaggtgcttctgctccgcgcgaaaatttggacagtgaccgccaattcggtatggaattggaattgacccaccgcaacaagattggacaagtggcctataatctgaaaggtattgctaccgttacccgtcagaaatacctgactgcttcggaaaaaggtccttgggccaattcctacgatcgttggcgtaatgacaacttgacgaaccgttatcagggagtacagttcggttatacttctgccggacgctacaccagctggaatgatatttggagctatcctggctacaaggaacgtgacattctgccgggtgactacaaatatgaagactggaatggtgacggtgagattaacggtcaggacgaacatccgtttgcctttgaccagactccatggttgcagttcagtttaaatgccggcttgcaatggaagaacttagatttcaacatgctgttgcaaggctctgcgctgggttctatggagtacaaagagcctttgcatgaaatttggggtaagaacggtggcggtgcattgacacagtttcttgatcgctggcatcccgtagacccgaaggccgatccctatgccccttctactgtctggacttccggtcactacgcctacacaggtcgttgggcgaaaaacaattcagctttcaatcgtgtaagcaccgcttaccttcgtctgaagagtatcgagctgggttatacattcccgaaattgaaacagattcccaatgccagtctgcgtatttatgccaatgcttacaacctgctgacatttacgggtgtgaaatttgtagaccctgagcatcccgatgatgatttgggacgcatgtatccgttgaacaagacctatacattgggagtttccctttctttctaattaatgatataaacctaaaaaataataaatatgagacataaactgatatccgcgatgttgtgcatgactcttgccacttcatgtgtcgatatggatattgctcccaaaaatatcgtgacttccgagtcgttgctttccaatgagtctggtatggacatctatatggcacgtttgtatagcaatatgccatgggaagactttaaatacctctcacaatggggggtgaactttaatggttggttgaatgccatgggtattgacggtactggtgaagccatgaacagggacggtatttgctgtgcgtttaccggtgaagacaatgcttactggggcaaggcttttgaattgttgcgcgatgccaacttcctgcttgagaacctgccgaaatatcagagttcctatgcagaaattacttacaaccactatttgggcgaagcctattatgtgcgtgccacagttttctatgccatggcccgtcgttttggaggtatccctttggtgacaaaagtcatccagtatcctggagacggaaatttggaggttccccgtgccagtgaggaagaaacatggaaccaggttttggcagattatgacaaggccattgaattgatgatgtctagtagccccaagagtggttacagtaataagtatgtagcattggctttcaagtcagaagcaatgctctatgccggtagtgtagctaagtataatgaaacggtaactggacgtttgaccggtttgggtaccaagacgggagtacgcgtgatcggattcgatgaggaccgctggcaagaggcttccaagaagtatttcactgaagcctacaaagccgcttccgaggtgattaaaagcggtgtatactcactttacaagaagaaatgggccgctaatgatccggaagcacaatatcaaaatatggtggatatgttctccgatcttagcaataatcctgagaacatctatgtgaaggagtacgtttaccccaccagtactcatgcttacgattcttacaacttaccgctcacctttaaggctccgctgaactgtggtgtttgcccgacagccgactttgttgagttgtttgatggtttcgaccgttatcccgacggtaccttgaaggtgacgacaggcaattcttgtaccgaaggtaattacgttatgtatgatagtcccatggactattacaagaatgctgaacctagattgcgtgcttacgtcatcttccctggtgatgtgtttaagggtaaggaaattgaaatttatgccggtgtttatacgggggctgcgcctgtcaaaccgcttcttagtgactattcgtatggtgctgccactaccaagtacaatcatctgagtgcttataaagagaagcccaaaacgctttatctcagtccgaaacctgaagatcagcaggaaattgtaaccctgcctgatggctctacgatgaaggctgctggccagaacggtcctttctatgaagatggtggaagtgctatgaccggtctgctggcacgtaaatggttgaaccctgatcctgcatttgttcctcgggaaggcaatagtgcacaaccttttattttgatgcgttatgccgaagtgctgctgaatgcagccgaggctgctgtggaactttcgttagcgggcgtctcttctcctgatggtacagatatgttgagtgtggcaacgaaagccatcaatgatattcgtgagcgtgccggtgcccggttgttgactgcctcgttgactggtacaacagacagccgtgatatcgtccgcaaggaacgtcgcaaggagttggccttcgaacataagaccaaatgggacttgcgtcgctggcgtgtgaatcactatgaaggtcgcgatggattctggggtgagcaacgcaataaggaccgtttcagcaacacgactcgttatcgtttccgtggtatctatccgttctattcgacggcgaccggcaagtggttctttgatgtttgtttcaactatacgactgccggtgacaaggacttcggttacactccggtggactattatttctcgattccgggtggtgaggtttctaagagtcctgtgattgaccagcagcctaatcgataaaactcaataattaaaaaacttaaaacgtatgaaaaagacaatattttatagcttattcagcgccttgttcatgttaacctcatgcagcatgttcgaaatagacaactatgaggaaccggcagaaacaatttggggcgaagtggtagatgaagcaactggtaagcgtgtattgaccgaccagggcagtgagggtatccgtgtccgtctgaccgaattgagttggggtgacaatgtgcaacataatcccgatttttactgtatgatggacggtacattccagaacacgaagctcttcaaaggtgagtataatgtccgtatcgacggcccgttcattccattagtgcgtgaaaatacagacggtaccttgctccatgatggttccgtcaatactgaaatcagtggtacgacgaaagtgaaatttgaagtacagccctttctgaacgttgagtttgtaggtgatccgcaggtgagcaatggggtcatcaaggcacaagtacgcgtgacacgcggtgtgtcggatgaagttttccgtgaaaaaatccagccgatgggcaattggaaagacgaatacttgaatgtaactgacatccagttcttcgtcagctactcaaacacagtaggctaccgggcacgcgacgagcgttggtcgagcagcatcagctatgaaggtaagagtttcgaagatttactgggtaaggaagttattgtccagtctaacggcagtataccttcgggccgcaaagtgtttgtacgcgctgccgcacgtattaactacgacacacctgtaggtagcggcacacgccgttggaactacagtgagccggtagaagtacttattccgtagcttgatggcatacagccgaggctttgctgctatagtgccaaagcctcggctgttgagcaatcttttgccattatagtggtaaggacaatgattaataccataaaaacaagaaaccaatatgaagcaaaaacattttttgataagtttgactgtcttggcaataggcatctctgtagatgctcagaccaaggacaatgttaaaaccacttttcaaacctcacgcgagtggaagccttctatagacaatagggccgatgcggtgatggtgtatggagtagggggaaatccttcggataaatcacgcaaactatcttttgaggaacgggtgaagtcctggaaagagcgtggatatatcatacactttatgaccggtattgcttggggtgaatatcaggactattttaccggacaatgggacgggaaatggcatttggatgagggacaagtcacacagactggagatacgatatggcacggtcacatggtgccctatatcgtaccgtcggagaattttttaagttatctgaaagagagacatgtgaagagggtaatcgacgccggtgtggatgccatcttcatggaagagcctgaattttgggcaagagccggttacagtgattcttttaaggaggaatggaaaaaatactatggcttcgagtggagaccgcaacacgagtctccggaaaatacttacttgtcgagcaaactcaagtattacttgtactatcgtgcactgaatgaagttttcacctttgccaaagaatatggtaaaagcaaagggatggacgtgaagtgctacgttcccacccactcgctggtgaactattcgcaatggcagattgtcagtccagaagcaagccttgcctcacttccttgtgtggacggttacattgctcaggtgtggaccggaacttcgcgtgagccgaatttctttgacggtcgcaaacgtgagcgtgtgttcgagactgcctatctggagtatggctctatggagtcaatgactgctcctactggtcgcaagatgttctttctgaccgaccctatcgaagactggccgcgtgactgggcagattataagaaaaactatcaggctacctttactgcacaattactctatcccaatatagccgattacgaagtgatgccttggccggaacgtatctacgaaggactatatcggacaagtgccaatagcgacaagaaagaacgtattccccgtttctattccacacagatgcaggtgatgattaatgccttgaaccgtatgcctctgactgataaagaactgactggaagcaaaggattcagcgtactgatggcaaactccttgatgttccagcgtttccctacgcacaacggatatgaagacccacaattggcgaatttctacggtcaggcgttgcctttgctcaaacgaggggtacccgtcaagaccgtccacattgagaacctcggctataaggaagcgctggctgacacaaaagtgttgttgatgacttatgcgaacatgaaaccgcttgagcctgaagcgcacagccacatagccgattgggtgaagaaagggggagtattgatttatagtggaacggacaacgaccctttccagaatgtaagggaatggtggaataccaacgggcataactatgctaccccttccgcacatctttttgagcagatggggcttcctgcctggccgaatcagggagaatatagttacggtaagggaactgtatgtgttattcgtaccgatcctaaagattatgtcctgcatgagggtggtgacaaatattttttgtatcttgcggcccggatgtacgagcagaacgcgaaagcgggaaagctggagttcaaaaacaacttctatctgcaaaggggagattacgacttggctgctgtgcttgaagagagtgtgagcgacgagccgtttactgtggaaggatgtttgattgacctttttgatcccaaattaccgatatacacttccaagcggataaatccgggtgagcaagccttgttgctgaatgtagaacgtgtagccggtaagaagaagcctcaagtgctggcttcggcaagtcgcgaagaacaggaagaacgcggaaaaggctggtattcctatgtggcgaaaagtcctgccgagacttcaaacgtatcgcgggtactgttgccgagttgtcctaagagtgtgacagtcgatggcaaagaagtattcgataccaagcgttggcatgcagcaagtcatacctatttgatagagtttgagaataatcctgacggagtgtcggtgaagttttgctggtaatctcagaccttttattttttagcatttaacaacataaacaattatattatataaacgatatgagaaaaaagcttttataccccttgttggcatcatgcctttttgcgtgcagtgacaaggatacgtcttatgaagtcgtcaagaatgacttgagagctccagcctacccgcttgttaccatcgacccttatgccagtgcatggtccatgagcgataacctttatgacagccccgttcgccattggacgggtaaggatttccctctgattggcgtggtgaaggtagacggtgtttcctaccgttttatggggactgaagaattggagatgaatgcaatcgtgcccacctctcagcaaggggagtggactggacggtatatcacagacaagcccgctggcgactggacatctgccgattacaatgattccggatggaagtcggaccgtggtgcctttggtaccaaagaaaatgagcctacagccaagacccaatggggaacccgcaatatctgggtgcgccgtacggtaaatatcgaccgcgatttgaccggcatacctgtctatctggaattctccaatgatgatgatgccgtattctatatcaacggagtgaagatacacagtacgggaaccacatgcaataagaacaaggtcgtgaaactttccgatgaggctttggctgctttgaaacaaggagacaacatcattgccgccgagtgtatcaatccggtcggcaacggtctgctcgacttcggcctgcagattccgaaacatcaggaaaccgtgtttggcaacacagctgtgcagacctctgctgacgtgcagcccatgcagacacactacgcttttacctgtggtgatgtcgacttgaaagtcactttcacggcacctcttttcatggaagacctgaagctgttgagccgccccgtgaattaccttacttacagtgttgctgcccgtgatggcaaggaacacgatgtggaggtgtactttgaggcctcgccgcgctgggcgctcgaccagccttaccagcaatctgcaagcgagggatatgaagctgacgggctgctttacttgaagagcggaagcaaagagcagaatatcctggctaagcagggcgatgaccttcgcattgactggggatatttctacatggtttccggtaaagaaaacacagcatacagcatcggcaacagtaccgaactgcgcaagaacttcgtgaacggcacctttaattcagcttcgcttgcgggtgaggacagcaacgggaatatggccttggtgcgtgactatggtaaagtgaggaaggttaccgacaagataatgctgggatatgacgacatctattccatccaatacttcggtacaaacttgcgttcttactggaactcgagaggcgaccgtaccatcgagtcggaaatgctggccgcctacaatgagtatgacgagttgctggcacgctgctatgccttcgataaaaagttaatggaggatgcttctgccgtaggcggcaaggaatatgccgaactctgcgcgttggcctaccgtcagtccattgccgcccacaagctggtggaagctcccaacggtgaccttttgtggctgtcgaaggaaaacaacagtaacggctgtatcaatacggtggacctgacctacccctcggctcccctctatctgatctataatcctgaactggagaaaggcatgatgaacggtatcttccattatagtgaaagcggcaaatggaccaagcccttcgccgcccatgatttgggtacctatcctcttgccaacggacaggtttacggaggcgatatgccggttgaggagagtggaaacatgctgattcttacggctgccattgctgccgtagaaggcaatgccgactatgctgccaaacattgggaagtgctcaccacctggaccgactatctggtggaaaagggactcgatcctgagaaccagctctgtaccgacgacttcgccggacactttgcccataacacgaatctttccatcaaggcaattttaggggtggcctcttatggccggttggccgaaatgctcggcaagaaggatgttgccgaaagctatacaacgaaggcccgtcagatggcggctgagtgggaacgtatggccaacgacggcgaccattatcgtctgacctttgacaagccgggtacctggagccagaagtacaaccttgtctgggataaattgctcggactgaacatctttgatacaaaaattgcagaaatggagataccttattatctgacgaagcagaatatttatggtttgcctctggacagtcgtgagacttataccaagaccgactggatcatgtggactgctacaatggctcctgacctggccactttccgtgaattcatcgttcctctgcataagttcatgaacgaaacgatagaccgcgtgcctatgtccgactgggtgtttaccgacaagcccaattggcgtggcttcaaggcccgctcggtagtaggcggatattacatgaaaatgcttgaaggcaagctgattggaaataaacaatgacaaaatctattaaacgaatgaaaagactttttgcatggggaaccgccctccttcttgtaggcggtatgcaggcggccttactgccggttgacgagccgattactcctgttgattacgtcagcaccttggttggcacgcaatccaagcatgccctttctacgggcaacacttatcctgctgtggcaatgccttggggtatgaatttctggacaccacagaccggtactatgggggatggatgggcttatacttatgatgccgacaagattcgcggattcaagcagacacaccagcccagtccgtggattaacgattacggacagtttgccattatgcctatcaccggaaaggtggctttcgaccaggacgagcgtgccagttggttttctcataaagccgagaccgccactccttattattataaagtctatcttgccgaccatgatgtgacggcggagtttgctcctaccgagcgtgccgctgccttccgtttcactttccctgaaacggaggaagcctatgtggtggtcgatgccatggacaacggttcttttgtgaaaatcattccggctgaaaagaaaatcataggctacaccaccaagaacagtggtggtgtgccaagcaatttcaagaactactttgtattgcagttcgataagccttttacttatactgctgccgtgaaggacggaaagattgccccccgtaccaccgaggcaagtgccaatcatgccggtggcatcatcggttttcataccctccgtggcgagcaggtgaatgtacgtgtggcttcctcgttcatcagtcacgagcaggccgagttgaacttgaaggaactgggtgaccggacgcttgaagaggtggcgaaagccgggcgtgacgaatggaaccgggtactgggccgcattgaagtgcaggataccgacctcgaccgtctgcgtactttctactcttgtttctaccgttctgtgcttttcccgcgcagtttctacgagatagatgcgcaaggtcaggtaatgcactacagcccctataatggtgaggtgctgcccggctatatgtttaccgacaccggtttttgggacactttccgttgtctcttcccctttctcaacctgatgtatccatccatgaatgccaagatgcaggaaggattggccaacacttacaaggagagcggtttcctgcccgaatgggccagtccgggacaccgtggttgcatggtgggcaacaattccgcctctgtggtggcggatgcctggctgaaaggtctgcgtggctacgacatcgagacattatggaatgctgtgaagagcggtacggagaatgtgcatcccgaggtttcctctaccggacgcctgggacatgagtattacaacaagctgggttatgtgccctataatgtgggtatcaacgaaaatgtagcccgtacgctggagtatgcttatgatgattggtgcatctaccagttgggactttcgctcggcaagtcgaagaaagaactggctccttttgccaaacgcgcgctgaactaccggaatcttttcgaccctgcccataagttgatgcgcggcaagaatgaagacggtacgttccaatcgcctttcaaccccttgaagtggggtgacgccttcaccgaaggaaacagttggcattattcgtggtcggttttccacgatccgcaaggactcattgacctgatgggtggcaaggactccttcaaccagatgatggattccgtgtttgtgttgccgcctgtgttcgacgaaagttattatggcagtgtcatccacgaaattcgggagatgcagatcatgaacatgggcaactacgctcacggcaaccagcccatacagcacatgatttacctctataactattcctcccagccgtggaaggcgcagtactggctgcgtgaggttatggagcgtatgtacagtgccaatcccgacggctattgcggtgatgaggacaacggccagacatctgcttggtacgtgttttcagctttgggattctatcccgtctgtccgggtacagatcagtatgtgctgggtgctcctcttttccgttctgtgcgtctgcacttggagaatggcaagactgtgacgattgaagctcctgagaatagtcgtgccaaccgctacgtgcagaaacttacagtggatggcgttgactatacacgcaactttctgacacacgagcaactgacgaacggctcctcgctgcgcttcactatggacaatgtgcccaacaaactgcgtgggacaggagaggaggatgctccttactccttctcgaaaacgcttaaaaagaagaagtgacctcaaagccaaaaccatagcaattaatgatgagggtgtgccgaatgtctgacggagtgatagctgaaaaacgttttgacacaccctctctctcttacgataaatcactgtttgaaaaccctatttaccatgaaacttaagaaacttactatttactgcttggcattgttttgctcctcttcttctgtttatgcgcaatctggtgaagaagttcaaaagaaacgtagcggcaatccgatttttcccggttggtatgccgaccctgagggagtagtgctggacgggaagttctggatttatcctacatattccgctccttatgatgaacagacttttatggatgcctattcttcgcccgacttggtgcattggaccaaacatccacgcgtgctttcaaaggaaaatatcccatggttgcgccgtgctttgtgggcgccggctgttatcgaggccaatgaccgctattatcttttcttcggagggaacgatatacagaacaactctgagattggcggtatcggtgtggctgtggcagacaatccggcaggtcctttcaaagatgtgctgggcaagcccctgattgataaaattgtgaatggcgcacagcccatcgaccagtttgtgttccgtgatgacgatggcacttactatatgtactatggcggatgggggcattgcaacatcgtgaaactgtcttccgatttacttagtgtcgttccttttgatgatggcacagtctataaagaagtgactcctcaggactatgtggaaggtcctttcatgttgaaacgtaacggaaagtattacttcatgtggtcggaaggcggttggggaagtcccgactaccgtgtggcctatgccattgccgactctcctttcgggccgttccatcgcgagggaatcattcttcagcaggatgccgatgtggctaccggtgccggacatcattcagtggtgcgtggaaaaggtaaggacgaatggtacatcatttaccaccgtcgcccgttgggagaaacggcagcaaacagccgtgccacctgcattgaccggatgtactttgacaaaaaaggaaagataaagccggtgcgcatgactttcgagggagtgaaagctaccacccctccacttgactaatagcaattttcaattcaaatttatatagaagaaatatgagtcttaattccaaaaagatttgtttcagccttgtcctggctgcggctgccgggatggttcaggctgtcaatagtagctgccttcttgccgatgcgggctttgtagccgtgcaggataatacggtatctgccggtaactatacctctaaccgtcctaaagagaaacaacgacttttccgttccacttccgtggagaaagagattgtccgtgtacagatgcttttgaagaaccgcaagctttcctggatgtttgccaactgttttccaaatacgctggatactactgtgcacttccgcaagggcagcgatggaaagcctgatacttttgtatatacgggtgacatccatgctatgtggttgcgtgactcaggggcgcaagtatggccatatgtgcagcttgccaataacgacccgaaactgaaagagatgctggccggtgttattctacgccagttcaaatgtatcaatatcgacccatatgcgaatgcttacaacgatggtgcgctgcccgatgggcattggatgagtgaccttactgacatgaagcccgaactgcatgaacgtaaatgggaaatcgactcgctttgttatcctttacggttggcttatcactactggcaggtgacgggtgacacttcggttttcggtgctgaatggctggaagccatccgcaatatttatactactttttgtcagcagcagcgcaaagagggtaccggtccctacaaatttcaacgcaagacggagcgtgcgctcgatacgctgaacaatgatggtctgggtgctcctgtccgtccggtgggacttatcgtgtcctgcttccgcccgtcggacgatgccacaacgcttcagttccttgtgccttccaacttctttgctgtcacttccttgcgtaaggctgccgagattctggaaacagtgaacaaggagactgctttggctgccgattgccgtgccttggccgatgaggtggaaatggctttgaaacgctatgcaacctacaatcatcctgaatttggtaccatttatgctttcgaggttgatggtttcggtaatcatttgctgatggacgatgccaatgtgcctagtttgcttgccatgccctatctgggagatgtagacgtcaatgaccctatttatcagaatacccgccgttttgtgtggagcgacagcaatccttatttcttcagcggcaaagccggtgagggtatcggcggaccgcatatcggctatgacatggtgtggcctatgagcattatgatgaaagctttcacaagccgggatgatgccgaaatcaaaacttgcatcaagatgctgatggatacggatgccggtacgggcttcatgcacgagtcgttccataaggatgatgcaactaacttcacccgcccttggtttgcttggcagaacacccttttcggtgagttgatattgaagttggttaatgaagggaaggtggatttattgaatagcattgattaagatataacatgaagaacttatatacatgggtggctgttttccttttcgtggcattggcaatttcggttatggcttgtacttctgcctcttctgctggtacggtgacggtggttgaccggccggatatacatgctgtcaatactaattatatgggttaccgtgccccacttcgtccattgaactttataaaattgccagtaggcagcatccgtcccgaggggtgggtaaggaaatttctggagttgcagcgcgacggcctgaccggacatttaggggaaatcagtgcttggttggaaaaggatgacaacgcttggcttacgaccggcggagaccatggttgggaggaagttccctattggctcaaagggtatagcagtttggcatatattctgaatgatccggagatgatagaagaaaccaaatactggattgaaggcgtatttgccagccgccagccggacggttatttcggcccggtcaacgaacgcaatgggaagcgcgaactttgggcacagatgatcatgctctggtgcctgcaatcttattacgagtattctcaggaccggcgtgtcatagacctgatgacaaactactttaaatggcagatgacggtccccgacgaccagcttctggaagacttttgggagaacagtcgtggaggtgataatatcatcagcatctactggctttacagccatacgggagatgcttttttgctcgaattggccgaaaagattcatcgcaacactgcggactggactcagtcgacctctttgcccaactggcacaacgtaaacattgcccaatgtttccgtgagcctgccacttattatatgcagaccggtgattctgccatgctgaaagcctcttataatgtccatcggctgatccgtcgtactttcgggcaggtgcccggcggcatgtttggggcggatgagaatgcccgtttgggatatatcgaccctcgccagggggtggaaacctgcgggctggttgagcagatggcttccgatgaaattatgcttcgcatgacgggcgaccccttatgggccgagcattgcgaagaagtggcatttaactcttatccggttgccgtgatgccggactttaaagcgctgcgctacatcacttgcccgaaccatgtcgtcagtgattccaagaatcatcatccgggcatcgacaaccgcggaccgtttctttcgatgaatcctttcagcagtcgttgctgccagcacaatcatgcacaaggctggccctactttgccgaacatctggttttggcaactcccgacaatggagtggcaacggctctttatgcagcttgcaaggctgtggtgaaagtagctgatggaaaggaaatcactttgcacgaagagacgaattatccttttgaggaagacatccgcttttctgtctctaccggggggaaagtcgtcttcccgttctatttccggattccttcatggactcaaaaggcgaaagtacgcgtgaatggtgaggaagtggatgcggctcccgtggcaggaaagtatctctgcatccatcgcgagtggtcggatggggaccgtgtggaattgacgtttccgatgtctttgtccatgcgcacctggcaggtcaataaaaacagcgtaagtgtggattacggtcctctcacgctctctcttaagattgctgagaaatatgtggagaaggacagccgcgaaacggccatcggtgattctaaatggcagaaagatgctgaccctcaaaaatggcccactactgagatatatcccggcagcgcgtggaattattcgctggtgttggacaagacagaacccttgaagcacttcgaggtaatccgtaaatcatggccggctgacgactacccttttacggtggccaatgtacctttggaggtgaaggctgtcggccgattggttcccgaatgggaaatagatgaaaccgggttgtgtggtgtgttgcccgaagaggatgcggcgagaggcgataaagaagaaatcacactcatccccatgggcgcggcgcggttaaggataactgcgttcccgaatacaacagaataaattgatgaatgatgcggacagtagtgaagtgctgatacctttaactcctgacttgcataaacagaaaacttgaaataaaatgaaacgtattgcttttttggattatgtgcgcgtgtttgcgtgcttcttggtgatgttggttcatgccagcgagaattattatggagctgtaggctctacggacatggtgggaccgcaggctttccttcagaacgaggccgataggttatgggtatctatttacgatggcttctcacgtatgtctgtgcctctgtttatgattgtttcggcttacctgcttgcgcctatgaagaagggacaaagctgttgggagttttaccgcaaacgtttcctgcgcatcatgccgccgttcatctttttcatggtgctgtacagcacgttgcccatgttgtggggacagatagacggcgaacagtctatgaacgacctttcacgcatctggctgaactttcctatgcttgccggacacttctggttcatgtatccgttgataggcctttacctgttcatcccggtcatctcaccgtggctggagaaggtttcggcgaaagaagaacgtttcttcatcggactgttcctggtttctacttgcatacctttccttaaccgttggtttggtgaggtgtggggacagtgcttctggaacgaatatcacatgctatggtatttctcgggttatttgggctaccttgtgctggcacattatatccgcgtgcatcttacttgggggcgttccttgcgtctgcgggtcggtttcctgcttatgctggtcggggcggtggctaccatatggtcgttctatgtccaggctgttccgggagtggttcattctacgccggtcattgaggtgggatgggctttctgcacccttaattgcgtggcgttgacggcaggcacgtttctgctgttcagttgcatcagcattccgcaacctccgcgcttcattgccgaaatgtcgagactcagctacggcatgttccttatgcacatattctggcttggcttgtgggtgtcggtgtttaagtctacattgggattgcccaccgtggctgccattccggttatagcggtatgtacgtttatcagttgtttcgtggcaaccaagctcatctcgttgataccgggcagtaagtggattatcgggtagagacggtaataactaagattgcatatgaataaattacttcccctcttatgcctttccctcgctctgtccgcctgttcacgtacggaaaagaggttggaggcgcatgttttcgtaccggatgcagtgtgtgctcatacgccggcgctgaaccagggccgcacttctacctgctgggcttatgcttcggcctctctgttggagtctgactggctggcggggcatcccggagataccgtgcgcctgtcgcctatgtacatggtcaggcagaaatacttgaatcagtttgatgcctactattactcttgcggcagggaagaaatcaagaatggcggactgggacattctttcctccgtgtgctggaggaagacggtgtgctgccgttggaagcatatcgggggcgacggcagggaagcaaaaggcatgaccacggggctttgctgaaacaactgaagaagctggcggaggagaccgtgaagcattgcgacctccccggctacagaaaacgcgctgtagccctgctggacgagcagatgggggcggtgcccgattcgtttctctaccgtggcaggagctataccgcccgttcgtttgccgactcgcttcgcttcaagacggaggattatgtgcagttgacgagcttcacgcatcatcctttttataccccttttatattggaagtaccggacaactgggagcatcagtgctatttcaaccttccgctggacgagttggagcaggtggtgcgccgtgctctgtctgccggcaagacggtggcttggcatggagatgtgagcgaagatactttcagttcgcgtcagggaatggctctttggacgcagcatccggtgacacagaagatgcggcaacatgagttcgagcgtttccttaccacagacgaccacatgatgcacctcatcggcacggcgcacgatgaggcgggacgcttctactatctcttgaagaattcgtacggaagatatggcgcctacacagggctgctctacatgtccgaagattatttcagagcgaaggctgtctcggttctgctgaggaagtaatccccctccaatcttttccgttcatcggtttttgcgatgaaactgcttttactctgtgtccgctttcccgttgaaggttcggcagccgtcaattgacagctgccggcttcactgcggtaaaggcgcggcgacactgccaatcggcttccgcatcactgcctcgctttagttgcatgactctctcccttcatccgcctcactccctcacttctgcaacatcactgcacaacggttgcagcgtcactgcacaacggttgcagcgtcactgcaaaagggttgcagtgtcactgcataacagttgcagcgtcactgcaaatacggttgcagtgctactgcaaaatggatgcactgtctttgcagtgcttgtctgctgattcataaatggttatgccaaggggaaggaatgtgcaatcaaagaccggtacgcagtcgataagaagatgcgggagcacctgcggggcgaggtagcgcgaaggaaaggagtttcaccgcaaaagccgatgaataggaaggttgagggagaaggtgaaggagatggaggatgaaaatacatttctctttagcgaaaaagctgtgtattctgcttgaaaacgcgtacttttgcagactatataaatgaattgcagaatatgaacaaacccgggaagcgagtattggtcggcatgagcggaggtatagacagtaccgccacttgtctgatgctgagggagcagggctatgagataatcggtctcaccatgtgggtgtggggagacgaaccggtggaagcccgtagccttgccgacagtatgggaattgagcactatgtggcggatgagcgcgatgctttccgccggattatcgttcggaactttattgatgagtatcgccgggggcgtactcccaatccttgtgtgatgtgcaatccattgttcaagttccgcatcctgacggagtgggcggacaggctgggctgtgcgttcatcgctaccgggcactacacccgtctggaggagcggaacgggaagacttacatcgttaccggagatgacgacaagaaagaccagtcctatttcctctggcggctggggcaggaggtgttgaagcggtgcatcttcccgctgggggcgttcaccaagatgcaggtccgcgggtatcttcgtgataaaggatatacgctcaaggcggaagaaggggaaagtatggaagtctgcttcatcaagggcgactaccgcgacttcttgcgcgagcactctccggagatagacagcgaggtggggccgggatggtttgtcaattcggaaggcgtcaagctgggcgggcacaaaggattcccttactacaccatcgggcagaggaaggggctggagattgctttgggcaaacctgcctacgtgctgaaaatcaatccgcagaagaacaccgtgatgctgggcgatgcggagcagttgaaagccggatacatgcttgccgaagaggaaaacctgattgatgaggcggaattctttggcagtgaagagcttaccgtgcgcatccgctaccgcagcaaacccatcccttgcaccgtgaagcgcctggaggacgggcgtctgctggtgcgcttcttgtcggaggcttctgccattgctccgggacagtctgccgtgttctacgtcggccggcgtgtggttggcggctcattcatcgcttcccaacggggcatcgggatgtatattgcagaaaataataaaaacacagatatatgagaaaactctttttccttctacttttcatcttggctgctgtaggcgcatcggcgcaacaagacactttgaagtatcgcatcagcctgaaggacaaggctgccaccacgtattcgctggaacatccggaagcgttcctctctgaaaaggcgattgagcgtcgcctgaagcagaaccttccgatagactcgacagaccttccggtatgccgtaagtatgtggatgagattcgcaggcaaggcgtgaagattgtcgttaccggcaagtgggagaattttgttacagtatcctgcaacgactctgcattggtggagcgcattgccgccctgccttttgtccgggagacggaaaaggtatggatagctcccggaggtgacgggccgttcatggcgacagggcgcgactctctgataaaccgcccgagcgtgcatcccgacagcatttatggactggctgtcgaccagatacggctgagcaatggcgataagctgcacgaagaaggcttcaaggggcaaggaatgacgattgccgttatcgacgcgggcttccacaatgccgacaagataaccgccatgcagaatatccgcatcctgggtacgaaggattttgtgaacccccaatcggatatatttgccgaaagcagccacggcatggcggtgctctcgtgcatcgccatgaaccgccccggtgtcatgaccggtacggctcccgaagcttctttctggttgctgcgcagcgaagacgaatactccgagcatctggtagagcaggactactgggctgcggctgtggaatatgccgatagtgtgggagtggatgtactcaatacttcattgggatattacgctttcgatgataaatccaagaattataagctccgcaatctggatgggcaccatgcgctgatgtcacgtcaggcatcgcgcatagccgataagggcatgatattggtatgcagtgccggaaattcgggcgccggttcttggaagaagattacgcctccgggcgatgccgagaatgtgttgacggtgggagctgtcgacaaggaagctgtcctggctcctttctcgtctgtagggaatacggcagaccatcggataaagccggatattgtagccgtcgggctgggtgccgacgtgatacgcacggacggcaaccagggaagggcgaacggtacctcttttgcctcacccattatgtgcggcatggtggcctgcttgtggcaggcttgccccgaacttacggcaaaagaagtgatggaattggtgcgccgttccggtgaccgtgccgattttcccgataacatctacggctatggcgtgcccgatatgtggaaggcgtatcaggattatcagcccgaaagaaacaaataacgggaacttctgttggtttgccaatagtgtattgtcactttatcacgaataaagtgttactttactgcggataaagcattactttactgcggataaagtactgctttaccgcggataaagtgccactttattacggataaaattttataaagttgtaactgattgaatgatagcaatatggaagccttgtctttacatgagttgaatgcccttgtgcgtcgcagtctggagcagtgtctccccgatgtgttttgggtgcaggcggagttgagcgatgtgcgtaccaacagtacggggcattgctatctggaatttgtgcagaaagaccctcgcagcaacagcctgatagctaaggcgagaggaacaatctgggcaaatgtgttccgcctgctgaagccctattttgaggaagccacggggcaggcgtttgtttcgggcatcaaagtgctggtgcaggtcaccgtcagcttccacgaactttatggttatagccttacggtgcaggacatagaccccacctataccttgggcgatatggcacgccgccgcagggagatactgaaacagctcgaggaagagggggtgctcaccctcaataaggaactcgagatgccccgcctgccgcaacgtattgccgtcatatcctcaccgacggcggcgggctatggtgacttctgtcatcagctggaaaacaactcccggggtttctacttttatacggaactgtttcctgccctgatgcagggtgaccgtgtggaggagtctgtcctctctgctctcgaccgggtaaatgcacgcttgtccgagtttgatgtggttgtcattattcgtggtggaggcgccacgtccgacttatccggtttcgatacttacctgcttgctgctgcttgtgcacagtttccgttgcctatcataacgggcatcggtcacgagcgggatgacacggtgctggattctgtggcacatacccgtgtaaagacccctacggcggctgccgaattcttaatagagtccatggacagcgctgctgatgaactggaaatgcttgcttctcgcttgcatgagggtgtcaggaatctgttgcagcaggaacagcgcagactctctggttacaagaaccggattccttctgccgcataccatcgtatatccgatgcaaaaatggctttgctgactgtgcggaaagatgtggtgcaggctgtgacttcctctttgttccgccatcgccatcgcatggaattgttgcaacaacgattggcagatgcttcaccggaaaagttgttggctcgcggttacagcattacgttgaaagatgggaaagtagtgaagaatgcagatgaactgcaggagaatgatatgataacaacccgtctgcagaatggtgaagtggtttcaatagtacatatttaactctcattcatgcagtgttttgcaaatctctgtattttatgaatattgcttaaatcatttaaaatgaacaaagatgaaaacacaaaatttgttttttatgctgatactgataagtatggcatttagttttatttcatgtacggatgaggatgataaggtcgaaattcctcaactggtaggtaagtggattgtgaaagaaccagtcctgcaggacgattttgtgacctgctatacgtttaatgcagacaagacctatgaagtttataccggaagcccgttatctaacggagtcccttttcgtggaacttatgtcataagtcttgatgaaaaattgattacgttgtatgataaagagggacattatactgaacaatatcatattttgaaactgacgtccaaggatatgaagtgggagaacgcatcgcccaaagacgggaattctgacaaacggcttgagaagtacaacgattaattaatttcaattatgccggtaaccaagaaaaaagagacctactccgaagccatggcacgtttggagaaaattgtcagccagatagacaacaacgaactggagatagatgtgcttgctgaaaaaataaaggaagcaaacggaattatagcattttgcagcgataaattgaccaaagctgacaaggaaattgaaaaattactgtcggagaagtgggaatctgaagaataaaagctatttttgttgcaaaatgtacgtaatagaagtaactaatactttgagatatgaaagaacttgattgggctaatctgccgttcggatatatgaagacagattacaatgtgagaatttactatcgtaacgaacaatggggcgaactggaagtttgcagtgaggaaaccattcctatgcacatggctgccacttgtttgcactacggtcaggaagcgtttgagggtttgaaggcttttcgtggcaaagacggtaaagtgcgtatcttccgtttggaggagaatgcagcccgcctgcaatccacttgccgtggcatcttgatgccggaactttctacggagcgtttcaaagaagctattctgaaggtggtgaagctgaacgagcgtttcattccgccttatgaatcgggtgcttctctgtatatccgtccgttgctggtgggtaccggtgcacaagtaggcgtacatcctgccagcgaatatctgtttgtggtgttcgtgaccccggtaggtccttactttaagggtggattctcaaccaatccgtatgtcattatccgcgaattcgaccgtgctgccccattgggtaccggtatttataaagtaggtggtaactatgcagccagcttgcgtgccaacaagaaagcgcacgatttgggttatgcctgtgagttctatctggatgccaaggaaaagaaatacatggacgaatgtggtgctgccaacttcttcggcatcaaggacaatacgtatatcactccgaagtccacttccatcctgccctccatcaccaacaagagcctgatgcagctggcagaggatatgggcatgaaggtggagcgccgtccggttcccgaagaagagttgctgactttcgaggaagcgggtgcctgcggtacggctgccgttatcagccccatcgaacgtattgacgacgtagagaacggcaagtcatacgttatctccaaggatggaaaaccgggaccggtatgtacgaagctctacaacaagctgcgtgccatccagtatggtgacgagccggatactcacgggtgggtgacgattgttgaataatacggtgatggcaatgtctatcgtataagacttgccgggactttgttttttatacttttaggcacggattgcgcggaaagcacggatggattgaagagagaccgtgaaaatccgtgtaatccgtgcctaaaataatatgttttatgtttcaatgcttcttaaatgggaaagaacaagttagagaagtttgccgatatggcgagttatccgcatgttttcgagtatccgtattccgcggtggataatgtgccgtttgacatgaaagagaactggcacgggcggtttttcaagaacgaccatcccattgtcctggaactgggctgtggtaggggagaatatactgtcggattgggacgcatgtttcccgaaaagaacttcatcggagtggatataaagggtgcccgcatgtggacgggagccaccgagtcgctggagtcgggcatgaagaatgtggcctttctgcgtacgaatatcgaaatcatcgaccgcttttttgctacagatgaggtgagcgaaatctggctcactttctcggacccgcagatgaagaaggcgaccaaaaggcttacttccacttatttcatggagtgctaccgcaagttcctgaagaatgacggcatagtccatctgaagacggacagcaacttcatgtttacctatacccggtacatgattgaaagaaaccggctgccggtggatgtgatgacggaagacttgtaccactccggcatggctgatgagatactcagcatcaagacctattatgaacaacaatggctggatcgtggtttgaatatcaagtacatcaagttccatcttccgcaagagggcgagttgcaggagccggatgtggagatagagctggatgagtaccgcagttataaccgtagtaagcgtagtggactacaaaccagtaaatgatgcgaatcagtggttaaaaatactactgattcgcataaaaatagtaaatagtaaatcgtcaaatagtacatacaatgacattatatccaaaattaatccttgatgcattggcaacagtgcgttatcccggcaccggaaagaatcttgttgaggctgagatggtggccgataacatgcggattgacgggatgaaggtcagcttctcgttgacattcgagaaaccgactgatccgttcatgaagtcaatggtgaaggctgccgagacagctatacatacgtatgtctctcccgaggtggaggttgtgattacgactgaaagccgtcaggcggcacgtccggaagtgggtaagctattaccccaggtgaagaatgttatcggagtgtcttccggaaaaggtggggtaggtaagtccacggttgctgccaaccttgccgtgtctttggcaaagttgggttataaagtaggtctgctggatgctgatatcttcgggccttctgttccaaagatgttccaagtggaagatgcccgtccggtggcagagaacattggtggacgtgacttgattgttccgatagagaagtatggcatcaagttgctttccatcggtttctttgtagaccccgaccaggccactttgtggcggggaggtatggcaagcaatgccttgaagcagctgattggtgatgccgattggggagaactggattatttccttatcgaccttcctcccggaacgagcgacattcacttgacagtggtgcagactttggcactgacaggagctatcgttgttagcacgccgcaggctgtggcgctggcagatgcccgcaaaggcatcaatatgtttaccaatgataaggtgaatgtgcccattctcggtttggtggagaacatggcttggttcacgcctgccgaattgccggaaaacaagtattatatctttgggaaagaaggcgcaaagagactggctgagaaaatgaacgtacccttgctgggacaaattcctatcgtgcagagtatctgcgagagcggtgataaggggactccggttgctttggatgagaatacggtgaccgggcgcgctttcctgcaactggctgctgccgtagtccgtcaggtagaccgcagaaatatggaaatggcgccgacacggattgtggaagtgcataaataaacatggatattttccttatgaaaaaggagcagttacccggcgacgggtaactgctcctttttcatttagacttgtttagagagaaaattagtttatttagttggagtaacagtggcattctggacagcagggcttttctccggttcttgcagacggaacatgatggggactgtatattttacgtttacagcttgtcctctttgcatgccgggcttccacttgggcatgatagtagtcagacggattgcttcagcgtctagcagtgggtcggcaccacggattactctggggcagatgatgttcccttctttatccactataaactgtatgaccactcttccctgaatcttagctttttgtgcggctaccggatatttgatatttttgcctatgaattccatcattgcggacatgccgccgggatattccggcattttttctacgacttcgaaaacggttacttcctccgggtaggttgcctcttcgggagcataacccactaccaccatttcatctattttgctttcaatgggagcatacttaacctgtgtattgttttccgtcagacggaacatcacgggaactgtatattttacccgcacggcttctcctttttgtgtgccgggtttccatttgggcatggcactgattacgcgtacggcttctttattcaattccgggtcaatgccgcgcagtatttttacattggtaatactgccatccttctccactacaaattgcacggtagcccgtccttgcgtacctttcttcatggctgcttccggatatttgatgttcttgctcaagtattccattagtgcagacatgcctccgtcggggaattcgggcatgtgttccactacctcaaaaatcggattgtcgagagtatccttatccactacctttcctttgtaagtcactgttttcgtatcttgttccggtaggggagctacttgaggggcttgaacttccggtaccgcttgtccggttttggcgtctacagcctctatgacttccgctgcaatcttctttgtggtacgtgccactgcttcgatattgctgacaatcataagtaaggccgctaaaggaaggaacatcagatatttggtccttcctatttcttttgttctctttttgttcatcattttgatgcgtttttttaaaggtaaaacattgaaactgttatagatagttgctgcagccttttgatgtgacaatcctagcagatggtactggtaggttttggagtcatagccgttctccaatacgcgggcatcggccatatattccagattggtgcggatttcccgtttcatgagccaggcaaagggattgcaccagcaaaaaatgcacaccagttcactgatgatgacatcaatggagtgccattgccgggcgtgtgtctgctcatgggtcaatatttcgttgaattcctcttccgtatgcgaggacggatggataaaaatccagtggaaaaaggagaaaggcccgtctgctttgggaagcagatgtatatttgtgttgcctatttgtaccttgcggcatcggcatgccaggtggatgatgcccgccagttgcatgatgaggcgtatcatcagcaatgccactattccccaataggcgatattggcatattctgaaaggatgcttttccagtcggtaggagccgcttcggtgcctattgtgagttccggtagcacaacgctggcatagaggtctgccatggccaccatcggttcctgctccgtaatccacgtttgtatgttcagcagaggtacggcggcagaaacggcaaagaagcagagcagtgcggttctgcgccagccgaaaaacgtgtctttgtagaagaacagccgatagaatgcataaaacagtactatcgctacattcactttcagaaaataggctaacatgtttactcctttcctttctctatcatgtctataatgtctttcaggtcattggccgaaatcttctggtctttggcgaagaacgaaaccatttccttataagaattttcaaagtagttgcgcacaaaaccgctcataaaggtacgtttgtattcgctttcgcgtataagcggggtatactggtaagtgttgcctacacgtgcggcacggatatactgcttgcgctccaggtttttcacaatagatgctacagttgtgtagggaggcgccggtttgggatatttggcaacaatgtcttttacgaagcaactgcccagttcccaaatgtacaacattgcttcttcttcttgtatcgttaacttttccatggataaagtatttaaatgaattcaatgcaaatctacgaatatttcgtaagctaacatcaaacagtgagttaattaatctaaatgttcctgctgtgtgtatattcttttgccagattgaaaagaacatggctgttgataatcttcttttggctaagattgtctatctttgcagaagaagcgaagactggcggcacctcagcataaaaaatgaacgggttcattttattctgcattcggtttgcgctgtctttgttgcaatgaattcttttaccttaaataaagcagaaatatgggaacagttaaatcgttgttgctgggaatgtgcttcgtattgggtgcatgcacaagccagacttctactgtgcaaaccacagagaagggaactcaatgggaatggcagaatggtaccattgttgtcaaaactcccgagcgtccggcaggacagaagagtgtattgggactgactactccgaagttggaggcagtccgtgtgggttttgttggtttgggtatgcgtggccccggagcagtggagcgtttcacttatattccgggtacgcaggtagtggctctttgtgattatgaagaggcccgtgcagataaatgtcaggagctcttgaagaaggcatccatgcccaaagccgccgtctattccggtgacaaaggatacgaggaactctgcaaacgtgatgatatagatttggtttatattgctgcagactggctgcatcacttccccgttgccaagtgtgcgttggagaatggaaagaatgtagcgatagaagtgccttcggccatgaatctgcaggaatgctgggatttgattaacttgagtgaatctacccgtaagcattgcttcattctggagaactgctgctatgactggttcgagatgaatacgctgaacatggcgcagcatggcgtgttcggtgaagttatccgtgcgcagggtgcttatatacataatttgagcccgttttgggaccattattggaagaatggagaaaatgacaagctgggctggcgtttggactacaacatgaagcatcgtggtgacgtgtatgccacccatggccttggcccggtggcgcaagcactggatattcaccgtggtgaccgtatggaaacgttggtagccatggataccaagtctgtagtgggcaaggagctggtagaaaaaagaaccggcgaggagtgcaaggaattccgtaacggtgaccataccacgaccatgattcgtacagccaatggaaaggtgattgagattcagcacaatgtaatgacaccacagccttataaccgtttgtatcagcttacgggtaccaagggattcgccaacaaatatccggtagaagggtatgcgcttgacgctgaccagctgagtgcatcgggcgttcagcccaaagtggatgatttgaattcacacggtttcctgccggagacggagatggaggcactcgtggagaaataccagcatcccattttaaagaagtacggtgagatggcgaaggaagtaggaggtcatggtggcatggacttcgtgatggacagccgtctggtatattgcctgcaaaacggtcttcctttggatatggatgtatacgaccttgctgagtggtgctgccttgcagaattgggagaactttctatggacaacggttgtgcggctgtggcattccccgatttcacccgtggtgaatggaatgtggtgaagggctacaagcatgcatatgcaactccggaagaggaagcggctgctatggagaaggcaaaggcatttactgctaaactgaaagagcagggagccaaggaatgggctgaaaagtaatagcggtatactgataaaacaaaaaacagcaggtgataagcctgctgtttttttttatcagtttgtcatttagtcactttcagcaactcttccttcatcttctccactcccggaaagccggtttgtctgaacgtggtgtttccttcgcggtctacaatcagataagtcggtaccccttctatcttgaatgcatccgataggtatttccattgggcatctgtcagacggaaatgttcgccgtggatgtcgggaatcatattctcccaggtcttcaagggggaggtttcaccggtgatgtacagatatacaatgtccttacctttcagttcctccttcatggggaccatcatcttgtttgccatacggcatggaccgcaccaggtggcccagaaatctactaacaatacttttcctttgaatttgctgatgatggaagtaaacaactcttcgttgttgacgttggcgtccacttggttgatggtgtaacccgtctttttcttgttggcttcgagttgtgcaagcaactcgtcattggcggcagtcagcatttcgcggtatgcggcgggcatggcggcaacggttgccttttgttcgtcggtgagcggggtgaagttcttgataccccggtagagggtgacattacgggctatatcgaagaagatacctttgtcggttccccaggctttggctaattctccactccgttctacatttcttgaagccatttgtacatactggttggacaagactgcctgcggcacattcaatatgctcatatcttcgtcggacacgtagttggcgggtactttccgggaaagttcctgatagtagttgtttgcttcctcccgtttgatgagattggcttgtagggcagccgatgtcaagatgctggcaacggaagacagcatggcatttgtaatcagtttgttattgatagtcaaaagttgtcgggtagaagcactacaaggcaacttgtctattgcttcttgtgtttcgtcggatatttgaagtacgtatgctttggctgcatcaatatccttgccagccagtgcagctatgttttgatagagcttgtcttgcatgtcgatgctgaggtggtttccgttcaactcttgtgccacggtttccagcggtccgttgatatataccatttctccatagggtttcccttcgctgtggaatttagacttgcgccgggaagcttcgcgtagattgacgtatatttctgttgtcttgccgggttccatgaagaactggagcatatgctctctacccaaatatatggtacatggggtagtgccgggcaatgttacttctttggtgaaactgccgtcaggctggatgtcgagtggtatgtccgtgatgtctcctttgatattctcccacacggcaatactgattggcattcccatattggggcgtgaatccaggagttttcctttcagcatggcttttccgtattggatgaccggttcgggaagttcggcattagggtcggctttgtgtactacggcgttctggggaagtgccagttccggcagtttcttgcttttcagttgtattccccagatgctgaatccgttttccaccttttcgccttcggtgaagtcgaaggaggtagcattgtcggataggggaggaaagaccaactggaattccgcttcgcccgattcgggcatccaaaattctttacctggtatgatgcctataccggaacgtagttggtaggtttctccgttattgtctgtcaggtagctgtcgggtgcaatctgtatccagtacttgggacgatacttggcatagatatggagcacggttgccgtgtcactgatgactactttactcacttcgatggaagtcgtgtttcttacgataaacggtggttggtcaatcacacggtttttggcttgcagggtacagcagatgcacagtaggaagcctgctaagagtaaatgaatgtgtctcatataaattgttttttgcgaaattacgaatgtttcgtaaagaaacaagcatgtgggagttaattgatgtaaaatacttccatttcttcgtttttcaaagaaaccttgtatctttgccatctgatacttaacacttaatatcttgtcatatgagaaccagaattcttttgatgggcttgttgttggccgctgttgccaatgcccagactatctatcatgatgcttccgccttcccccttctgggcaaagcaacagaatctacccttacccgctatgagcgtctgccggactctctgcagaacatctcccgcaagccgttgtgggacttaggccgcaacagtgccggactcgccgtgcgcttccgttccaactctacaagcatttctgccaaatgggaagtaaggaacaatatgagtatgaaccacatgacaccgaccggcattaaaggcctcgacctctactgcttgcaagacggcaagtggatatttgccggtagcggacgtccgcagggcaaaatcaataaggcgactatcgtaagcaatatgttgcccgaggagcgcgaataccttttgtacctttctttatatgatggggttacctcgctttccatcggcgtggattctttatccgccattaccctgccggcagtagacttaccgaaacgtgagaagccggtggtattctatggtaccagcatcttgcagggaggctgcgcttcccgtcccggcatggcgcataccaatattctggaacgttggctcaatcgtgagtgcatcaatctgggatttagcggcaatgccttgctcgacctggagattgccgatgtcatagccggtgtggacgcttctatgtttgtcctcgactttgtgcccaatgctaccgtggagcaaatgagagagcgtgccgataaattctataccactatccgcagcaagcatcccgatacgcctgtccttttcgtggaagaccctctctttacccactctccttttgacaccaggattgccaaggaggtaaaggacaagaatgagacattgaatgcctttttccgttctttgaagcaacgtggagagaaaaacatctatttccttgcttcccgtgacatcatcggccacgacggggaggctacagtagacggcattcattttaccgatttgggctttatgaggtatgctgagatactttacccgatattggagaaacacatgcgaccgtaattaggtattacagccgtttgtctgtttgctgccttgccgatgctgtagggcaactatttgtttcctttaacaaaacagtctgtttcctataagggaacagactgtttcaatatggtgaacaaactgtttttatatattggaacaaattgttctgatacgctgaaacaaagtgttcaaacgcatgtgaacactttgtttcgtaggcttggaacaatgtgttacgcttctatactcttatgcttcttatactcttcaatcacatgtttcctgctctgcaatatctgccagcgatataccaggcacgtggtgatgaagtagaagcccgtttgtatccatagtgcctggtactcgaaagagacttcattgagtgtggctcccatgctgttgatgcgtacgtagccgttgatgccgaaggtagaagggaagatgtacgagaagtacttccagaaagcgggcatagcagctcccggccatgaaatgccggagaggaacagcagcggcacggaggtgaacacgaacagcagcatgcacgtttcgcggttgcggatggcaatggatgctgtcatggcaaagaaaatacaagcggccaggtagggcagggtgaacagagtcaggacaccgggtatcgctatttggttgaggctgaaaagccatggaaccacacacagtatatataccgataccagtgaatataccatgaagtagctcagcccttttcccatcacaatgcgtagtgtgccgttgtagtggcggttgataggcaccaggtcgcggaagcggttctgctcgcgtgccgtcccggcagacaagccgatgccgagtagcagcgtttgctggataatcaataccaatactgccggaatcaggaaagcggcaaatccgttggttggattatagagggcgacatcctcatactctatcgggtaggcggtaatctcgtcctggcggtcggtggtattggcgcttcgctccactttgatgtctgcgttcatggcaagcgacacgttggtgttggcagtcagcaaggctttgtaatacagcagtccgctcatgtcgcagaagatgctgacctgcgtttgcttaccgcgtacaatgtcgtcgctgaaggtggaggggatgtagataataccgtatgccctgcggtccttcaacatcagtttggcttcttccatatcagcgcagtagctcacgaggctcacttcgggactggagtccactttccgcaggtattcgcggctcaacgaggagcgtgagtcatccaccacgacagtgggcacttcgtggatagtttcgttggtatagatgaaagcgtatatcaacggatagaccaacggaacgagcacgaagaagatgagcacgccctggtcgcggaaggtggtgccgaattcccgtttccatatatagaacaagtcatgaatgccttgtatcactttctgtctgaacgtcaggtctttcattagggcatgtatttatagtaaaccaacgctcctttcagcctatgggctataaggaacgggagcatcatgaaaataagcagcgctacgtagttgacccacgagtaaatcatggggtatccattcagtgcctggtccacataaatcaggaaatagtggcgcagggggaacagatttgccaatgcctgcaatacggggtgcatgcccatggcagggaatgacaatccgcacatggagaaagagagtacgccccatagggaagcgaaactgagtcccagacgcagggtaggcagggttcctatcatcaatattcccatgccttgcgatgccagcaccaggcaaagggtggcaagcagcatcggcaggatgccgctgttgcagggaaaatggaggaaaccgtagaggtatacattatataatattcccatcaggaagaagatggcggtatgcggcagcagtttgccggcaagggaaatccagatggagttgttgcccatgcgcagccattcgcgggcggtgcggtcttttatctcgactccgatggaatagacggttaccatgaagataagcagcatcaatacgcccggtgcaaaggtgttgcacagatatacggagtagttcagccacgggttattgagtggatgcgtatctatgacgatgggttggaggaaggccatcgcttgttcctcggtagctcctttggcatatagggtgctacgtgctgcggcaccggatgccaattcgctcatcatcttcatatccttgaagaggagtgaacctgcgatgagcagggtattgtttgtatagaaagagagtttgggctgccgtccggcctgcgctttggcagaggtaccttcgggaatgtagaagaaaccgtaaatctctccgcgctgcatggcggtacgggcttcgttgatggtagggtagcgggcgacgacggctgtctgctcaaaagcgtccaagttacgtatcagctggcgtgaagtggcactcatgtcttggtccaccacacctacgggcatgtccgtaggaagcccggagtccatcagcgtggtgaagaatatgtagcagaacaacggtgctatcaccatacagaacagatagagcgggcgggaaacaagacggcggcattcgcgtcttgctacattccacaaagccgtatgtttcttatttctttccatcatcctctccaataactcataactcctttacttcttcaatacaacactcattcccggacgcagtccttccaccttctcttgcggagcggcttttacttcgaatgttttcaggtcgaactggccggtagtcttggtcgctttccaggcggcatatgtgccgaggtctttcatatagtacactttcaggcggatattcttatcgagtgcagggatgaacgcctcgaattcggtattcatacccaacccttgcagcaagtcctcgcgtacattgaaggttatccacatatcgtccagaatggcgatgttcataatgggagcacccgtgcccacgagctcgcctactttggggaatatctcggatacctcaccggcagtctgtgcaatcaggtaagtttccttgatgtacgattcaacttcggccacagctcctttggcacgttccaccaaggcagcggcagcggctttgtcctcgcgttccgcaccgttcttggccatatcatactgggctttggcggctttctccgtagcccgggctgcattgcgttgggcggtaacttcgtcaagcttttgtgtagacatcacgccttggtcgtgcaggttcttcacacgcgtgtaggatttttcggtaatttccagtccggccagtgccttttgccacatttcataggcagcttgtatctgttcccgacgggcgcctttcagagctttttcgttctgggcttgggctaccgattcggcggcgcgtgcttgttccagtttggcctgcacgtccggagcctccaaaatggcaagggtgtctccggcttgtacgctttgtccctcttttacacgaaattccagaatacgtcccggcactttgctcgatactcgatactccgttacttctgcttgtccttgcacaatttccggccctttacgcaacatgaagaaacctacaagggcaacgatggcaatcactcccgtcagcgtgaggaatgccaacaacatgttactgttttgtgattttgtatccaacatattatttactatttgactgtttactatttacgattgaagaaactatcaattatcaattgtcaattcccccgttgcctttctcagatagatttccgtcagttttacgtcaatctgtgcgtctatcttttccgattgggcagaaagccatgcggtgtgcgcttcgagcacattgctggcaggtataacgccttcctcaaagccaagtgtggcgtatctcaggttctcgttggctttttccaggttcttttcggccatggtcagtttcttggcagcttcgttcacttggaaagccgactggttgacctgcagctctatcttttctttggcgtcatccaactggtattgggcgatgcgtgcttccgatttggctgcttttactttatagatgccttcgccccagtgccagatgggtaccgacaccatgacacccacattccacatccccttgaactttttctcgaaactgttgaagacggaagggttggttgccatatagctgcccattagtgctatggaaggaagatattccgaacgggtgacatttactttctgcttataaatctgcgtggcaagttccaggctacgcacttcgggacgggtagcataaacattgttgatgtcgatggcaccgttttccggagtagtgggagccaggtcttccttctgttcgtctgtgagcatgacgggagtggaaaggtcgagaccacacaattggcacagcagcatccgggcaaggctcaggccatcggttactttggtcagggtcatttcggcctcattcacttttactttgatggagagtccgtctgctttggtggcaacgccttcggcaatcattttgtcaacgtcgctgtcgagcttctgcagtagtttcagataaccttctgccagcttctttttatgggcaagggacactacctgccaatatgcctggtctgtactcaggattacttcctgcataccggtgttgtgctgctggcgggccagctcttcggcgtatttggtaattttgttgtaggcacgtatcttgccgcccatatataggggttgggtcaaggtcagtgcgcccgcatacatgttgcgggtgtctgtacgaaaggcgtcaaccaaggattggcctgcaccgtcgagggcacctaccaggctttgtcctaaagccggcaattggcctgccagttctggatgaagctgtgcgatgacttgggcagcctgctgtaacggtccgctgagacttgtacccaatccggacaaggctcctttctgagcgtcgctgaggatggacaactctttttgactgcgcatatatccgccgctggccgaaatgttgggaaggtaattagtaaatgccgctttcctttgatagtgggcagcgttgattttttcctggcttatcagcagttctttgttgttggagattgccaatgcacggcaactatccaagcttaatgcttcctgggccttcatggggaaggataggtatgccaaacagatgaaacagaagaactttttcattgggctatacattaattaaggtgatgaatctgttgtttatacagcaacaataattgcataaacaacgatgcaaatgtataggctttcaatgatattgcaaaataatttagatttttttgtattaattcaagctgaatgattgcgaaccgataagggtaccgtcagcaaaaatgtctacgcggtaggtgcctgcatagaggtattcttctacatcccaatatacggtgacggcttgctcttctccgttgtattctatatacttcttgatggaatataccagttcccggttctcgtatgggaaggtgttcgaggaacttttggtcagcacgtcattgtccggtttggtgatgcggatgtagagggtacgttcgccggtctctgcagtgatgtttttcacgatggagaagtttattttgaacttcacgatgtctttcaccttcttggcagtcttgccgcgtttgtttgtgggctgcacagagatgttggtggcgtccagttgggcggcaagtgtcacggtcttggtcaggttcttcttctcttcggacaagttgctgatttgccgggaagcggcgttgtacttcttggtgacatcggctatgatttccttctgttgagcagtcaggcggttcagcgagtcaatctggttgatatagcctatcatgactttgcggagagaggccagttccttcttcagacggcgtatctcggtggcattgctgctcttcacggtgcggagttcttccaataaacgttgggtcttcaattgttcctgctctaagagtacggagagggagtcgttggagactgtcaacttcagttcgtcatattgtctggcgaagtctgtgtattgattttcaaggtcttctttatccagattgaattccatcaccagttccttgttggtttgtttttcggaaatcagcagaatggtaactcctattaataataagataaggaggctgcctgccacgatgagaagtgtattcttcttaactgccatttttgataatgattaatggttaagtgattaatggttggtggctgattattcgtcctacattcattaatcgtccgcaaaattaatcattaatcattaatcatcgtccactaatcattggctaaatgtgtatttaactaaaattattacggaaatatttctctaattacgaagttcgctgtacttttgcgtcatctttaaagaacacttataaacaaaaaactttagaaattatgtcaaaagtaaccgtagtaggtgcaggtaacgtaggtgctacatgcgctaatgtgttagcctttaatgaagtggctgacgaagtggtaatgctggacgtgaaagaaggcgtttcagaaggtaaggcaatggatatgatgcagactgctcaactgctgggcttcgacaccactgttgtaggttgtaccaacgattatgagaagactgccaactccgacgttgtagtgattacttccggtattccccgtaaaccgggtatgactcgtgaagaattgatcggtgttaatgcaggtatcgttaagtcggttgcacagaacatcttgaaatattctccgaatgctatccttgtggttatctccaacccgatggataccatgacttatctgtcattgaagtctctgggcttgccgaagaaccgtatcatcggtatgggtggtgctttggacagctctcgtttcaaatatttcttgtctcaggctttgggctgcaacgccaacgaagtggaaggcatggttatcggtggtcacggtgatactaccatgattccgttggctcgtctggctacttacaaaggacagccggtaagcacactgctgagcgaagaaaaactgaacgaagtggtagcttctactatggtaggtggtgctacactgactaagttgctgggtacttctgcatggtatgctccgggtgcggcaggcgcttatgtcgttgagtctatcatccacaaccagaagaagatgattccttgttcagtatatctggaaggagaatacggtgaatcagacatctgtatcggtgttcccgtaatccttggcaagaacggtatcgagaaaatcgttgaactggaactgactgctgacgaaaaagctaaatttgctgccagcgctgctgccgttcacaagacaaatgccgctttgaaggaagtaggtgctctctaattgagggtaacttaaaatgataagcaaacctcacggtctttttccgaaaggaaaagtcgtgaggttttttttattctccaaaaacaagaatcattatgaaaaaactactattaggtattgctgccgtttgcctggctggttttacttttgcgcaggatgctccgctgtggatgcgtcatagtgtcatctctcccgatgggaccaccattgcttttacgtataaaggagacatctatacggtgccggttgccggtggacgtgccatgcagataactaccaatcccgcatatgatacggctccggtatggagtccggacagtaagcggattgcttttgcttcggaccgtatgggaagcctggacgtctacattgtggccaaagacggaggcgaaccacgacggctgactacccactcgggaagcgaaacgccgcttgcttttacagatgccggacatgtcttgttctctgcgggcatcatgccgtctgccgaggctgttgtctttccctctaacgggcagttcaaccaggtctatcgagtatcagtggagggagggcgcccgacgatgatttcgtccatgcctatggagtgcatctccatcaataaggagggagcgatgttgtatcaagataagaaaggttacgaggactactggcgtaaacatcacgtatcgcccattgcccgtgacatctggatgtatactccgggaaaagaaccgcagtaccgccagctgaccactttcggaggagaagaccgtgaaccggtttgggctcctgatggaaaaacattctactatctgagtgaggaaaacggctctttcaatatctaccgacgtactcccggagatgcgaaggccgtgcagttgacgcactataccaaaaatccggtacgctatctcagtgccgctacggacggaaggttgtgctatggatttgatggtgagatttacaccctgcttcccggtggagaagcgcaaaaggtgaacatcagcattgtttccgacagaaacgacaaggacattatccgccagattaagagtagcggtgccatggaaatggcagtgtctccggatggtaaggaagtggctttcgttttgcgcggcgatgtctacgtcacttcagtggaatataagactacgaagcagataacgaatactccttgtcaggaacgtaccgtagactttgcccccgatgggcggacactggtttatgcttccgaacgtggcgggctttggcaactttacacttcgacgattgtgcgtaagaatgaaaagctgtttacctatgccacagagctgaaggaagaacgcttgacaaactcggatgccgcttctttccaaccccaatacagccctgacggtaaagagattgcctttctcgaaaaccgcagcaccatccgtgtcatcaatttgaaaacaaaggatgtgcgtaccgttatggatggcaagtatcaatactcttattcggacggtgaccagtggtttcagtggagtccggacagcaaatggattctttcggactatatcggtgtaggtggatggaacaacaaagatgttgtgctgctgaatgccgatggcaagggtgaaatggtgaacctgaccgagagcggatacaacgatggcaatgccaaatgggtattgggtggaaaagccatgatttggaccagtgaccgtgcggggtatcgcagccacggcagttggggagccgaagacgatacttatatcatgttctttgatgctgaagcatacgaccgttttttgatgaacaaggaagaaaccgctttactcgaggaagcggagaaggcagagaaggaaaaagccgggaagaaagacgaaaaggatgccaagaagaaaaaagaggatgccgacaaagataaggagaaaaaggtagagccgttaaagttcgacctcgcaaaccgctttgaccgtattgtacgcctgaccgtcaactcctcgcatatggcagatgccatgctttctgctaaaggggataaactctattatctttctgttttcgaggatgggtacgatctttgggaacacaatctgaaagagaatgttacaaaagttcttttgaagaaagtaggtgcaggcgctttgcagcttgacaaggaagggaagaatatcttcctttgtgcccgcgacggaatgaagaagatagagattgaaggcagcaagatttctccaattgaatttgaggctttcttcgattaccgcccttatggtgagcgtgaatatatcttcgaccacatctggcagcaggtaaatgataagttctatgtggcagacttgcaaggtacggactggaatggatacaaagaaacttataagcgcttcttgccgtatatcaacaataactacgattttgcggaaatgctgagtgagatgctgggtgaattgaacggttctcatacgggagcgcgttattatgcttcgggcgcagcacttcctacggctgctttgggagtgttctatgatgaagcttatgcgggcgatggattgaagattaaagaaattatagctcagagtccattgacgaagaaaaagacggatgtcaagccgggctgtattatcgagaaagtggatggtgttgccattaaggctggcgctgattatttcccgttactcgaaggtaaggcaggccgcaaggtgattctctcggtctatgatcctgttaccggaaagcggtttgaagaaaccttgaagcccatatcttacggtgcccagaatgagctgttgtataagcgctgggtggaaaactgccgcaagaaggtggatgaatattccggcggacgcattgcttatattcacatcaaaggtatggatagtccgagcttccgtaagatttactccgatttgttgagcgaaagcagtcgtaagaaagaggctgttgtggtggatacccgccataacggaggcgggtggctgcacgaacaagtagcgacgttacttagcggcaaggagtatgaacgctttgtgccgcgtggccagtacatcggcagcgatccttttgacagatggctgaaaccttcgtgtatgctggtttgcgaggataattacagcaatgcccacggtactccttttgtgtacaagacgttgggtatcggtaagctgataggtgctcccgtggcaggaaccatgactgctgtctggtgggaaagccagatcgatccaagtattgtattcggtattccgcaggtaggttgcatggatatgcagggcaactatctggagaaccgcacgttgcagcctgatatcctggtctataatgaaccggaagctgttttgaagggagaagatgcacagctgaaagcggcggtggaccacttgctgaagaggttgccgcaaaagaaatagatggattggactttataaacaagaggctgaattcaatcttgaattcagcctcttgtttataaagtcgatggggtgtcttatttattttacagttacttctgacagttttaaccaaccagaattagtgaaggttcccttggcagagatatccagccccttaacattgcttccattgcctttggttgtatcgactaaagctactgcccaggtataggttcctttttttaccccgtgaagtttgggagtgaactcataggaagtgggatagccttttatccagacggataaatcagtattgttgtccagataagagtagactacttgattgtcttggttcaataatgcgaaagctactttatacttttggttccattgtggtatattggttgggcaatatccccagcctaagttattccagcgatgtactatctttattcttgaaccactcttcatttctttgggaactacaatggaatcgggatataaacgataacctccttcggagatgaaacgctcaaccaaaggataggcatcacggaaccaactcatggtttcgtctcctacacggaaatccatcatgttgacatgagcttcctgaccgtcttcaaattctccgatacgcacatctttggctgttttgtaaccgctcgggtcattgtgataagggtgcttgttcacaatccatccaccttccagtagaaccgggcgtttcataatccaaggtttcacatagtttcgctcccactggccgtaatactctctcattccgaaagcatcatgacgtaaggaaaagcctttctcgcaagcgctgtccaacaagcgtttactatcgggatcaaaattctcctcacctgcccagtctttgcctgcacccatccaacgatggtagttgataactaaaggtactttggtgaagtgtttgacgtagaggtctgtaatccaattgaacacagcttcccggttcttggggtcaatgtacttcatagtgtgtgcctcaccccatttgccaagaccgtagccgtctataaattccaccaggtcagggtcattgtatttttgggcaaatgcttctatgaactttgcatatttctcctggaagatagggtcatcaggatagggagagcgttttccattgtctgtatagtatttggctcctgcatcgaatacataggccggagtggcttcattttttcggtcgcggctgtcgacaactacacggaaagagagacgcatacctctgtcgagtgccccttgaattacttttttcaacttttcgttggtatcccagccgtagactccttcggcgggattgaaggtactccaatgcgtacggatatagagtgtgcgtgcataatcggagattttcacggttgttcctttttccggtacatagatatggtcgtatttcttccagaagtcatcgctgacattctcatttgcataaacaacccaaccacttaaagggtttccctgcatggtttttctgtctggccagatttttatataatcagcttccgtatctacagccatcttgtatatctggcatcctgctgcaagaaacgcaccgacaccgtaaacttctgtcatgtcacgcgtcactttacgggggtcggcaccgataggctgtacccagccaagtttaccgcttgcatctacagcatcggtcagtgccttccagccttttataatgactggcatgaaatcgtcttcattcaagagtcccgcatttacgccataggccaacgcatatacaaagaaaccggtggaactggtttcgggagaaggataagaagccggatccagaaggctggcatgccaataaccgtcttcgttctgcaatccggcgatacgtgtgcataaccggataaacagttcttcgtaataagcgcgttccatcaagcctttgggcaactcctgcaatacttctgccagaccggccagtacccaggcatttccacgtccccagaacacctttttgccattggcttcttttttaccgaaataatgccaatcgcggtagaaaaggttctcttccttatcgaataggtattcgtaggtagcccggtattcattgtccatgaattggaggtatttccggttgttggtttcacggtatagcttggcataaaccgggggggccataaacaaggcatcacaccaggtccagcgttctagggttttgttgtcaccatactccagtttgaatgtaccgttggatggatggttgacaatccattccgtacgtgccagggtaggagccagtatttcctcttttttatatttacggtataagtcaatgaatgattgggaaacggttatatcgtctgcatggtacaaccgctgatggggttgccagcagtttcgtcttcctattttatagagccattgatagtaggtgctgtcattgtactcctcttctgccagtttagcccaatctaccatacctacataaagtgctccattggtccaatccaggtcgtggtgttcgtgggcagtgttaggattggaaatttgccagtctgccacttgcttcattttctcttttacttcctttttgctgaatggcacttgtgccatgattgccatactgataaacagaaaggctgctgctgttaattgtctgtgtatcttcatgattgtttattgataaaattaagggaattgcctttgttctcaatggacgcggacaattccctttatgagaatcttgaaaactatctttttacctttattcgtgttttattttgtctttgtgctgttaatatccttcgttttgcgggaattctgcacccgtatttgaatcgattatgctctgaggaatcggccataatgtgtggtaatcacgcataacgggccccgattctgtattgtatttgcgggtacgctccaataatttgccggtacggcataaggtaaagcggcgtgattcttcacctaccaactcgcggatacgttcgtccagcaagaagtccatggtcatttcactgtccgtaatttcaggagcatgtgcgcgacggcgtacaacattgattgcttcgcgggcacctgaaatatcgttcaaccccaaccttgcttcgcagagtaagagataagtctcggacaaacggaacttcatgcggtcacggtaggaaccggtcaaagaaaggttttcggaacggccatagaagaattttgtcagagccggataaagacggaaggtggtaaaccatgtttcgtctgtaatcgtggcttttttaccataaaggtcgggcatgttctcgttgttgtaataccagttacgtttgatgttgtattcggaattacgaatgtcttcttcatcaaagaaaccggtatcttctccaatccaccatttcattggtaccaattgcgacaagccgcggccacccagtgagtctgccaaaacaaaaccggtaatttcgaagtatttgggttcccaggcacggcgtgtccagtcatcggaatttgtaccgccaccagtagtgttatattcaaactgcatgacccaaatgctttccatattgccggatgtgcgattttgattgttttcaacgaataggtcggagaacacatcgccgtttgcttttgccttttcaccgaagcggtcttccatcaagtggaaatatccgctgttgatgacattctctgcggcagtttcagcctttgcataatcaccctgcatcaagtaaacctcacttagtaagtgttctgccgcccatttggtcagcttgccgacttttacggcatcagggtcagtaggcaggttctcgacagcaaactgaaggtcttctaccatgtgggcaataacctcttccttcggtgtacgggtaaaatcgattctgaactgatcttgaatcttgtctacataaggaacgtctccatacagataaaccaatgtacggtatgcataggcgcggaaaaaacgtgattctgcctgatagagcgccttgtctgtgctattatcccagttcgtgtttatttccgagtatttcaacatctcattggctcctgcaatcagactataagcccagttccagtaggagcctacaataccggtatttggagttaatgtcaagaaaccgaacggttggatagaaccgtctttggtacccatggtagcaaggtcagtggcaatctgcaatgcttcgtaagggcaagcggcattgtgcatgaaggcaccgttttcaccccaagtgttgtattcagagcgtgcttcggcataaagtccggtagaacctacttcgaaaccataggaacttgtatatgtgttgtccggagctagttcacttttcagtttctcatccagaaagtcagagcaaccggtagcagacagagctactaacagagctagagttgcttttgatatataatttttcattgtatatatatttaagtaagtttagaatgataagttcagtccaagtacgtaggaacgtgcagtcgggtaagaggcaaaccaactgttgtcatagttcaatacgctgcgtatgtcacagaatgtataaggattctccacactgatattgactcccaaaccgctcagtcccaatttctttacaaaattcttttcaaaattgtatcctaaagtgatattctttatttggatgtatgtaaagtctttgtaatagctgtgtccgtcgaagttgttatatgctggagaagcatatttggaattggtgtgttccggtgtccagtaatcggcattatgcagatagttgtataagttgtaactccaacttccgatattggcttcgttcaactcacgtgtaactttgaaggttccattcagtaggaatgacaagtaaaagttcttgtaagtcaatgtattgctcatagacatgaggaagcttggattctttgaaccgatgataactttgtcattggagtcaatataaccgtttccgtctgcatctttcactttggcagaacctggtttggcacctttttggatctctttttctgtaccgtctgctgcggtataggtgaatttgtcaccttcctgccagatgccgtcgacgtcatagtcgtagtaaactcgcaagggtttgccgatgaaccatttattggtgatatcatcttttttgtcaccacgtaggtctacaatcttgtcacggttcagtgaaaagatgattccggtgctccattcgaagtccttattacgtatgttgacggtgttcaaggtaaattcaacacctttattgcgtgttttacccacattatcccaaatggttttatagccgttcatgataggaacagtacgtttcatcagcaagtcttttgtgttggcgacatacatttcaatgttaccgttgatacggccgttgaagaatgaatagtcgataccgacgttgaatgtttgggttgtttcccactttagattcggatttccgacaccgtcgttggccagataagcaccgttgacacctgctccaccgtcaccccagatatagtttgtgaggtgcagacggtccaatgtctgataggggttgatggcttggttaccgttagaaccataagatacgcggagcttcaattggtccagccagttttgtgcattttccataaaactttcggaagcaatgttccatgcagcagccactgacgggaagaatgcatacttgttgtttgcaccgaaggcagaatagccgtcggaacgtccggtcagggtcaacatatattttcctgcatatgaataattcaagcgaagcatataagacagcatcgaggtttctgataaaccagaacttacggttttattcttttcacctgcattgatgttatgataactggaatcatcgtttacaaaactttcggcacttgacttggaagtctttttctgagtttgttgtacactgaacaaacctgtagcgtcgaaacggtgcttgccaaattcacgattatatttgagcagattttcccaagtgtaatcccagtagtgttcattgttgatgctggcttttccgctggctgttctaccgtctttggtgtcacggccatagtatgtgccggtaaagtcgctacgatagttgtaaccaaaggttgtacgggctgaaagaccttttaccggcaacagaatgtcagcataggtgttgatgaagaagttacgtcttgtttgatcttggtcggcattgacattggccatcgggttaataatcagggattggtccataggttcttcataatacttgccgttttcatctttgtaggtaccataaggactttgctttacagcatgttcaatattcggggttataccaccgccatctctttgaataaattgggtctgtataccaatagtcagccatttgtttaatacttgtgtgacattcaaattgatattgtaacgtttcatagcagaattgtagactacaccttcttgatccagataggaaactgcccccatataagtggtgctttcagtacctccggaaatgcctacttgatgttccatggtaaatgcattgcggaaaatatagtcctgccagtcgtttgtaacgcctttcttgtaatttataagttcgctggcactcagaatattctcaggagccaattggtctccgctccatccatctttcaggcgtgcaatgtcttgtttaaatgtgatgtattcgtctggagtcatcacatcaatagtctgttggggttgcgacattctgaactgccctttgtatgtaacttggggtgcacctttcttgcctttctttgattgaatcaagataacaccattggaaccgcgtgagccgtagatagctgctgcggaagcatcttttaagacactaaggctttcgatgatgtttgggtcaatatcactcaaagaaccattgtaaggaataccgtccaatacgatgagcggtgcattgtcggcacttaatgagttttcaccacgtacacggagggtttggtctgctcccggtttcgcatcaccagtagttacgcttaagcccgggatttgtcctgcaagacggtccatcaagttactgctatttatcatgttcagcttcttctggtctactgataccagacctccagtcaggtcggacttacgttgtgtgccatagccgattaccacgacttctgccagtgttttactgtcttccactaactttacggtactgtttctaccagcttttacagtctgtgtcacataaccgatataggaaattttgagattactccctgccggtgcgttgatcgtgtattttccgtcaagatctgtgatgacaccagtattggttccttccaccatgacatttgctccgataattggttcaccactttcgtcaattactgtaccagagatgttctgtggttgcccggatattgccttgttattctttccggtatataaaataatgtgtgttgcgtcgatttcaaatttaacattggtccctttcaataaggctgctattgtcttattaatagttgcattcttaacatttaggctgactttctgtttgatgtctatttgctgcgattcatagaagaaagtgtatccgctttgcttttccacttttggcatagcctctgataatgggatatttgtgaacttcagtgtgatcagtttctctttcttttgtgcagaaaccggggcacatagaagtaccagtataagaatgatgagttgttttcttatatccataattgtcttaaatttaaagattaatgtaggtgtttacttttcgttaattattaaataatgtgcatttctcatttgtttgtttggcataagtttttaattttgttactgtttcattttactttttgttttgtgtctgcaaacgaaattgtcaactcattctcttcgttaaaggtatatttcataggttggatgcgtgccatgatgcggagtatttcgtccagcggttcgctacgcaacgtaaacgtatagaaatatttattggataatgtaggatccacgtctatctttatccgataccatttagaaagcagtttgcaaatgtctcccaatgaacggtttctgaatacgagttgtgtatttgcccacgaagaggcaaaatgtacatcatctttttctaccttaagtgtaagggttttccgattaaaagtagctgtttcgcccggtttgaggaaacggttctctgtctcggtttccaaagagacggacccttctaccaaactcaccaatgtattttccgaaccggggaatgcatcgacattgaatttggttccgtgaactacgatacgcataccttctgtctgcacaataaaaggtttgtcagcatcgtgtgctacatcgaagtaagcttcaccagttacatttacgatacgctcatccttattcatttgtgatccgtattgcaaagaggtctctgtatgcatccatacttcgcttccgtcaggaaggagaaccttagacttacccgacaaattagagtataactgcggcatggcttcaggctgtccgttaaggaatcctatgtagaatgagcaaccgatggcaacagctatacatgcagctactgcgtagcggtatatccgtttcagttcgaagcgtttctttgcaggtttttcagtctgcttaggctcgctggcgtgcatacggttgacaagttcattccaataatattcggtattgggcgtgtagttttctacatttgcctgaattttttcccataacagttgcaattccttgaataacgcttcgttgttactgctgcgtaaccaagtctccaattgccgctcttcgtctgcggaaatttcctgtttcaacttaggaatgattaaattccaaggaacactttttttcatgatcatgatgtttttataggccttcacttatatgacacatcacttgggtttaacccttattccaattccaattatttttttaataaatttcgaggaacaaataatattagtatctttgccgctcaagaagcccttatctaatataacttcgatatgcctgcagaagatgatatcctattgttacagttaatcaaacaagatgacgagaaggctttcaagcaccttttcgatacttattttgtttcactctgccgcttcatgtccctttatctgagagacaagcaggagatagaagaactggccctttccatctttatgaatttgtgggagggtagggccgacttgactcttaaaatctcattcaaggcttatcttttccagtctgcacgcaatcgttgcctgaatgctttacgcgatgaaaaggatacggttcccatcgagggaggagaagaatatggatatgctcttgcggctgatacttcggtggagatggaagaactgaaccgattgattgaagaagctgtttgttcccttccggacaaatgtgggcaggtttatcgcaaaagtagggaggaagggaagactaatcaagaaattgccggggaaatggggatttctgtcaagacggtggaggcccaaataaccaaagccttgaagcatatcaagaaatttttaggagaacagtatacttatttgttctaaaatagaaattgcaggccatctgtcttttagaaggatgaaaggaggatggcctgcaatataaaaagaagattaatctataaccgtgaattttactttctggtctttcactattacataatattctccattttcaaggaaatgttcaccattggcatttacaaaaccaagatcacgcatcgggtctatttcaaagcggaatatatgtgtttcacctgctttaattagttgcttttcgaagtgcttcaattctttgcatggacgggtaatcgtgctaaatgggtctgagataaaccaatgcaccacttctgcaccgtcacgtttgcctacattggtgactgggatttccattaccaacttttcaccgcgtctgatggtttctttgggcaagttgatattaccataattaaaggtggtataactcaagccgtatccgaattcatacagtggggaagaggagatgtcttgatatttgccactttgtggacgggctgttttgcgctgattgtaatagattggaatctgtccggtggaacgtggaaaagtaatggaaagcttgcccgaaggatttacccggccggacaagacacctgccaatggtttaccgccaggtactcccggttgccacatctcaacgatggcgtcacagagaggttccactttagagagtcccaaaggacgtccgttagccagtaccagaacaatcggtttgcctgctttcttcatttcagcaatgaattcctcttgaatggcaggcagttctatgatggaacgcgatgcgttttcgccactccactttttcttttcacccatgcagagtagaatgacatctgctttccgggctacagccagtgcctcactgaatttggaagtgtcgttaccgtcgaaaccacaaccctcggtataaatcagttcagccttgcctgcaaattctgcatccagcgcctttttgatggggaggacatcttctgcatgtccatgtccataccatgaccccaggagctcggcactgttttgtaccagaggccccatgacggcgatagttggcttgttcccgtttgccagagggagtaccttgttttcattcttcagtagaacaatggtctcctctgccagtttctctgcaatagccaggctttgtggaaggaggaagcgctctttttctgtagatgtcggggtgtagggattgtcaaaaagtccaaggcggaatttgatacggagcacgcgtttcactgcatcgtccaccaattgcatgcttattttaccttcttccaccagctttgccatatgcttgtcatagcaatgccccatcatgtccatttccaggccggcgttgaaagccagacgggcagcttctttgcggtcggcagcatggccttggtcaataagttgcggtactgcagaccagtctgaaacaacaaagccgtcgtgtttccaacggttcttcagaatttctgtcatcgtgtaatggttggcgcttccgggagtaccgctgatgtcattgaatgaactcattaaagtagcggcaccggcttttacgccagcttcatagggaggaatataggtgtcccacagagtctgattggagatttccgtataaacatagtcacgtcctgcttcagaagcgccgtatccgatataatgtttaaggcaggcggctactcgcttgctgtcggacatgtcttcaccttggtatcctttgatagatgcgacaccgaatacagcattggtataagggtcttcgccatagccctctgcaacgcgtccccagcgtccgtctcttgccacgtcaatcataggggaaaaagtccagtctaccccggacatgcgtgcttcctgggcggcaacggcacatgcttgttctaccaattggggattccaagaacatgcttgtcccaaagagatgggataaatggtacggaacccgtggatgacgtcgtatccgaaaaggatggggatacccagacgtgattcttccattgcttttctctgagcctcgttacgcagattggcatcttcatcaaaataaatgagggagcctaatgtggcaggaattttttttacttcctcaccacgattgttctcgttgttattccgccccaaagtgtactggttgagttgttgtaccttttcttccagtgtcattctgctgaccaggtcattcacacgctcctcaatgggagctttggcatctttgtagatgggttgctttttgtttgcagccattgctccggccaggcaaccacttaaaaggaggcaactgataaatgttagtttcttcatgatatatataattatgctattctcattaaataagacacgtttttcggaatctgctcctacacaaaggtcgtttttttaaggaatataaacaagtacatgcaagggcttatttgaaaataggcttatcggttagtgtcatggaagcttgttcgttattttttagttcaaataccactatttcattattacctgctatcagagcaccagcaggtatctccagggtcttttctgtattttcttcccagtaggcacccaagtattgcccgtttatccagacttctcccattccccagccagacacgtcaagaaaggtctcttgtgccggattgcttactgtgacaccacctttacggaagcaagggatggaggaggtaccttctttgaaagttattccggccacatcgcattccttaatttccaatggggtcatcttccagccttctaaatctgtctttcccaatgttatgctgccgtagataccttttgaattgtccagaatttcaggaccataggtaatacgtccgatattttcagtatagatactaagtttgtgtatacctatcggtagattggttttcaagcttttactgctatcttttaaatatccttgcagtttgccgtctgcatagaccacagcataatcccgtacgttttcaatagttagtgtgggattctcctcttccacatcaacggttgtctcatagagggcatagccaaaatccatatccagctcattcatgggcagtaaggcatcatcttctacagtttctccataaacttgttccaatggagctgtttgtgacatttttatctcttgtgctgctgccggtccgaccggcagcaacaaaagagcccaaagcaagaataatttcatcatatttcctttatttatttctttaagaatgattcaatgtaggactcgtcaacggtaatttgtggagcgaatttgtcactctttacgtagcggtcaatgctttccagcaattgctgggtggcaggacgttcgttgatgtttttctgggtatctacggccagtaccagtagactgcctttcttcacttttgcttcgaaaccaataccgagcttttcattattgtcgtaatggtctattacttgtatgaaaggccgcagtgctgccggagcatctttcatctcaataaccttggcattttccagaatgtcccaccactgccagtcagtatggtaggaagttatgaaatgctcgaatataggctggtcgtcatgaatcagacagccaatggtcataggaggccatttgaacattatcggattccaaaagtgattgtggaacacggatttacgaccttttactttggaaggtttggggcagagtaccactttcttgccatcggcaaggtgttgttttgctttttcatcgaatactgtggtgtagagcacttcactagtggactgcattaagttgctatgacggggatatacccagatatcccagctgttttttacgtgtgcaacagaaagatggaccgtcagcttctgtggttcagtgatattgtccaatgcataactgaaattgccaagtggaaataccccgttctttccgacagtttgtgttttcagttttccgctcttaagggttttaccgttgctgtcggtgatactccaattgatttttgcgtttttcaatagggtaggtccataattgtatatttccgcttttccttcaaatacttcatcattgtaaagtgcgcgtttgtcgaaacggagcaacgcaacagtcggtgcacagaactcgcgccacttttccggtgtgatgagccctttggtattccagaaaggatcgagaatgcctaccggtgcatatccttgtccggtaaaatcattcagagacagtaattggaaaccgcctttcagataagtgcgcaactgggcttctatgacatccttgtactctatggcggtcaaggctccagaagcacggaagaagtcatgtgcttggtcgagcatgtggtttttgtccagcagttcacggaatatctcgaaattacgcgcttgtacggggccggtgaagttctttatttcctcgaaattgggatagatgcaccgctgtccggattcatgcgagatgatgggcaggcctactcccagttccttgtttttgtcccagtttgtataaggacgtccttcgtagatggccatgtgtcctttggtagtctgatgggtaatgtagaactggtctgatttgacacgtgtgcgggctgtggaaccgctgtatagacggcggttatccaactggcgggccgtggcggtaagctcttctatgaaactgaaatcaccggtaatctcgtttccgttacagtagagaatgaaggaagggtgattcccatattctttcaagataccccgcagctcgcgacggaagaaattccagcgcttctcatcgggttgggcatctttaccccacatcggcatttccacctccagatagacacccagcttgtctgccatacggaacgcagcggcaggaggacaccaggagtggaagcgcatatggttcataccatattcttttaggatacggagtacacgttcccaagaggcatcgtccacgggagcatagccggtcttggggaacactgcgttttcaacggtaccgcgcaggtgtatgggttcgccattaaggatgatatggtcctcaccagcctctacttcgcgcataccgaaagttgtgcttttctcatgcgcataggattggccctctacactggaagtcaacttacagtccaacgtataaagattgggatggaactcattccacaaatggatatccttacccaaaaacatttcttcctcgatataagtaatggaatcggtcactgttactggtacttccttttgtagtctatagtcctttcctgtcacgtggaaggatattttgccgctggcggtatgttctgtacagttgcggacagtcattttgactttgatgcttttgttcttgatgtccggatagacctgcatgtcatctacatagactggatctacagctaccagcttaatttcgcccaatactccgttccagtttatttgggtaaattcggagtgggcatggtcccatttatgggtatcgtactggtagcggttgtctatacagaaagttatcagttcttttttgcctggatgtagccattgggtcagttcgtggttgtggggaatactgatgtagtctattttactcacttcttctttgcctacatataccgaactgagccagtgtgtacgttcaaaatagaggaaaatgcgtttgcctttccatgccgcaggaatttctatttctcgctggtaccatgcggggcccatatattcgtagacacgggtcagcctatccaggtggcggtaaggagatttgtagcctattttatagtcatctgtaattcccggcagaacgatgctttcctgcaggcgatggcagtaacgtacgtccagtgaacctctccggaagtccatgacatctgtctggaatgcccattcaccagacaagtccatttcattcttttcttgggcatgcccgctccagaccatagaggtcaggaggagggcagccatgtagtgttttattttgtgcttcattgttctgttttcttttggttatagtaatcacgcatgatgtaccatgcttttttgcgttgtccctggtcggaaaccagtcctttacggttccattcccctccctggtgtggatggaaacggaagggagaacggaaatcaaaaagaatccacggcgatgttccgcgcaggttggggatatgcttgaacatttccagattgtccttgtagagttgtgcctgataatcctcactccaagaactcttgacttccgcgtcgccatgtttgccatagagcgcttcgcctccgaactcggaaatgaaaagaggtttgccgggagctacattccagacagcctggtccggagccagtggccagtcatgataccatcccatatatttgttgatggctaccatgtccaggatgttgataatggagtcattcatctcaaagttccggctttcgcggttgaagcgtaccaaatcgaaggcggccgtaatcagacgggttgagtcgatgtccaggcaacattgtttcatgtgtttcagaaattcattgcgcggggcggaagtggctgtttcattggcaatcccccaaaaggcaacggaacaacggtttttgtcgcgcatcaccatctctttaatcattctgcctgctttctcacgggtagcggtattcttgaagtcaatcccttgccagataggtatctcttcccataaaagaaatcccattctttctgctaggcggacagtatattcattttgtggataatgtgccagacgaatcatgttggcacccagctctttggcttcggacaacagcattgttgcgtccgcttcagagaaggcacgcccgcggcgttgcggaatttcctcgtggaagctgatactgcgcaggaagatgggctggtcgttcagatagatatcttcgccttttacataaaggttacggaaaccaatttgctcgttgagccggtcactttccgaagtgatggttacatcatacagctttggagcatccggtgaccaacgttgcagttttttggttttgatagtggcctgggcaattccgttggcatcggtagtcatgttctgtctgatgcccaattcggggatggcgacttgtacgttgatgccaggctttgcttcggataaggttactttggcacgaatcaggttggattgtaccttgtccaactggatgaaatggtctttgatgtagctttgtggaacgcttaccaacattacatcgcgtgtgatgccgccgtaattccaccagtcaaaggacatggcagggatggcatccgtggtgcgggtattgttgactttcaccaccaggaagttgtccttttgctttaccttatctgtgatttccacctggaagggagtgaatccgccttcatgactggctattttctccccgttcagatatattttgctacggtaacttaccgcaccgaaatagagaaacaaacgtttgccgtcagtctttggggtatcgaaagagcgtccgtaccatactgttccttcataaaatttcaactcgggcatttgtgaattgaaatcggcaggtacattcaggaccaaacctccgtcgaaagagtattcataaaattgcttgttgtcttgaggttttctgtttttgtacacctgcatcctttctccttggtcataaaggtctacaatggctccccacttcccattcagtagctggtaatcgcgtccgtaaacattggacaataagtcttgtgcttgtgacttgcctcccagtacagacactgcgagcaaacaagtaatcattaatcttttaattttcataaatcgtatgtatcagttaacgtttaaaaagcctatgaattattctttgtatattttcaatgcgcatccgcctccttgtgccattttgacggtcagtttacgggatgcaggaatgtctgtgacggtcttttggtagtcggaagccaggcggttggcattcactccgtcatgaaacatttccgctttccatctgcctgcaccgaggaaagaaaggtctagtgtcagagtacgtgcatcccaattggttagggagccgacataccagacatctcctttcctgcgcgccattgtaatgtattttccaatttctccgtttatggctattgtttgttcccaaacggtagggatggtagcgatgaattccgtgcattcttcttcacggtcgtaattggtgggactgtcgcacaacatgttcaatggtgattcaaatactacatattcagctaattggcggcaacgggttccctggctcattggggtatccattgaggagtggtaacaccgtttgttggcattgtgcatggcgccttgtgtatagtccaccggtccggccagcatacggataaatggcatggtgacatcgtaggttacctggtcggtatggatgtcactccacttcatctgttccagcccgtgaacggcttcatagttgatgacattgggataagtgcggttcagcccggtaggtttgtacgtgccgtgaaagtctaccatcaacttatatttagcggcaatttcggcagcccggtagtggaagtctaccatttcctggtcatccctatccataaagtcaatcttgaatcctttgatgcccatttcggaatagtgcttgcatacatgttccatgtcgcgggcaaaggcatggtaacctgcccaaaggatgagtcctacattcttttgcctggcataggccgtgagcttttttaaatcaatttccggtacaatttggaaaaggtcagccttgaggttgacagcccagccttcatccagaatcacatactcgatgccatgccgggaggcgaagtcgatatagtgcatgtatgtttcattgtttattccagcttcgaaatccacgcctttgattccccaatggttccaccattcccaggccactttgcccggacgtatccatgagatgtctttcatgcgtgatggagcagccagcttataaaccatatcgttatctgccagctccttgtcatttcttgccacaacaatgatgcgccagggcagtttggctttcggctgacaggaagcaatgtagttttcacgctctgtgactaatatttgcagttggttatgcccgccttgtttttttgttttggggacggcggcaaaagcggaagtgagtgctgttcccccgtttctgttgatgaggaacatgcccggatagctctccacgtcggattcggcaatacaaagtttacggccgttttcctgctctattactacgggggtaaacatcagtctttggggggtcagtccggatagctctatatgtgtataggtgttttcaaaagagttggagaactgggcttctatcggttgtttatcgccatcttttacataaggaacaatcgatttgtagtccttgttgaagttgaaggcggcttcttcgtttgtaactttgaacggtctgtttccggtcgctgcgaaccggtatgccattccttcattgtacattctgaaaatgaggttgaaatgttcccggaaacttaacgtcatttcattatagacatcctttacttcactgcgtttgtagaaaggagagggaatcacctcatttgcctggcgatgactgactctcttaagatgggagccgttaccccagactgtcccattatccagatgtactgataagggagagggggctaccaatgtatgcccttcttccgtcagctcataagtaatccggtcacctatatataaggtaacctctaacttgccgtccggtgagtttaggcgatattctttttgtccgaacatgttcgggatgatgaaaagcaatgttgtgagtaagaaaagtgttctcatgtcgttatttattttagcgtttgtttttaatttcatacttgtagacaacatagtcattgattgatggcagagagatttccagccttcctttctttccggttactgctgtcatagctttgccgtgtcccatcagtgggatacatcttactgtgacaccttctggcagccaggtttcgacttctgtagtcccttctggatgattttcacggtacacaatcaagtatcctctatctttctttagagactggaagccggtccaagagcgtcccgacggttcatctcctatgggtaggatagtgccggaatgcatgtcatgctgaaatttcttgtaggcttctgtatgttctcgtaatgtaaatgcttcctcgggtagattggtaccttccatccaggcaagcggctgtcctgctaaagtcgtagcaaacagatattcaaatgaatagttttccggagcgaagacttctcctttatatttatccgtatttctccatttgttcaggaactctatttgcagcttttctgccggaacatatttggaaagcatccagaggttacgcaaagtccagtaaggatagtagttctgccagtcggtataacggttttccagaaagatatttccatattcattgaacatgtggtagcctccgcggcggctggctgtcgcatcaaggttgaaaatcacttcctcgtccgtctcttccagcactttgttgaataagcggtgcaggtttgtttcggcttctttactgggaatggtgagcccgtctatcttgaatactttgatgccgtattcgcgataaaggctgatgagtgcttgcgcatctttctgccaatcggcaaaatcattttgtatgctgggattgaaccaaagaccgatttcaatacctaattccttgccacgttttacgatgggatgcaaaccacgtggatacttttgcgggtcgggtttccagtagtctttattgtcccaaatgttcttgaatgaaccgcgggctacagctgaattagggcttttacctatttgccagccatcatcaatctggaaatgggtgattcccagacgggcggcgcgttccagttctttcaaacagaaggattcgtttacttttgagtcctggctacggtctccccaggtgttcatcataatcatctcgtcgcggtcggcccggtaagtacgtatattcttctgatatgaacgaagcgtttgtagtcggctcagttcaccttctccgtatattcccaatacgcatccgtatgtttgggtccaacggtcgggagtcacgtctttctcggtaatgcccaggccagttactgtaaactttccgaaatcagtcagaaaatcctttccttgataggctaattgtaccgaagagcagggagcctcttttaaaaagaagatgccacagttgtcctcgccattaaaggcaaacagcagattgccgcgatatcccagtttgcgataggaaataatctctttctcgaaaaacaggttgttgtgccagtcggtcacatcggaaaattccacgctgcgagcgtgccaatgttgtccttggaaatggaactggtctagtacagcggttacttctttagatttcatgtcttcggcgaattcaatattcttccggtcggctgcactaacttctctgcctccgaaaatactgtttactgttcctcttaaataggtgtcgcaggctatggctggacaatcatcataaatacgatatacccgttttatatctagcttctccaggctgaaagaaacttctactttcagataagcgggaaatattttagtctcttttacgggaactactttgagtgaaccgtttgatggttgcggcaaatttttcgttactctgaaatctggagtaaggctgtggttcttccatgattttccattactcttgtcggtcaggcggtaagttatgatatttcccccgttccacaaaaaggtacgttcgaccaaattgtttccgatggttaaagtgtcatttctcagaaggccgtagcaggtatcttgtgcgtgtaacgaatatcctccgaaaaggacaaataataatgttagaatatttttcatgatatgcgtgttttattaatacttaaattgtagtatcaacgtgtttcttacttcttgtttttttcaatgacaaatatacgaggcttttttaataatttttgttcattgaacttctgattatcgggaatcccttctttttttcctactccctctttcatcagtgctttcaattccggtaggtgtttctgatatactcctctcggagtggtgttgtactttttacataaggaagctgccatcccgacaacttcgcccatcattccggtggtacgcattacgcggacagtgcccagtgccacatgggtaacactgatattgcggcccgccataaaaagattctcgatatttctggaatataggcagcgatagggcactgcataaggatatatatggatgtgtttggttgctgctttgaaaggcgcatcaggaaagtgtgatgcattgagcgaatccgggaaatgcaggtcgatgctccaggttgtgacgaaggaggcatcttcgtgatagacatttttatctatatcatcttgctttagaatataatcgcccaacaatcggcgtgactcgcgttttccggcaatataggctacccagtccaatgcgcggttcttatatttcttgttgtcctttaattcatttttcagaaaactccaattagaatagatgaccattaagccataatcacgtatacgttcgaagtcgtcgatttgattgaagttcatgccggtttcccatttccattcacccatcgtcactttttcgcaatttttttcattgaattgcagaccgtacgagaaaatagggaaacgggtaggtttacctttgtctgcagagtaccattgtacggatgaacccattgtcattttgtccggttgaatcggtgccagctcttctccgtattcggcacgggattcgcgtcccatgttgtagtctgcaccggccagatacccgatggtgccgtctccggtacagtcggagaacaatggtgctttcagttccacttcttttccattctctatatgcttgatgatgacagattctattctgttgccatcgggctttacagatatggcccggtagttggcataaagggtgatattcttttcattggcgataaaaagctccttcttttcatcttcatagtttgcggcaggtttggcatttccttctttagaatgtccgaattctcttatcatacgtcccagtccggaattggggcctactccgatattgccccctaagtgaaccctgacttcagagctattattgccgccaagtactgggcggtcgttgattaatgccactttgcatcccaatctggaagcggttgcggctgcacacataccggctataccgccaccagttacaatcacatcataggagtattgctccggttcggctggaatatccagcatctttttacggaaatctgtcagttgtgtggcctgagcgggagggagctgccctttttccgtagtaaaataaatggcatcgcaacggccattaaaaccggtcaaatcttttaatgtcagactagagcttcctgcttttacagagactgttccggcaggttgccacatccattgtttgccctcgtcccctaaaaccactggcaactttttattgtcgacggctaaagtgaattttcccggtcctttaccatcataccagggagaagtccagttgtaggtgcgtacaaatacataatatgtaccgtcttcaggaaaagaaatggtagtggaggcatcctcaaccgggactcccattccatgagccatcagataaggtgaacccatgaggtccatgaattgctggtctactacccatcccccctttctgtcaaagctttctgcttccaccaataacttgctgggtacttgtttcctattgcctgagggcttgttggcttgttgaaatagtagaacctgcttgttgggttttatttcgaaagtaattttggtccctttgaacaattcctttagggtggcttcaagtggggcattggataccagcaaatcttttcgggtatcaagattgggcagtttgtcggtatagaatacattgtagccgctagtcttttcaatttgaggtataatctgcttgatagtctgctggtttatagataaactgatttgggcaaagttatttccccagaagaacagcactcccagtaatattgaaaatcgcgtaattattttattttgtctcatgtcttatcatatcaggttaattacttttttactttaaggaaggtacgacaaaggctaaccctaattaagctattagagtatattaaaactatatttctcgaatgtttaaattttattgtcgctgccagaagtaggtcattgtgtctgaggtaaaaatcctataaaatctattccatatactttttgttttagttaatataaagggctattttacactactaatatattataatcgtattgtcagattctatcttgtaattaatgccgccagcttggctgatgtattccaatacattgtttaaactgccgtttttaatgatgccatgataagtatattgtttggctttctcgtttttgaatataaatttgcaattatacattcgagtaagcatggtacaaatttcttcaaaggattcaccatagagtgccagttcgttgcttctccacagtaagttgcttgcattaggatgaagctcgcttttttcgaactgtccattggtcaggttgcaaacgagcctttcgtttggcttcatatatgcctcgtgtctgccgtcgtctactttaacctttccacttatcaggattacagctactgatttatcgtctttatgtgcacgtatattgaagcttgtacctaacgcttgtacattgatgccatttgctttcacgatgaaaggcttttccttgtcctttgcaacttcaaaataggcctctccttccagggagaccatacgtgttttcttgttgtaagtgttgtcatatacaattcttgaatcggaattgatgtagacctttgtgccgtcagccaaaatgatgtcggccttctgcccgttggatacggacatggtgacttctgtattggcgtcatcggccggtcgtttgactcctgcataataggctccgcttcccactgccaatatgatgcaggcaactgcagcatagcgcccaatctgacgcaggaaacggttccttgttttcaggaccttcgtttccgtggtggaacttgcgtctatctggcttaaaagttcggtgaacatttcattttgtacggctttgtccatcgtgtccggagccagtgcccagcattgctgatagtatgcggaaaatttctgttgaaaatccggttgcttaatccatgatttcaactgtacatcttcttcagggctggtcagtcctcgaaagaaacgatccaaaagttcaatatgactgtcttttttatccatgttctgtagtatatatctgtatgcctgccaaaacactcacggattttcgtgctttaacaattatttagaaagtagaaggagaggaaaagcatgatgaatttgcgtaattcttctttcagtagtttcatagtacggtagaaatgagcctctacggcacgttccgtcaaatctagctgtgaggcgatttccttgttggacagttttcctgctcttttcagctgaaagacttcccgtgaaacttctggcaggctttgcagaagttgctctatctgtttttcaatgatggagacgtccatatccatcgtatcttcctcgatagcctctgcttctgttttcagcttgttttctacaaatttgttgtgtaataatcttcgttcgatttctttgtataccatgttgcgtgcgatggtgcatagatatgccggaaaacttttctcggtatccagattactgcgtttttcccatatcgtcatgaagctgctttgggtgatgtctttggctaatgatttgtcatatacgagaaggacgatggtgttgtacagcctggcactgtatttttcgtacaatgcttcaaaggcaaatttattgccttctctcaacttggctaccaataaagtatcattttctttctgcatattgattcatcttacatttacgcattctgaatggtagtgtctttgtatagtaaagtactattccacatagactctgaaagaatgaactacaaaggtggtgtttttattatttatttaaaagttttttgctgaaaatatactttgtgtgattattatttaattctatattccacgatgaaggaggatggcagaaatagtcatttgcagtataagaagtggtaaactgatggatgggtttaggggcttattgtcaatacattacatttacagcgttgttacatccttatgtaaaagacgttacatgccggggaaagactctttacacaccggggtaaaggccgttacatatcggggtaaaggtagttacatcctggggtaaatggagttccccactgaggtaaataagttatcctgctggagtgaatgaagtgatataggcttatctgatgtccgccccccacattagtttattgcgaagggtatcaaagaaaatatggttgaaccgtttcactacctttatgctatagtcggcacgtgagatgtgcaactgggtcgtttctttgcaggactcgctacggccgtcgatggcaaccaagaagttgtggctgcggctttccacatcaagtgtaatttcccagtcgtcacaaatgacgatgggacggacgttgaggctgtgtggagccaccggggtgatggcgatggttttactgtggggcacaatgaccggaccgccgacgctgagtgagtaggcggtggaaccggtaggtgtggagacaaccaggccgtcagcttgataggtggtcaacggagcgccattgatggcggcgtggatactgatcatggacgaactgtcccgcttcaatacggctatctcattgagggcgtaaggggattgcatcaagcgttcatcgtcgcacctcagttgcagtacactacgctcttccaccttatagtgattattgtagatttcatcgaaggtctcttccatctcttccggtgagatgtcggcaaggaaacccagccggccggtattgatgcccaatatggggatattcttctttcctacacggctggctgctttcaggaaagtgccgtcgccaccgatgctgataaccatgtcggcacagaaatcatctccgtcaaacaattcggcgtcaggtatgtttaaatgtaaatcggcagtcaggaagtgatggaattcccggcagatgcagagctgtgcattatgctgtccgagcaaccggaagaggttttctgcatgcgaggatttctttgcttggtaggtatttccgaatatggcaaatttcataatcaattctgttggattgaagtgcaaagatgctatttttttctcagaatgctgccaatatataactattatttgtacttttgtcccaaactataaaccgaattatgactagattaagcgttaatataaataaggtggcaacgctgcgcaatgcccgtggaggtgatgtcccgaatgttgtgaaggtagcgctggattgtgaagactttggtgctgatggcattacggtgcatccccgtcctgacgagaggcatatccgccgtaaggatgtatatgatttgcggccgttgctgcggacagagttcaatatcgaggggtatcctgcacccgaatttatggatttggtcttgaaggtgaaaccgcatcaggtaactttggtgcccgacagccctacacagctgacttcaaacgcaggctgggataccaagacccattttgacttcttgaacgaagtgttggatgagttcaacaatgctggtatccgtacttccgtatttgtttccaccgataccgaaatgatagaatatgctgccaaagccggtgccgaccgcgtggagctatatacggaaccttatgctacggcttatcccaaaggacgggaagcggctgtagctccttttgtcgaggctgccaaggtggcccgcagcttaggcctggggctgaatgccggacatgacctgagcctggtgaatctgaattatttttatcaaaacattccgtggctggacgaggtgtccatcgggcatgcgctgattagtgacgcgttgtatctgggattggagcgtacggtcaaggaatataaaaactgtcttcgctgatgaatgtaatgttgttattggcccaagtggctccggcactgactgactctattgcaggtgccaatccggtactgacacaagtaaacgcttccgacgaaatgaatttatggagcatggccatcaaaggtggctggattatgattgtcttgggtttgatgtccgtactttgtttctacatcttgtttgaacgtaattatgttatccggaaggcggggaaagaagaccctcagttcatggataaaataaaggattatattttgggtggggaattgaaagctgccattgcttattgtcgcagtgtggatactccctcggcccgtatgattgaaaagggtatcagccgtttgggacgcccggtgaacgatgtgcaggctgccatcgagaatgtgggtaatattgaggttgccaaactggagaagggaatgacgattatggccacgatttccggtggcgctcctatgctaggcttccttggcacggtgacgggtatggtacgtgcattttggcaaatggcaaatgccggaaataatattgatataacgttgctttccggtggtatttatgaggcgatgattactacggtgggcggtttgatagtcggtatcatagctatgtttgcctacaattacctggtgacattgatagatggcgtggtcaacaagatggaagccaagacaatggcattcatggatttgttgaacgaaccggcgaaatgattaattaaagaattaagaattaaaacttaaaggcgtgttaaaacgtagagctaaaatatcacccaatttcagtatggcgtccatgacggacctgattttcctgctgctgattttctttatgataacatctaccatggtatcgcccaatgctatcaaggtactgctgccgcagggaaagcaacagacttctgcaaagcctttgacgagagtcatcatagataagaatctgaattattatgctgctttcggaaatgacaaggaacagacgttgacgcttgaagagctgactcctttcctgcaatcgtgtgcagcgaaagagcctgaaatgtatatagctttgtatgctgacgaaacagtgccttaccgggaaatcgtgaaggtgctgaacattgcaaacgagaataaattcaagatggtgctggctacacgaccaccggaaaactaaatcgtacattgtacatggctaaattgtaaatgcaatggtgaatcagaagaagaaaggaaaatatataggtatggcaggtgcacttgtggtgcatgttgccattattgcccttctgatactggtaggattcacactgccggaaccctcggaagaaggcggtgtacccgttatgctgggagaggtgcccgatgcactgggcgctgccgacccttctttagtaaaggtggatgtcatgccggaggaaaccgctcctcaggtgcaggaaacggtggagcaggacatcattacgcaggaaactgaagaaaccgttgccataaagcccaaagccgaacccaagaaaaaggaggaggtgaagaaaccggaaaagacggaagccgaaaaagcggaagaggcccgcaaactggcagcggcaaaagccgaacgggaacgtaaggaagccgaggaagctgcccgtaaacgggtagctggcgcttttggcaaaggtgcccaaatgggtagtaaaggcgatacggaaggcgaaggtattcaaggaagtcctacgggaaatgctccgtccggagccacttcgggtacgggaggctacggctcgtttaatttgggcggacgttctcttggtgagggcggattgccgcggccggtatataatgtgcaggatgaaggtagggttgtggtgaccatcacagtgaaccctgccggacatgtgatagcaaccagcatcaaccgccagaccaataccgtcaatcccgcattgcggaaagcggcagaggatgctgccaagaaagcccgtttcaatgcggtaagcggcttgaacaatcagacgggaacaataacgtattattttaatctaaaataagaggaggaacaattatgggtacagtttatgttttttttgccgacggatttgaagaaatagaagcttttacttctgtggatgtgatgagacgcgccggactgaacgtagaaatggtgacggtaacccctgatgaaatagtgacgggagcacacgatgttccggtcttgtgcgataagaatgtagtgaactgcgacttctttgatgcagagcttgtattattgcctggcggtatgccgggtgcgtccactttggagaagtgtggagaactgcgtaatctggtactgcgttttgcccaagagcagaaaccgattgctgctatttgtgcggctcctatggtattgggtaagctgggattgctgaaaggcaagaaggctacttgctatcccggctttgaacagtatttggaaggtgccgaatgtacgggtgctccggtagaaagagacggcaatatcatcactggtaaaggaccgggcgctgccatggagtttgcattggccgtagtggagctgttgcaaggcaaagagaaggtgcaggaactgaaagaagctatgtgcgtaacggatttatgatttaaaatcataaatcataaatcataaatcataaatcataaatcataaatggttcagtatgctctgattgttgccggtggcaagggcttgcgcatggggaccgaactccccaaacagtttctcccgataggggggaaacctgttttgatgcgcactctggaggcgttttatgactacaatgctgagatacggataatattggtgcttccccacagccagcaggattactggaggcagctgtgcagggagtactgtttttcattgccgcatgccattgcagatggaggggagacgcggttccactccgtaaagaacggtttggctttggtcaagacacctgctttggtcggtgtgcacgatggggtacgtccattcgtagcccgggaagtgattgcacgctgttatgacttggctgccgggaaaaaggctgtggttccggtaataggtgtggtggagaccgttcgccgtatgggagggaaaggcagtgtgactgtcggcagggatgattatagattggtgcagactccccaggtttttgatgcggaactgctgaaagcggcatacgagcagccctatacaccccattttaccgatgatgcttctgtggtggaggcattgggtgtatctgtctttttgacgccgggaaaccgggaaaacattaaaataaccactccttttgatttaaaaatagccacagctctgataggttcatgttcgatttagccacgcgtgacataaaatatttgtcgggcgtcgggccgcagcgtgcttcggtgctcaataaggaattgggcatttactccttgcacgatttgctatattactttccatataaatatgtagaccgcagtcggatttattatattcaggagatcgatgggacgatgccctatattcagctgaaaggtgaaatactaagttttgagacggctggagaagggcgccagcgcaggctgatagctcatttctcggacggtacgggggtagtggacctggtttggttccagggcatcaaatatttggtagggaagtataaagtgcatcaggaatatattgtgttcggaaaaccgaccttcttcaatggtagaataaatatggctcatccggatatagactctgcttcggatttgaaattgtcgtccatggggttacaaccttattataatacgactgaaaagatgaaacggagttctctcaattcgcatgctatcgagaagatgatgaatacggtggtgcagcagttgcgtgagccgttgcccgagaccctttctcccgctatacttgccgagcatcatctgatgccgttgacggaagctttggtcaatatacactttcccgctaatccggatttattgcgtaaggcacagtatcgcctgaagtttgaggagcttttttacgtacagttgaatatcctgaggtatgcaaaagaccgtcagcggaaatatcgcggttatatttttgaaagggtgggcgaagtgtttaatactttctactcccgtaatcttccttttgaactgaccaatgcacagaagcgggtattgaaggaaatccgtaaggatgtaggctcaggaaagcagatgaaccgcttgctgcaaggggatgtgggaagtggaaagacgcttgtcgcactgatgagtatgttgatggcgctcgataatggctttcaggcatgcatgatggcacctaccgagattttggcaaaccagcactatgaaaccatccgtgagctgctgtatggaatggaggtacgtgtggaactgttgaccggttctgttaagggcaagcggcgcgaagctatccttgccggtttgttgacgggagacatacatatactgataggtacccatgccgtcattgaagatacggtgaattttgcttcgctcggtttggttgtgattgacgagcagcatcgtttcggtgtggcccaacgggcacggttgtggacaaagaatgtgcagcctccccatgtattggtgatgacggcaaccccgattccccgtacattggcaatgacgctttatggcgatttggatgtgtctgtcatcgatgaattgcctcccggacgtaaaccgattgtcactcttcatcagtttgatagccgtcggataagcttgtatcagtccatgcacaagcagattgccgaaggccggcaggtctatattgtctacccgctgattaaggaaagcgaaaagattgacttgaagaatcttgaagaagggtatctgcatgtttgtgaagagtttcccgagtgtagggtttgcaaggtacatggaaagatgaaacctgctgaaaaggatgctcagatgcaattgttcgtatccggcgaggcacagataatggtggctaccaccgtgattgaggtaggtgtaaatgtgcccaatgcttcggtgatggtgattgagaacgccgagcgtttcgggctgtcccagcttcatcagcttcggggacgtgtaggacgtggagctgaccagtcctattgtatcctggttaccggctacaagttggcggaggatacaaggaagcgtttggagataatggtgcggactaatgacggctttgaaatagcggaagcagacttgaaactacgtggtcctggagatttggaagggacacagcagagcggcattgctttcgatctgaagattgccgatatagcccgtgacggacaactgctgcaatatgtccgtgaagtagcgcaaacggtggtggatgcagatccacatggcatgttgcctgagaacgaggtcttgtggcgacaactgaaagcgttgagaaaaacgaacgttaattgggctgccattagctgaaaaaacggttaaacatgcacttttattgcattttatgttgtaaaacatgtttgcttgtaaatctcctatctataggggattaagacatctttgcgagctttacagtttcctcctcttcgaaaaaatagttaatgactgatgtcgtttttcagagagaaatgttacctttgggagaatttttgaaaatcaatctggatattcgcgtagaacaagtggtgtttgatttgccgagatgcttgcaacggatatcaaaatgaatgacgaaacggatgaattttaattggataaaaactgctttattggctgcgacggcaatggttagcttgaattctttctcgcaagacctgattgcccgccaggcccccatcgacagaaaacttaagagtgtagattcactggctttgcaaaaacagatacgtgcggaacaatcattgtatccgggtttggatttgtatcccaactggaataacgaattcgtacaagcctatggcaatgcgattgtgcctgagagctatacatttgatttgaccggtttttgtatgcctactcccaatacccgtatcacagatgtattcggttaccgtccccggagaagaagagctcattatggtttggatatcaaggtgtatgtaggcgatacaatccgtgcggcttttgatggaaaagtacgcgttgtcaagaatcaaggtcgtcgtggatacggcaaatacgtcgttattcgtcacgacaatggcttggaaacagtttacggacacttgtctaaacaattagttgatacaaaccagttggtaaaagccggcgaaccgattgcattgggaggaaataccggacgttctaccggttcacaccttcactttgaaacccgtttcttgggtattcccatcaatcctgcgcttatgtttgattttgaaaagcaggatatcgtagctgattcctatactttccataagacaaaaggctcttccggtacggcgcgtagcatggcatcgggtgaaggtctgttctataaggtaaagaagggagacacattgggacggattgcagcacgtcagggaacctccattgacaagctttgcaaactgaacagaattacgcgtaaaacaatcctgaggccgggacaagtattgcgctgctcataaaaacgtaaacaatctctatagaggagggtactttaatagattttagagtgccctctttttctttttctttaattattcctatctttgcagcgcactgtgaaaaaaggaaatgaaagataccaagcaacaatttgaacatgtcattgcggtttgccgtgacttgttctctaaaaaacttcatgattacggtccggcgtggcgcattcttcgtccgtcttccgtaacagatcagatattcatcaaagccaaccgtatcagaagtattgaaacgaaaggggtgactttggtagacgaaggcatccgttctgaattcatagctattgtcaactatggaattgtagggctgatacagttggaacttggttatgccgaagctgccgatatgaccaatgaagaggcattggtgctgtatgacaaatatgccaaaacctctttggagttgatgcttgccaaaaatcatgattatgatgaggcttggcgtagtatgcgtatcagttcgtatacggatttaatattgatgaagatttaccggacaaagcagattgaaagcttgtccggggagactttggtttcggaaggtattgatgccaattatatggatatgattaactattccgtattcggcttaattaagattgaatttggagattgacaagaaacatattgtcgggaaagtttgggtgaacctctgccgttttctgctgggggctttgttcatattttccggatttgtgaaagctgttgatccgttgggtttcttctataaaattcaggattacctgacggctttcggcatgatttcctggtttccttcttatgcgcccttgctggtagggatagtgttgtctgccatagagttcagtgtaggtgttttcttgtttttgggtatacgccggaaggtggcatctgcattggcattattgctgatggttgtaatgactccgctgacactttatctggctttggcgaatccggtatccgactgcggatgcttcggtgatgcgtggatattgaccaattggcagactttcggcaagaacgtagtattgttggtggcggcagtatctgtattcaagtggcaggatttactggtacgtttcattactccgaagatggagtggatgatttccatgtatacgtttctatttgtgtttgcgttgtccttctattgcctggagaatttgccgatacttgatttccgaccttacagaattggagcgaatatcaaggcgggcatggaaattccggaaggtgctaaaccaagcgtgtttgaaagccggttcattttggaaaaaggaggaaagcgtcaggaatttacattggataactatccggacagtacatggacgtttgtagaatcgcgtacgatactgaaggaaaaaggttatgaacctcccattcacgatttttccatgatgagtctggatacatgggaagatataacggacagcgtactgtcggataaaggatatacgtttctgctggttgcccatcggatagaaggagcggacgacagtaacatcgaccttatcaatgaaatatacgattacagtgtggagcatggttatggcttttatgccttgacttcatctccggaagacgagatagaattgtggcgtgacaagactggagcagaataccctttctgccagacagatgatattacgctgaagaccattatccgttcaaatcccggtttgctgttggtaaaggacggaacaattttgaataagtggagtgacaaccggctgcctgatgaatatgtgctgaccgatagcctggacaagttggaattgggcaagcagaagcaggaaagtgacttacaaacaataggctatgtgttgctgtggttcatccttcctctgatgatggtgctttgtgtcgatattttagtcgtaaggcgccgggagaaacaacgcctcagacaacaatagtatcaaatagtaaatagtaaattgtcaaatagtaaatacattaacccttttaataataaaacaaaatgagaaaaaacattgttgcaggaaactggaaaatgaacaaaaccctccaagagggtattgctcttgcaaaagaactgaatgaaacattggctaacgaaaagcctaactgtgatgtaatcatctgtactccgtttatccacctggcatctgttactcctttggtagacgctgccaagattggtgtaggtgcagaaaactgtgcagacaaggagtcaggcgcatataccggcgaaatatcagctgctatggttgcttctactggtgcaaaatatgtcattctgggtcactctgaacgtcgtgcttactatggtgaaacagttgctattctggaagaaaaagtaaaattggctttggctaacggtctgactccgattttctgtatcggtgaggtattggaagaacgtgaagcaaacaagcagaatgaagtggtagccgctcagctggcttctgtattctctttgtctgccgaagatttctctaagattattttggcttacgagccggtttgggctatcggtaccggtaagactgctactgcagaacaagcacaggaaatccacgctttcatccgttccttgattgctgaaaagtatggtaaggaaattgctgacaactgctctatcctttatggtggcagctgtaagccttctaatgcaaaggaactgtttgccaacccggatgttgacggcggtctgattggtggtgctgccttgaaggtttctgacttcaagggtatcatcgatgcctttaattaaatagttgaaagctgaaagttgaaaatggattgcatgtcgtatctgcataactgttttccattttcagctttccattttccgttatataaagatattgactcatgaaaaagcttggtttacttttggttgcatgtttcgcttttgcaacgatttctgtagcgcagaataatattgtgaaaagcctggaacgtaatgtgccgggacaaggcaaggtgactatccatcaagatgcacgcattgcggcattgataggttcggagtatgttcctgccggttcggatgagcagaaagtgattaaaagttcgggttaccgcatacaagtttatgcagggaataatacccgtcaggccaagaacgaagcttatgcggtagctacccgcatcaaggaacattttcccgaacttacagtttatacctctttcaatcccccccgttggctgtgccgtgcaggagatttccgcagtatcgaagaagcggatgccatgatgcgtcagttgcgggctactggtgtattcaaggaagtttctatcgtgaaagagcagataaacatccccttataaagaattatcatgttaggaaaagaagaaattgtatctccttcattagatgaattgaaggaacattatcaccgcatccttactctgttgggtgaagatgccggacgtgaaggtttgcagaagacacctgaacgggtggcgaaggccatgttgtcgttgacgaaagggtatcatatggacccgcacgaggtactccgttcagccaagtttcaagaagaatacagtcagatggtgattgtgaaagacattgatttcttctcgctttgcgaacatcacatgcttcccttctacggaaaggcacatgtggcatatattcctaacggctacattaccggactgagcaagatagcccgcgtagtggatattttctctcaccgcctgcaagtgcaggaacgtatgactctccaaataaaagagtgtattcaggagacgctgaatccgctgggggttatggttgttgtggaagccaaacacatgtgcatgcagatgcgcggagtagagaaacagaactccattaccactacatccgattttaccggagcattcaaccaagcgaagacccgcgaggaatttatgaatttaatcaggcataattcttgacggagaactccccgaattgaatttaaaaattcaggatgactctgtctcccagccgctttgccatgatgctttttactttgttcaattcgttgtagcgctccatgatgctgttacactgggtttcatcattggctatggcagggttctgtaacgcaaatagggtatgcttcaattcttcgcagacgatggcatatttgaagtttatcattaaccgtggaattagctcatagaggcgttcttcgtccgtcaccatttgttctatctgtgatttccttaactgatagcggttgctgataagctccacgctcagcttgctgatgacggggtcgggatgcgccacaaaataccgttcggcggtaaaaccctcattgtggatacgttcggcagcctctgtcaggatttgccggtgaagcggattgtggaaggcaagttcgtcttcttttaaatcattgactatatattcagttacagtgataggggtttcctgcccctcttcattggtgacattgcacatcacccgctcaccatagagcactaccatcttcagaataagtcgttcgtatttatagaactcctggccctccttgccctcctgtgggatgaaggatacatattcttcctcgggtggaaaaggtggaggtgtttcggaagggagaccggcaggcagtgattgggacggatagccagcttgttgtgcgtcggggctggtagctgtagctgcagtatgactgccattgacacctgcttctgcattggctcttgcggcattggccgaccgacgctcgcgttctgctcgctcagcttgttgctcggcttgcttttcgcgacgcttggcaacctcagaaaccagcagtttatcttctacgtgcaataattgggcgcactccttgatatagacatcacgcacaatggcttcgggaatgatggaaatgctctgcacaaggtttccgataagctcggcacgcttgatggggtcttttcctgcatcttccagcaacagattggttttgaagcggataaagtccgtttcattctcttgtatgaaggcctggaactccgtcgcattgtgtttgcgtgcaaaggagtccgggtcgtcaccgtcgggcaggaggcagactttgacgttcatgccttcttccagcaacatatcaatacctcggatagaggcctttataccggcagcgtcaccgtcgtagagcactgtcatattgttggtgaaacgatgaatcatccggatttgtccgggtgtcaatgccgtgcccgaagaggcaaccacattctctatgcccgattggtgcatggaaatgacatccgtataaccttcgaccagaaagcaacggtcttgtttcacaatggcttgtttggcaaaatatatgccatacagttcattgcttttatgataaatttccgattcaggcgagttgacgtacttcaccttgacgcctttggtggcgccggcaagcacacgtcccccgaaagccaccaccttgccggagagagtgtgtaccggaaagatgacccgcccccagaagcggtcgcgcagtcggtggtcgtccgtctcgtagcagaggccggtcttgacaagataatcctttttatagccttttttcaaagcttcctgggcaagggcatcgtggctctcggtacaatagcccaactggaacttctcgatgatgtcatcccggaagccgcggctgcggaaataggccatgccgatactctgtccgtctacgtggttctttaggatattctggaagtagtcacgggcaaagttgttcacaatgaagaggctttcccgttcgctctgtgctatcttctcctcgctggatagttcgcgttctttgatttcaatgccgtatttttttgcgagatatttcagcgcctcaggataagacatctgttcgtgctccatgatgaaatgcactgcatttcctccttttccgcaggcaaagcacttgcagagccctttggcgggggatacatagaaagaaggggttttgtcatcgtggaagggacacagtcctacataattcacgccgcttttgcgcagggtaacgaagtccgatacgacatcgtatatttgtgcggcatcgagaattctgtctatagtgggttggtctatcatgaaagcggttctattaacagtgcaaagataaaaaaaatccctcgttgaggacgagggaacctgatgttttcacaatggacattttttctatttaatcttttctctgattttggtcagatacttcttcatgccttccgcatccttgttgttgatgatttccagcagattcttcagttccaggcggatgttctccacttgtgagggagtgcgcgggttgaagagaatttcttggagcaagtagtcatcttcactcagcagtcctttggcaatagccatgtgcttcttgaatgtagtgcctggagcttcctggtgtttcattaccgctgcaaacacgaaggtggatacaaacggaatggacagcgaataggctacagtctcatcatgctcgtcgaatgtatattcgaagatgttcagtttcattgtctggtagaggtccttgaagaagatttttcccaagtggtcaccttcgctgatgatgatcgcattctctgtattcagattgctgagactggcaaaagtagggccgaacatgggatgtgtcgatacatatcggaaaccgctttcttcgtaaaatttcttcaatccggtctttaccgaagcaatgtcactgatgatgcagtccttaggcagtactggcagcacttggcggaaggcgtccagtgtgtatttcaccgtagcggcattgatgaccagttccggctcgaactccttgatttcctccaatgtagtgaagcggtaggtgttgtagacaaaacgcagttggtgcgggttgacatcgaacacagccgtctcgtgctggaaactcaatatatctgtaaagaaagagcccatttttccggccccaagtataagtattctcatgatgtttaatgtgctaatgtgctaatgtgcttattgccatgcggcatcactgcgcagccaataagcacattggcacattaaataattacttatttataatttccatttgttgcctcacactttcttcgtgtatcgcctcaaatacctttttgatgaattcagcatccatgccacacaatgcgccttgcgagccgcgtttctcgaggatttcgttgtagcgtccggtttgcaggatggtcatgtcatgctcttttttgtatgtaccgatttcacgtgccacacgcatccgtttggccagctcctgaataagattgttgtcgcattcgtctatctgcttgcgcaattcgctgaggttctcggtgctttgtgtttccttgcggatgaccagcaggttgaggatgtaatccagcacatccggggtgacttgctgggctgcatcgctccaggcacagtccgggttgcagtggctctcgataatcagtccgttgaagcccaaatccatagcttgctggcagagtggagcaaccagttcgcgctttccacctatgtggctggggtcacagataataggaaggttgggaattcggcggcgcagctcaatggggatatgccattggggcaagttacggtagagctttttgtcatagctgctgaatccgcggtggatggcacccaggcgtttcaagcctgcattgttgatacgttccaaagctccaatccacagctccaggtcaggatttaccggattcttcaccagtaccgggatatctacgcctttcagtgcatcggcaatttcctgtacggcgaaaggattggcggtggtacgtgcacctacccaaagaaggtcaattccggctttcaggcattcgtatacatgtttggcggtagcaacttctgttgaaacgtacatgccggtttctttctttacctccttcagccatgcaaggccgtctacgcctactccttcgaagccgcccggtttggtgcgcggtttccagatgccggcacggaatagcttgaggcctttgtctgccaattgtttggcggtgctcattacttgttcttcggtttcggcactgcaggggccggctattaccatagggcgtttgtcttcaacaccaggtaatgtgataggttctaattcgagttccatattctttatttgtttaataatattctttaattatgctttttcttccttgtgacgtttccccccttttcagaagaccttctgagcaaggtcccggagatttagtaaaacgtcggagaagatttactaaatcgttcctcccgttttagtaaatctccggtggagttttagtaaacgggattccggctttagggtgttcatctcttacttgtaagcatttatttcatgtccttgatacgcttcaatgcttctgccagtttattgtccttacagcagagggagatgcggatatatcgtttcccgttacttccgaagataaatccgggagtaatgaacactctggctttatgcagcacgtgttcagtcagttcttccacgtctgtacagctgtcgggtatcttgccccagaggaacatgcctacctggttttcgtcgtaggtgcaacccagggtatgcatgatttctcctgccaactgacggcggttgcggtaattcgcgttgttgccgtcataccagtcttgctctgcttccagggcagtggcggctgccagttgcatggcacggaacataccgctgtcgatgttgctctttactttcaatatccattgcacgaagtcggcattcgaggcaagcatgccgatacgccatcccggcatgttgtggcttttgctcatggaattgaattctatgcagcactctttggcacccggaatgctgaggatgctgatgggatgttcgttcaggatgaaactgtaggggttgtcgtttacgatgacgatgtccttgcggcgtgcgaagtccaccagtttccggtacagttccggtgttgcgttcgccccggtgggcatattgggatagttggtccacatcagttttacacggctcatgtccatccgttccagctcgtcgaagtcgggcatccagccgttttcttctttcaagttatagttcacgacctcggcacccagaatcttgcttaatgaagtataggtgggatagccgggattgggaaccaatacttgttcaccggggttgacaaaggccagcgtcacgtgcaggatgccttctttggagccgatgagcggttgtatctctgtgttgggattcaatgctacaccgtaccattttttgtaccagtccgcaaaaccgcggcgcagttcggggatacctacgtagggcatgtaaccatgtccgtccggattgcaggcagcttcgcaaagtgtccggattgtcttttcggaaggcggcatgtcggggcttccgattcccaggctgatgacatccattccttcggcattcatttgtgccacttctttcagcttcttcgagaagtagtattcgcttacgcttgccaggcggtcggcaggctttattctacacgtttgattttccatcttcatattctcctaatattttcagttctttggtcagcggtgtgatggccgcaatggattgtttatatctcagtacattgtcgaagacgacatctacgtaaaactggtattcccattcacgcccgatgatgggcagtgattgtatcttggtcaggttgatgcggtagaaagacaaaatagacaatacctgggaaaggcttccttcagtatggggaagtgtgaataccatgcttgccttgttgacgtccttgctgcgatgccggttcagttcatctacttgccaagggtcggctacgaccaggaaacgggtgaagttatgtttgttggtttcgataccttcctgcaggaccttcatgccataacgctctgcagcagctttggagcagatagctgcatggcctttcagatgttcctgttggatgatttcggcactgcgggcggtatcttcgccttccaccactttgattccggggtgttgtcccaggaattcacggcattgcatcagggcgatagggtgggagttgacttcggtaatatcatcccagtcttcatcgggcaggcagacaaaactatgggaaatacgtagcttgtactcgccgacaatctgtgcgccactttggcgtaatagctcattgttatgcagcaaactgcctgcaatggtgttttctattgccagcattcctatggtctgactgtcttttttgatggcaccgaacacgtcttcaaagttggcgcaacagattaactctatttcttctccttcgaagtacttgtgtgcggcgatgtcgtgatacgagcctaatgttccttgaatggctacctttttcattatttttattttcttggttatgctataaaaaaaatcccgcttccatacgatggagcgggattctgtatatttacttgtttctctattcagtccttaagcatcactgtcacttgatacatacaaactcccgctctactttctggctaaagtaaaagtaaaaaaagaagtaatatgcataagtaaatgacttcatacttgtattctctgtttttgaattacgtgacaaaagtaatgcttttcttttatatacaaacaaaaaacaatgttttttttagggatagtagcaatttaacttatttccctttaacttgtacaatgacttgaaccggacgatggtcggatgaaatggtgtcttctatgactttccggtattgtacgtcaaaccgatacccattcttggaatagccgtagatgtagtctatacatcggttgggacggtctgccgggaaagtataagaggttgtgtcattgagggtggcaaaatgttttgccaattccagctggggagcgcttgctggtgcagagttcatgtcgcctgccataaagatgggcttatcgacgttttgcaaggctttttctatcaatggtacggcaaggaactggtcttctggagtgagggactggtgtgtggcacaaaatacataatctttaaattctgcaataatgagggtacgtttttcttcccgtccgggcattggaatgattttgtattttatgggtatctctctggagaggattccgatgccgtagcttccaccctgaaaaggaatggctgctgcataagtcccgtgcattccggtcagtttttctagttctccgagagcatggattcctttgttgcgcaccgtaacactgtcaagttcctgcagggcgactatgtccggagaagtttgactgataacattggcaatgcgtcggtaattgtactccttgtccataccgatgcaattatgtacgttataggacaatatgttcacttgctgtgcatgggcaggtgcgaacatcagtacaaaaagtactgatagaaataaatttcgtttcattggcggcaataattgaatttgttataatcctaggatattaccggtacttccccccggttggttaccatattgtccgttaaagttctgtatctctttaggattgagttccagtcctttcttcatgtcttctgcagaaccttccttgtcgccgttcagcaacttggcacgtccgcgctcatgataggcctctgcgaaattagggttcagttctgtggcttccgtaaagagctcgatggcttctgccagcttgttttgggtgatgtaaagctgtcctaagtagaggaaggcttgttcgttgaagggattcaactccgtcactttctgatagctgctttctgctttttctttgtttcccgtagcttcttctatctttccgcggagcaagatggcactttcgtcttccgggtcttgtgccagaatggtgtctatgtcttccatcgcttccttgtattgctgcatttggaccagtgcttcggcacggagcagacgtgcttcgatgaaatcatctttcagtacgatggctttcgtaagatgagcgatgcacatgatgccgtccccttgcccattgtctgctttgcctagcaggtagtgtgccatggcgttgccttcttctatttcgatagctttctttgccgctcctgccatggcgggatagtcttcctgcatgtagcatacgttggctagactgaggtaggtggaggtatgttccggctctatttcggtcatacgttccagcagtttgtgtgcctcgtccagttcgttggtctgggtgtagacttgggcaaggtagcccatggtctcaaagtcttcctgaatggcaagggcttcagtgaagcatttgatggcgtagtctgtacggcccatgcgttgtgcacgcataccgtcatacttgaatatctcaaaattcttctgctcgtttttttgtttctcatttgccggactgtctgacttgccggagaaaaaagatttaaagaatcccataggtgattaaaaattaaagaattaaaaattaaaaaggaaaaggaggggcatggctgataagagatgttcctctcagcggcaggacattcttttccaacggcaaaagtaatgaattattttttgatttgaagcattccgttgacagcaattaccttaccttcgtccaacaattcatgtaacacatcgatgagcatgtttttatcgtccggtatctgttctgccaaagtggctggagtttgtggtttatcagatagggcttgaagaatctttccagaaagttccttttccgaaaggtggccggaaggtttcttgttcttcaaattgatgcaagtgtcgcactgcccgcagttatgctcgttcttctctccgaagtagtgtagcagcattcgactacggcacacggtatcgctgctcacgtaatccagcatggcacttatgcgtttctcataccgctctttgcgttcctcgtacacggcgggagagatttgcaggtggcgcatttcaaccctctctcgcgtgtatattatatatggtgtctttttgcgggggatgtaactgacgatacgtagcttggctaggtggatgagctgttcatacacttgccggcgtgtgagtccagtgcgtatggccagtgaatcttcattgatgaaagcatggtctgtgaagaccccggtataggagcggagaatggtttggatgagtttgtccatatcttcgccgagctctctcagtttataaagttcgtctcgacggatagtgaacagtagccgggatgcattgtcttgttcgtctgtatattccaggtatcccgcttgtgtcagaatcttcaaggcactgtccacgggaacggggaagtacttgaactttcggcaaaagtcttctatattgaactcgcgtacacagccttgtccgtctcccattgccatctggtaatagtattgaagatgctcatatacttcctttatatactctttttcaggaaaggtgtcgggaatgcgtttgtgcagtgttgccttatccgacttggcgtaaaggatgaccgcgtaggctttttgtccgtcccttccggcacgtcctgcttcctggaagtaggcttctatggaatcgggcaggtccatgtggatgacaatccgtacatccggtttgtcgatacccataccgaatgcattggtggcgaccatgacgcggctttctcccgtctgccagcgttgttggcggatgtctttggtggcatcgtccagtccggcatggtagaaatctgcggtgatgccttcgttgtgcagcagttcggtaatttccttggtgcggcggcggttgcgcacatagatgatggcgcttccgggcatacggcgcaggatgtgcaacagctctcccgtcttgttttccgtcttgcggacgatataggcaaggtttttgcgttcgaaactcatgcggaacacattttcctcacggaaatgcagacgggcctggatatctttcactacttccggagtggcggtggctgtcaatgccaggatgggtacgccgggcagaagttcgcgtatttcggctatcttcagataggcgggacggaaatcgtagccccattgcgatatgcagtggctttcgtctaccgtaatcatactgattttcatcttctgcagtttggtgcggaagatttcagtatcgagcctttcgggggagatatagaggaacttgaaattgccgaatatacagttctccagtgtgacgatgatttcctgcctgctcatgcctgagtagatggcaagcgccttgattccccgctttttcaggttttgtacctggtctttcatgagggcaatcaacggagtgatgaccaggcaaagtccttctttagcaagtgccggaacttggaaagtgatggattttcctcctcccgtgggcattagtcccaaagtgtcccgtccctcggtaatgctgttgatgatatcttcctggattccccggaaggtatcgtatccccagtattgcttcagaagcctcacccccaatccctcccccatagggaggggagttttgaagttactactgctgctcatggtcttattgaactttcttgctacttcttatcgttgaattgatattctttccttctctatgctaatagtagtgattactaatcttatagcatcaaccaattttcatcatttccttaatataaggagactattcttattcccctccctgtgggggaggggttaggggagaggctttcagttcggctttatgtcttcaatctgcaactgcacttcacccctcttatgagtattctcttcaatggaatagcagatgtcgaaggaacgtttggtcttgatgaagcgtacgtgggaactttgcccgaaagcgatgccgttcattacattgttcgatttattatccaccagttctagcttgatatgttcctggtcgcggcctacgactttgctggtaccataatcatagacattgtgcgtacagaaaatgggtttggcattgtccggtccgaatggattgaatttcttcaagtcgctgaagaatttcggagtgatgtctctgaaatcaatctcggcattgatgtcgatgacggcgcatgtctgttccggcaggatattttgtgatacgaactcttcgaagcgttcgataaaggccggtacattttccaccttcatggaaagaccggcggcgtaggtatgacctccgaagttttccagaaggtcgcggcagtattcaatggctttgtagacatcgaatccggagacggaacgggcagatccggttgccatgtcatccgtacgtgtcagtactactgccggccggtaatagatttccgtcagccgggaggctacgatgccgatgacgcctttatgccagtcttcattgtacaatacgatggaacgtcggtcggcaagtccgtccaggtcagctacaatcttgttggcctcctcggtcatggtcttgtccaagtccttgcgtgtctcgttgtattggttgatttgtccggctttctccagggcaagagagaaatctttttcagtaagcaagtcaacagcttctttcccgttctggatacgtccggaggcgttgatgcggggacctattttgaatacaatgtcactgacggtgatgtccttgtccgtcagtccgcagacatcaatgattgctttcaggcctacgctgggattactgttcaactgcttcaaaccgtggtaggcgagaatgcggttttcacccataatggggacaatatccgatgcgatactgacggcgcagaggtccagtaaagggataaggtgatggaactcgataccgttgttgagggcaaatgcctgcatgaacttaaagcctacaccgcatccggacagatgttcataaggataggtgttgtcttcccgtttggcattcagaatggctacagcagggggcagtacatcatcggggacatgatggtcgcagatgatgaaatcaatgcctttctccttggcgtatgtgatttcttcgacggctttgataccgcagtccaatacaataatcaaacctacaccactctctgcggcatagtctactccttggattgaaactccatacccctcattgtaacggtcggggatatagtagtcgatgttcgaatagaactgttgaataaacttgtagaccaatgccacagccgtggtaccgtctacgtcataatctccataaacaagaatgcgctctttctttcccattgccttgttcaggcgctctacggctatatccatatccttcatcaggaatgggtcgtataagtccggtagttgggggcggaaaaacttccgggcatccgctgccgttgttattccccgctccaccagcaattttcccaatattgggctaattcccaattcttgggccagttgttggcttgcttctgcctgttcgggtgtaatgggttgataattccatttgtgagtcattttatatattattttttctttttctatctcaagatgttggggaagtagaggggggcaatacgtgcacttttctccaacaaggtgtaaaggtatgaaaaactcttgaaacggaggtgaattctgcggaaaaactttataagtatatgtattctccactaaaaaactttatttttgtatccattaaaaaatatcgctatgcttgtttttatctcttgtgcaaagaccatggcagcgcgctgctctgttgtcgtgcccgaagtcacagtcccgaaattcgaaacggaggctgtgcggaatgcgttggaaatgtcgcagtattcagtatccgaattggaaaggcttcttcgggtgaataccaaaattgctgccgagaaccgtttgcgttttcatgatttctgttcggaggagaatcgttcgatgccagccgtttgcgcctacacgggagctgtttttaaacgcattcttccgaaagatttttcagcggaggattttcgttatgcgcaagaacatctacgtatcacttcttttctttatgggttgcttcgcccgctggacggtatcaaaccctatcgtttggaaggagatgtccgtttgcccgaaaaaggtggaatatccatgtttgattattggaagcctttgttgacggattacttcatagaggaaattaaaaactgtggcggtgttctcattaatttggcaagtgctgaaatgaaagatttgttcgactggaagcgggtggagcaagaggtgcgtgttattacgcccgagtttcaagtttggaaggccggacagccgaagactgtcgttatctatgccaagatgtgtcgcggagagatgacgcgttttattgtcaagaaccgtctggagtgtcctgaggagttgaaatccttttcttgggagggcttcgtctgggatgagatacgcagtacggagaatgtatggcatttttcgttaggtacatttatgtaatgaaaaggtacattacgtttggctcagatgttactatatgttgctttcgatgtttgcgcaaaatgaagaactaaatacgcaatttaggatgagggaaaagaatgaactctctacatttgcatgcagtaaacttaaaagcaatatactatgaagagaaacggattaagaacagttgttgtattagctttgaccatatttctattgaatgctccggtttgtgctacagcttccagattgcaggatacttgtgcggaggcgcgggatgaggttgcactgcggcctgagtggatgaggattctccatgatacgcttcctatatgtaagatttctattcctggttcacacgatagcggtagtatcaaaggagggcatatgttgaaaacacaagcaacagatattcctgctcaattacggcaaggcatccgtgctttcgatatccgtttggaaaagaagggtaataaactgggggtgtttcacagtcatgcctttcaggatatatattgggaagatgatgttttacctgcttttatacactttctgcaaacatatccttctgagactttgattgtttccttgaaaaaggaagggggagaattgcgggattatgcttctctgctgtccgtttctttaagcagccctgagtatcaaagttatttcgtgatggactttcgccctgaactgacgctgaaagattgccgtggaaagattcttttcctgcatagggatcatgctatggataattatcctggagcagcatgtgtaggttgggaggatgacagtacttgcctgctcactcttcgcaataaagatggtaaggaaggagtggctttgctcgaagataaatatcaatatgaatcgggtgaggaggccgggaagaaggtaggggtttgtgtccgtaatattgaagggatgtctgctgagccggtttcctcacgtcggtggggaattacttttgtaagtgcgacggggctgcccttgggaacccctaaagtctttgctgataaggtaaacaagcctattgctgactatttaaaacaaaagaatagccggaattgcggtattgtttttatcgattttgtcagtgaacctggaggaaaagatttggtggaatatttgattgacagtaatgtttgcgcaaaatgaagatttatatgcgcaattgggaatactgaaaaaaaaacattttcttaattttgcacatgttgaacaccttaatgttatatactatgaaactgtcaatagatttaggaggaaccaatattcgaatagcccaagtggaaaaagggaactgcttgaataaagtgtcggttccatgtttagctcagcaagatgcttctactgtgctaaaccagctttcccagcttattcggaatatgatgaatgagcaggtagatggtatcggtatcggtgtcccttcaattgttgatccggagaaaggaattgtatataatgtagcaaatatatcttcttggaaagaaatacacttgaaggagattttggagaacgaattcaaggtggcagttgccattaataatgattccaactgtttcactttgggggagagcctatacggcgaaggaaaatcttataccaacatggtaggcgttactattgggaccggaattggagctggcgttgtcattggccgtcgtttgtatggtgggcaatatatgggagccggtgagataggctcatttccttatttggactctgattttgaacactattgcagtagtttcttgtttaaacgttatggcactaccggtgcggtagtagctgaaaaagcccagcaaggagaacaagctgcattggagatttggaaagagtttgggaggcatttgggtaatcttataaaggcaattctttttgcctatgctccccaggctattgttttaggaggcggtattgtatcggcttttcctttctttaaaaatgctatggaacaaacaatgcaaagttttccctacaagattatatcggataatgtgagtgtggtggcttcgcatcaaaaggattccagtttattgggtgctgccgctcttcttgagtaataatccctatacggtttgattgaaaataataaatattttgcagttatattattttacgcataaataaggactgttagagaattgttccttttgtaataactatgtaattctgctttctgacctttgtggcggaattataattttctatattataaactttaaattttgaatgcatgaaacaagtaaatcttagaatctatcgaacgattctgaccctattgttgggactgttcttgtcggcaggtgcttatgcacagcagatttctgtgaaaggaacagtaaaggatcagactggcgaacctgtgattggtgccaatgtgttagtaaaggggacgactaatggagtgattacggacgttgacggaaactttaatgtttcggccgataaaaacggcgtattggtaatcagttttgtcggctatgtgactcaggaagtaccagtggcagaaaaacaaatggtaattgtgcttaaagaggatacagaacttctggatgaggttgttgtattagggtatggtgcgaatacacgtaagcaggacttgtctgcttcagtgggtgtagtaagtaatactgaagaattggctgctcgcccggtaacttctaccgaaggcatgctgcagggacagctggcaggtgttaccattacggccgatggtggcgacccaacttcttctcctaacattgtgattcgtggtcaaggctcacaagatggagacaatgtactttgggttgtggacggtgttcccggtgcacctatctcatccatgaatgatattgaaagtatcgttgttttgaaggatgctgcttctgctgctatctatggcgcacagtctggtgcaggtggtgttgtgttggtaactaccaaaaaagcgaaacaaggtgctccttcgttgacttatgacggcacttttggtattcgtcaggctaccaatttgatagaaccactgaatgcggagcagcagattgagatgcgtaagatatctcatcaaaatgcaggactttcgcttccagtcggttgggatgttaccaaaaatccatggataggtacgactcgtactgattggatggatgagattttccgcactgccttctaccaacgtcataacgtagcgttgaatgtaggttctgataatttttcaaatcgtatatcttttgcttacgataatgatgaaggtgttttgattaatactttcaagaagaatcttacattacgttataatggtaaaatgcagctgaacaagtgggtgagcgtcagtgaggattttgtatggcagaacactacccaacgttccaaagctacggataacgatgcttatacaggacctatcctttcggctatctacatgccggcaagtgccactgtctataatccgttggacggaagttatggtggtgtgactacggaagatcctgcctatattgaaaaatatggttcgaatttctctgatatccacggggatgctgtaaatccggtacgtctattggaagcagagaatttgtatgacaagataagtgacatatggagcactaccagcttggagatagctaatgtacttcctggattgaagtttacgagtcgttttacttataatatgaagactaatcattacaagaagttcaatcctattcgtgatgaagtaggtaaaccggctttgtcgaataatcttcaagaaactacttaccgtagagatgcttggaagacggaaaataccctgacttatgataagacattcggtgaacatacggttggtgccttgttctcgactacggcagatcattctgaaacgcgtggactggaagtgacgggtaaggattttgcggatgaatcggaatttttacaatacatggcgtatgcaggatcagtgacagcatctgactatttgactggacctgatgccaatgtgtcgttgattgcccgtttggcttattcttataatgaccgttattttgctactgcatcttggcgtcgtgattatgctggacgtttgcctaaggaaaataactatggtgatttccctgcagtgacccttggatggaaaatatctaatgaaaaattctttaagaagagtgattttatcagtttgctgaaattgcgtgcttcttgggggcgtgtaggtaatttgagctctatagggcttaattataagtctgctttgttgaagaaaagctcgtggacagaacaagcacaatatggtcctgaggcaaataatatctggaatactttgatttacaacggctctgcgttaaatcctgatttgacctgggaaacttcagaacagactgacttgggcttggatgttgagatgtttaaaaaccgtttgtcggtatcattagactattttgataaacgtactttcaatttgattcagacacaatcaatggggtggccttctactatgggactcgatgccatgttaatcaatcaaggtgaagtgcgtaaccgtggctttgagattcaagctaattggagcgataagattaacaaaaacctttcttatttcgtatcgggtaacttctcgtatttaaagaactgggtatcagatataggtgtgaaggatgcggatggcaatccgggtttgtggcctaatgataaaaggttccgtagcatcccttatatgatgcagagtacggaaggggaacctctgaattccttctacttgattaagacagatggtttgttccaaagtgatgcagaagttgccgagtggaatgctaaacatggaacatatgtgaccaatgataatggtgaaaaagagtgggtaggtattcagccgaatgccaaggctggtgacttgaagtttgtggatcataatggcgatggtaaaattacggatgcagaccgtcagtatatgggtagtgcgactccgaagacgacttttgcctttacattgggaatgacgtggaaaaaactttctttcagtgccatgttccagggagtaggtggagcaaaagctttatatgtaggaaagtacatgctgttgagtgatgtagaaggaaactttaaccgttccagcgagatattgaatgcttggagtcctacaaataccggttctgatattcctcgtttgtcaaagaatgacccgaatggaaactttacgactgcatctgattggtatttggagaatgcttcttatctgcgtttgaagaatgtaaccctttcttatgatttaagcgatgtattccgcaagtggtctcatttgaatgaccgtaacagccgtttgtctgtgtacttcagtggtgaaaatcttgctactatcactggatattctggtatggatcctgaatgtggtggctgggatgctttgaaatatccggtatctcgcgtattatctgttggtgtaaaattgacttactaataattaatagagaagaatgattatgaaaaaaaatatattattttttgcgatgtctgccacattgcttatgagttcttgcagtgacttccttgatgtgcaaccagagggagatgctactacaacgacttattttaccaatgacctgcaggctattgatgctgtagatgcattgtatgaaagatttcatcaggaagctgtatatggacgcgaactgttttgggaacaaggtgccgcgtgcgacgttgtgtggggaaagacccgtgattttccaacacttgctacattgaaatatacaggagacgaatcccctttgcgtactatttttgatactatgtacaaagtgatggcacgttccaactgggtaatacaagagttgcttaagaaagggaaaagcaccactttgagtgatattgaaaagagaagtctcggtgaagcttacttcactcgtggatgggctcatttcttgattgcttatcgttacggtcttgatacacaaggggtaccttttgtccgttatgaagattttgaaggtggctatgacaattctattcctcctcagcaagcttcggtcatcgataattataaattgattatctcggatatggacaaggcaatagagtatttgccccgttttgaagagtatggagataatgatagaggacgcgcgcacgatgcggctgcagtagcttttaaagctaaagtttatgcttattgggcaacttgggatgctacacaatggggaaatgtaatcagtatggtcaatgaactggaaactgcttacggacgtgatttagccggtacttatgaagagttgttctcttctgatttctctaaatggtggaataaagagtatatttggactattcctggaaatggtggctctcaaggtggcggttcggagtttccgggagttgtccttgagaacaaaggctggggacaatataatggctggggacagaacaagccgtcttatgatatttacgaagagatgttgaaagacggagctggtaatgaccgtttggttcgtacggttttagagtatggtcaggaatttcaattcttgggtgaatcccgtgctttttattcaagctcggatattgaatccggttttatgattaataaatacatggatccctttaagtatgaagatgcagccaataaggggtatatcaatacaaacggagactggccgacggtacgtattaatttcccggttatccgttttgcagaaatgttacttttccgtgcggaagcttatttgatgactaataaagcggacttggctacggctgatttgaatcgcattcgtaaacgtgccaatgttgcattattgacgggcactgctactatggctgacctatatcatgaacgccgttgtgaattggcatttgagtttacagaccatttatatgatttgaaacgctggtatcgctcaggcaatactgaaataaaggctttggctgctgccgaattgaatgcccgtccgcgcgtacgtcattatgccaaccgccaggaccctgcttccacattcgttgtaggtgagtatgaggattatacggataagattgcttatcaggattacatgatcgtattcccttatccttcggttcagattaccaaatctgatggtaagttaaaacagaatcctcattatgattgatattttctctgaaagagataaaatataaaaaaagacctcattgccattggtctaatctgcaggggttggtattttcgggtattgatccttgcagatatttcttctttttctttcatttgcaaaggctattcataaaatcattttaatatacggagagacggcattcccgacagtctgcagcgctcttcaaatatacagtctgatgaaattaaaaactcttatatgtgcaactactgccttttgggcttgctgctcttgtacatccggtgaactatctcccgtagactatgtagacccttttataggtaccggctttcatgggcatacttatccgggggcaaccgttccgttcggggcggtacagttaagtcctgacacgcgtgccggaaactgggatgcttgttcggggtatcattataatgatacgactctaaaaggtttttcacacacacatttaagtgggaccggatgcattgatcttggggatatactgtttcgtcctactacgctgaaaccggatttgactacggaaagcatttaccagccagcggctttttcccataaagacgaagatgcttctgccggatattattcggttgttctgaaagaagaaggaataaaagctgaattgacggtaacggcacacgccggtatgcaccgctatacgtttccttccggcaaagaagcatctattattatagatttgactcatttgcttgataacgaatatatttatgaggctgaacttgaacagactgccgccaacgaaataacaggtatgcgcagaaccaggggatggacggacaatcagtacgtttattttgtagcccagttctcgaaaccttttcaggccatagactttatacagaataaaaagatggtttctgcaggagttaagttgaacggtaccgatttgcaggcttgcttgtccttcgataatagtaatggagagccggttatagccaaagttggattatccattgtcagtgaaaagaatgcacgtgagaatttggaaaccgaggtgataggtttcgattttgatgccgtgcgtagtgctgcccgttccgcttgggaacaagctctctctgctattacggtaaaaggcggcaatacggacgacttgaagaatttctatacagccatgtatcattctatggttgtacccaatgtcgtgagtgatgtcaatggtgagtaccgccgtcataatatggaaattgggcaattgccaaaaggcaaagtgcaatattctacattttcgctttgggatactttccgtgcatggaatccgttgatgactttgattgatacaactttggtcaataatatgataaattcctttctggacatttacgaatcttcgggtgaacttcctatctggccgctttctgccggagagacgggaactatgattggttatcatgcagtgtccgttatagcagatgcttatatgaagggtattagaggatttgacgcggaaaaggcgttggaagctatggtagtttcttctgaaaagaacaaaaagggagctgattactatattcagaatggctttattccttctaatataaagaaagagtccatctcttgtttgctggagtttgcctatgatgactggtgtattgcacgtatggctcaggaaatgggtaaggatgatatttatcaaaagtatattcaacgttcccagaactatatcaatgtttttgatggtaatacaaaattcttccgccccaagcggatggatgggaactgggaaactcccttcaatcctattgaggtcggtcgtgcctatacggaagccacagcctggcagtatcgcttctttgtacctcacgatgtaagcggtatggcacaactgtttggtggtaagaaagagtttattaccgcactcgattctatctttacagtagagtcggatgtacatggcgatttagtggatattaccggactgataggtcaatatgttcatggcaatgagccgagccatcatatcgcctatctgtacgattacgtcggacagccttggaagacgcaggaaatgacacgccgtctgctccatgaaatgtacgctcctacgcctgaaggaatcattggtaatgaagattgtggacagatgtccggttggtatatattatccagcttgggtatttattcagtttgtccgggaagcaatgaatttgcactgactactcctctatttgagaaagcggttgtcaacctggcaaatagaaagactttgaccatccttgccaacaatccgaagaagaatgtctatatcacaaaagtagaattgaacggacaaccgatagatgtaaattttattacttatgcacagttgatggaaggtggagaacttcgttttactttgtccgataagccgaatatggagagaggtgtttcctctgaagcatccccttattcctatactaaagatgaagtcgtttccattccctatgtggataaggatttgaacttgtttatggataaggtaacggttgcattggccacaacaaccaaggatgccgaaatcagatatacattggatggcagcgagcccacagagcagtcggcattgtacgagcagccttttgaactggacaagaccactttaataaaagccaaaggattcaaggaaggtctccgctcaagcagaacattatccatatcggcaacgaaagctgaattaaaggctgctctttctgtaaatcctactcagaatggtacatcttataagtactttgaaggcacttaccagaaagtggctgatgtagaaaagtcaccgttgctggagtctggtgtcatgcccgaaccttctattaagggtgctaagcaggaggatcatttcggttatatcttttctggattgataaatgttcccgaagatggggtctatactttccagacccgttcggacgatggcagtgtcttgtacattcacgatgagcaggtagtcaataatgatgcttcccatgctgcaattcctgctaccggaatggtcgcgctgaagaaaggttttcatccttacaagctctattactttgaagattatgaaggtgagtatttgagctgggcttggaaactgccttctgccgagaagttggcacccatccctgcatcggctttatttgtgaaataatagtttaatatatatgctatgagaaagttatttttgttatttttacctttgttcgctgcatcatgcggacaggtgaagcagcaggcacctgcaccagagcccgttaatgtcatgagtttcaatattcgctatgacaatccggaagatagcttggacaactggcaataccgtaaagaccgcgcggcaaatgccatccgtttttatgatgtggatatattgggtacgcaagaagtacttcataatcagttggaagaccttaaacaacgattgccggaatacggagtcatcggtgtaggtcgtgaagatggaaaggaaaagggtgaatatagtgcactctggtataagaaagatcgtttcaacttgctggattctggctatttctggttgagcgagactcctgaagttgccggttccaagggctgggatggagcttgtgagcgtattgcttcatgggcaaaactgcaagataaagtaagtggcaaggagttcttcgcattgaatacccacttggatcatgtaggtgttgctgcacgtcgtgaaggtataagccttatgctggataaagtaaatgagttgagtggtaacttacccgtagtagtaacgggcgactttaatgctagtccggaatcggatgtcatcaaacacgtgactgacccttccaatccggaacacttgacagatgcacgccaggcatcggcaattgtttatggtccggcatggagtttccatgatttcggaaagattccttacgataaacgtccgctgattgattacgtttttgtacgtaatggactgaaagttttgaggtatggtgtattggctgaaacagagaataatgctttcctctccgaccatgcccctattttagtaacggttgaataataaaacaataattatgactaagatattaagaatatgtatcgttatgctcttggcagtcttgctactgccggtagagttatcggcacaaagccgccgtgataaagagcagacctatgttttggaccaaccttatgaggtgacaaagattacccctccccagggcaagaagataaagaatgtcatcttgatgattggtgatggcatgagtcttatgcacgtatattctgcctggacagccaatcgaggcaagttgtttttggataactgccaggtagtgggtttgtctaaaacctattgtgccaacaagctgattacagactcgggagcgggtggaacagccatagctacggggcagaagacaaactatcattctgtgggtgtagataccgaaggacgtcctttgaaatcattggtagacctggctgctgctaaaggtaaatcgaccggtatagcggtgacttgccgtctgtgggatgccactcctgctgatttttgttgccataacaaggatagggatgcggaagctgaaatcgtagcagattacgttaattgcagtgccgattatgtattcggtggaggtgccaagcttttcgaaaaccgtgaagatggacgtgacttgtttaaggaactacgcgataaaggatttcagactcctcgcagttgggatgaattggctggcataaagagtggtaaggtatttgccgtaccttatcccgtcgatactcctcttcctgctgaacgtggcgaccttttggcacgtgcttcattgaaaggtatcgaattgctgaaccaaaataaaaacggtttctttatgatgatagaaggttcgcagctggatgactacggacacttcaatgacattgatttgctgatgcaggaaacacatgactttgaccgtaccgttggtgctatttatgagtgggctgccaaggatggagagacattagttgtagttaccgcagaccatgaaaccggtggacttacgctggtggacggtgacctggcagaaggcaaaatcgtatgtaaattttcaacaggaggtcatagcggtgtaatggtgccggtatatgctttcggtcccggtgcagaggagtttaccggaatctttgagaatactgctatctttgataagataaagaaattgcttaatttgtaaatctataaatacctatttcccatgttgaaacacattttattggtaggcttgctttctttctccgccctccctttactgaaagctcaaagctgtggcaatgatgagaagtatcatctgccttacaagaatacatatgtaaaggaaccgttggtcactgaaaacgaatatcgtgtggcaaaacctgagacgattgtgccgaaaagcttcgaagaagcccggcagattcttcccaatcccatttggggtggacatgacaaggaacttgaaatgtattggaaggcatgggaaatagctatcggtaatattcgtgctcctcaagcaggctcgggttttgtctcaagctatttggatacagcttataatggtaatatctttatgtgggattcctctttcattctgatgtttgcccgctatggtacccgtttctttcctttccaaaatacgctgaacaacttttacgccaagcagcatcccgacggtttcatttgccgtgaaataaaggcggatggtgccgattgctttgaacgctatgatccagtcagtaccggaccgaatttgatgccttggtgtgagatggtctatttccatcagtttggtgatacggaacgcctgcacaagatatttccggtactttgtgcttattataagtggttgaaattgaaccatacttggagaaatggaacctactggtcaagcggatggggaaccggcatggataatatgccccgtgttccgtcagaatacagccctatctacagtcacgggcatatgatttggttggatacaaacctacagcaattatttactgccaatttactacttgagatgggcttttatctggaacgttggcaagagatagaagagtttgaagacgaagccaaaatgctgggaaaatatatccatgacaatctttgggatgaaaagaccggtttcctttatgaccagtatgctgacggtacgctctgtacaaccaagggaataggtgcctattgggctctgtttactgatgtattggattctgtacagttggaccgcatggtgaaggaattggataatcctgccacattcaaccggaaacaccgtattccttctttgtctgccgataatcccaagtacaaggagaatggccgttattggcagggtggcgtatggccgggaactaattacatggtgatgcagggccttgtgcagaaaggttatggtaaactggcacgggagatttgtttgaatcattatgcccaggtgtttgaggtctataagaagactggaactttttgggaatattatgctccggaaagtgctgagccgggatttatggcaagggataattttgtgggttgggcaggacttcctcctattgctgaattgatagaatttattatcggtattcggggagattatgccaaaaagcagattatctgggatatgaatttgacggagattaacggcatagaacgctatccttttggtcccgaagggcttatctccttaaaagctgaagcacgccgttctgcaagtgatgaaccccgtatcacagtagattctaatattgattttgaactgtgtgtactctatggtggaaaagagaaaaagataaatgtgacatccggtaagcatacctattaaagaagaaatcaatcatgaaaaacaatatgtcaagacgccaatttctgaagactggcgggcttgccttggctgcaatgacctttcagcccgcttccgtattatcttcatccgggactttcagccagagatatgtttcgttgcgtccttctgcaagcaaaaggagcttcatttcgaaggcagtagatgctgctattgaagaagcaaagcctaaaataaaggacgagaagttgcgttggatgttcgagaactgttttcccaatacgcttgacactactgtcagatatagagtgaagaatggcagaccagatactttcgtcattacaggtgatatagatgccatgtggctgcgcgactcttcagcgcaagtatggccctatctgccgttgatgaagaaagataaggacttgcagttgatggtggcaggacttgtcaatagacagactgaatgtatcttgatagacccgtatgccaatgccttcaacgacgggccgttgggcagctattgggaaaccgaccatacacaacatatggttaaggaactgcatgaacgcaaatgggagatagattctttgtgctatcccattcgtctggcttatcattattggcaatacacggaagacacgtctgtgttcgatgaaaattggcataaagctatgctgctggtggtcaagacctttaaagagcaacagaggaaacaaggcttaggaccttatagctttacacgcgattgcgaccgccctacagattcgcagattaacaacggatggggagcaccggtaaagccggtcggcttaatcgtttcttctttccgtccgtcagatgatgctacacaatacggttttctgattccttctaatatgtttgcggttgtgtcattgcgccaattggctgagatagaggataaagtttatggaaacaaggacttctccggagaatgtataacattggcagatgaagtggatgtagctatccgtaggtatggtactttcaatcatccggtttgtggacgtatttatgcctttgaggtcgacggttttggtaacgcgctttgtatggacgatgccaatgtacccagtttgctggctgcgccttatctgggttattgttcttttaaagatgcgatttatcagaatacccgtaaaatgatatggagcggcaataatccttatttctttaaaggaaaagccggtgaaggggtaggaggccctcatgtgggattgaattatatctggccgatgagcatcattatgaaggcttttacaacggatgattccgaagaaatacgtgcttgtctgaagcaacttcgtgatacggatggagggacgggctttatgcatgagtctttccattcggaggatgccgcggactttactcgttcctggtttgcctggacaaatactttgttcggtgaactgatactgaatacaatcaaggaatatcccaacttattatcccaaatactatgaagataagatattggttactggctatgtcattcatttttctctcttgtgggagagtggctgatgatgtagcgacaaactatggtattatacccatgccgaatgaacttgctccaatgcagggagtgtatgtcctgcaaggggaaaaaacagtggctgtcccttccggggaagccgcgatgaaagtttttcattatttggaggatgcgttgaaaaacacttctgtaacgctgaagggtatctcggaaacgggaaaggccgatatttgcttatccatagataattccttgcccgatgaggcctatacattggaggtttcttccgataggataaatatatcttctaatgaaactgccgcaggatttttttatggtgtccagtctttgctgcaactcatgccggcagccatttatgatggtgaccggaaatacgaggaaaagattaggattcctgctgtcagcattacggatgctccccgttttcctcatcgtggggctatgatggatgtaggacgtaattttctgccaaaagaggaagtgctgaagtttcttgatttgatggcattctataaattgaataaattccattttcatctgacagatgaccaaggatggagaatagaaataaagaaatacccgaaactgactgaaataggttcttatcgtaaacagactcagataggacactctgattattattttccacggcgttacgatggaaaagaaaagagaggctattatacgcaggaagaaataaaggaaattgtgaagtatgcatccgaccgtttcattacggtcattcccgaaattgaaatgccgggacatgcatccgcagcactggcttcctatccggaactttcttgcggactgggaaagacttatgtggtgcgtgattattttgatgtttttgatgaggtctattgtcccaaagagcatacatttgaattcttacaaaatgtgctgaccgaagttatggaactcttccccggccattatatccacattggtggagatgagtgtcccaagaaagcatggaagaagtgtgcccattgccagcatttgatgaagcgggaaggtctgcccaacgaagaagctctgcaaagttggtttatccatcggattgagcaatttgtgaacagtaaagggcgtgacatcatcgggtgggatgagattctggaaggagggcttgcccctaatgctacagtcatgtcatggcgtggcgagaaaggaggtatcgaggcggctcaccaacggcataaagtcattatgacacccggcaaaaagtgttatttggattactaccaggaaagtccggaattcgctccgttggctatcggcggtttccttccattggatacggtgtacaattataatccgcttcctgcagaactgactccggaagaacaagcttatataataggtgtacaagccaatatctggggagagtacatacagactcccgagtattttgaatatatggctttcccccgtttgctggctatgtcagaggtgcaatggacactgccggaacataaggacttcgagtcgtttacccgtaggctggataaggagtttgaacgattggattattgcggagtgaatgcttgccgcaacttctatgaagtcaatcaggctggtgcgtggaacaagtcgcagcagacttatgaggtgactttgaacaccttctgtccggatgccgatatttactatgcggtaaatgattcaacggtcaacacttcatcttccctttatgagactccgataccgttggacgaggatgcaactatttattcggcagtttacagaagcggtaagccgctagggaaagtgacccgcaagagttttgctgtaaacaaggcaaccggatgtgactatacttgtaatcctgaagcaggatgggaacacttgaataaaggcttcgggctgactgatggacgacgtggctatgcccgcgacatgcgtcgctggattagcttctaccaggatactgtacagattgtagtggaactgaagaaacctcaaaaagtcaaggaagtggccttttcttctttatggcggccggtaaatgagatatggccggcaagggcgatgagtgtttctgtttcaatggatggtcagacttttattccggtgggcactaaacggctgacttatgattttagcttgacggaaggcacccgttttccggcatctctttcatttgccgaaacggaagctacatttgtccgcttggaattattgagtggtggcttgtgcccgaaaggatattttcatgaagggttgcagagtgagttggcaatagatgaaatagaaatatattaatctcaagaaattatgaagaaaatagttgttcttttagttgtactgttgggctgtatgccggtaacggcttttgcgcagaagcaattcttttttaaggatggcaggtttgtagtagcacagtttacagatttgcactggatgccgggttctgcaaagtgtgccgaaacggcagctactatccgtgctgtcctggcagccgaacatccggacattgctatactgagtggggatgtggtgaccgatgaccctgctatggatggatggaaaagtgtagtggatattttcaatgaagccaagatgccttttgtggtgatgatgggaaaccatgatgcagaatacttgacgcgcaatgaaatctatgatttcctcttgaagtctccctactatgtgggggcaaaaggccctgaagatattatgggatgtggtaattgtgtgatttctatttatagtccggagaagaaggaccaggtagaggcattgctctattgcatggattccaacgactatcagcctaataaaatctatggtgcttacgactggattcatttcgaccaaatagaatggtacagaaagcaaagtaaacactttgcagagaagaacggtggtaatcccgttcctgctttggcctttttccatattccgctgattgaatacaacgaaatcagaggtgacgggaaaacttatggcaatgacaaagaaggtggagttgcctctgctaatatcaattctggtatgtttgcttccttccttgacatgagggatgtaatgggagtatttgtaggacatgaccatgataacgattttataggaatagataaaggtattgcattgggatacggacgggtgaccggtgcggatgcgtatggagagttgacgagaggagcccgtatcattgaactgtacgaagaccaattcaaatttgacacatggatttccactccttcgggaagggaggctgcctactattacccttcaggtctgaattcggatgaggagcagagtatggcttatttgccggctacgggaacttctcccaagaagcagggcgtggcatatacctattatgaaggcaaatgtaaacgtgttgccgatattgccgcctgcaataaagtgaaggaaggggtgatgaagaacttctcgattgaagaagtagccgtccctgatcattttgcttatgatttccgtacgttggtgaaaattccagaaaggggagtataccgtttctatactttttccgatgatggttctaaactatacatagacggtaaattgattgttgataacgacggtggacacagcggacgccgtgccgaagggaaagtcgctctcgaagcagggtaccacgagttgcatctgctgtatttcgaagattacatgggccaggaattggaagtcgggtattcgggacggaatgttctggaaaccgtgttacctgataccatgttgtttgtaccggattaaatcagcgctggtaactctttgtctggtactctttccgatattcattgggagagactttcttcaaagctttgaattggcgggacaagttcttcagattgtttattccgacttgttccgccacatctgcaatcggagcatcactggccaacagcaattgggcaaaacgttccatcctaaggttgaagatgtatttgtggatggattgctgagtgacttgcttgaaacgaatctccaataaacggcgtgataatggtacttgtttcactatatccgatacggtgatatcagccgctatattctgatggatatatttcagagcggtttggatatgggcatcggtggtagaatagaagtcggttgaaagccggttgattatattaactggttggagcactacgtcctgataagtggcctcctcatcattcaatagatgttctatgagggcagctgcctcaaatccgcctcttacaatgttttggctgatactggataggggagggtctgaaagattgcatataatctcatcattgtcgactcctaatattgctatcttgtcgggcactctgatgttgttgactttacagatttccgtaatgcggttaccttgattgtcatcgcaagccatgagtgccgtaggttgtggcaatgactttaaccagttgagcaggggcggtgcttcataaaaccataagtcatcaagggattggtcctgataagaatagaaattgtttccaaacccttgggctgctatacattcatagaaaccctcgcaacgttcttgtgaccataccgtatcgcgataaccatagaatgcgaagttctgaaagcctttactcagaaaaaactctgctgccattctgccggtcttgcggtaatcgccggtgatgtttggaatattgctgaaccttgatttataatcctgggccaatgcgataattccgttttcacggaatagctccacgttgtcatcattgtcaaatctgccgatgattgcatctgcatgccatgtctttgcccatttcaagactccttctataccatgactgtttttgtaggagggtggcatacggcatactacccatggctcatggcttttggaataggccaataccccctttagcagattgtacgaaaaggactctgtaaaatcggtcaataatatcaatcgaatcatagcagttgactaaatgtaactgattgttacttatacaaatgttagcttaattgacaaatataggattttatttctttttcttcaaatcttttccctcatatttgcagattgcttcaatccatttttcttccagtggcttggactcgtgtttggcgaggtcgaaggctaccatgacggaggtacatacgcattttacttcttgggtttccgtatcaatgacccgttgggcgaggtggaagcttttggttcctatctcagtgacggcagtttgcacggcgatatggtccgaaccataaatctgtgcgaggaagtttgcttcaatatggacgacaacgataccatccttttcccaatctacatccgggcatacggaagcgaaatattccgtttttcctaaatcataaaaagagaagtaaacagtgttgtttacatggccgaatttgtcgacgtcattgaagcgtagttgtatgggcagggtgtggttaaattgaatttcttccattgttttctcttaaactttgtttataatcgctgcaaaaatactatttttgcgtgttaatccgtgaacttatatatcaagaaatgatagaagacatcaaaaaagcctgccaggtaatgagcgagggcggggtaattctgtatccgacagatacgatttggggtataggttgtgacgctaccaatgaagaagcggtgcgccgtgtatatgaaatcaagcaacgctctgacagtaaggcgatgctggtattggtagattctccggtaaaggtggatttctatgtgcaggatgttccggaggttgcctgggatttgatagaactggctgacaagccccttaccataatttattccggagcgcgtaatctggctcctaacttgcttgccgaagatggtagtgtaggtatccgtgtcaccagtgaggcattttcaaaacggctttgtcagcagttccgcaaggcgatagtctctacttctgccaatgtcagcgggcaaccgtctcccggtaacttcagtgaaataagtgaagacatcaagtctgcggtggattatatagtaggataccgccaggaggaaacgggacgcccgaaaccgtccagtatcatcaagttgggcaagggcggagtcattaagattattcgcgaataaaaggaaaaatggcagaggacaagaggagtttgttgcagcgcttcatcatatggcgcgaaaagaatatcaaggaaaagcggttcatactgattctcagttttcttgtaggtatctttacggcattcgccgcactgatactgaaagtcatcatacactggatacagaacttcctgacggataatttcaatgcgacggaagccaactacctttatctggtctatccggtagtgggtatcttcctgaccggattgtttgtccgctacgtggtgaaggacgacatcagtcatggtgttaccaaaatcctatacgccatctcgcggcggcagggacgcatcaaacggcataacacttggtcgtccatcatagccagttccattaccatcggtttcggtggttcggtcggggcagaggcgcctattgtgctgacgggttcggctatcggttccaatctgggaaccatcttcaagatggagcatcgtacgctgatgctattggtgggatgtggtgctgccggtgcggttgcaggcattttcaaggcgccgattgccggtctggtatttacgctggaggtactgatgatagatttgacaatgtcctccttgttgccgttgctgatatctgcggtgacggctgcaactgtttcctatatcgtgacgggtacggatgccatgttcaaattccatctggaccaagctttcgaactggagcgtattccgtatgtcattatgctgggtatcttctgcggattggtttccctttattttacccgggccatgaactctgtggaaggcgtgttcggaaggttgagaactccctataagaaactgataatgggcggtgccatgctgagtatcctgatattccttttcccaccgttgtatggcgaaggttacgatacgatagaattgttgctgaatgggatgagcaatgccgaatgggacacggtgatgaataattccttcttctacgggcacggcaatctgttgctgatatacctcatactgattattctgttcaaggtttttgcctcgagtgccacgaatggcgggggcggttgcggcggtatcttcgcaccttcgttgtatctgggttgtattgccggttttgtcttttcacatttcagcaatgaaatagagatgacggcttatctgcccgagaagaactttgccttgatgggaatggcgggggtcatgagtggggtcatgcacgctccgctgaccggcgtgttcctcatagccgagcttacgggaggatacgacctgtttctgccactgatgattgtttccgtcagttcctatcttaccatcatcatgttcgagcctcatagtatctattccatgcgtttggccaagaaaggagaactgttgacgcaccataaggacaaggccatccttactttgatgaagatggagaatgtggtggaaaaggattttgtgaccgtgcatcccgaaatggatttgggcgaactggtaaaggccatttctgcctcgcatcgcaatgtctttcccgtgacggataaggaaggggtgctgattggcattgtcttgttggacgatatccggaacattatgttccgccaggagttatatcatcgcttcacggtgggaaaactgatgacttcggctccggcacgtctgtatgatacggacagtatggagcaggtgatgcgcacctttgatgatacgaaggcgtggaatctgccggtggtggatgcggaaaacaaatacttgggcttcgtgtccaagtcgaagatattcaactcgtaccgtgaagtattggtacatttttcagaagactgaggactttttggtatttactattttactatttacaagttactatttgccgttcggggtgatggggcattgtaaatcgcaaagaagatgcttcgtacattgtaaatggtaaattgtaaatgggcaaatgagttgcctcgcaaatggtacattgtaaatggtaaattgtaaatgaaatggtggaaaagaagaatttgaggattgtatatatgggtactcccgactttgcggtggaggctcttcgttgtctggtagaaggaggttacaatgtggtgggtgtcattacgatgcccgacaagcctgccggacggggacataagctccaattctctccggtgaaacagtatgcactggaacataatcttccgcttcttcagccggagaagctgaaggatgaggtttttgtggaggcgttgcgtgcatggaaggccgatttgcagatagtcgttgccttccgcatgttgccggaggtggtatggaacatgccgcgattgggcaccttcaacctgcatgcttccctgcttccgcagtatcgcggcgcagcccccatcaactgggcggtgattaatggtgatacggaaacgggcatcaccactttcttcctgaaacatgagattgacaccggtgaggttatccagcaggtacgggtacccattgccgatacggacaacgtgggtatcgtccacgacaaactgatgctgttgggcggtcgcctggtggtagaaaccgtagatgccattcttgccggtacagtgaaaagtattcctcaagaagaaatggccgtcgtgggtgaactgcgtccggcaccgaaaatcttcaaagatacttgtcgtattgactggaaccgcccggtgaagcgtatttacgattttatacgcggtctttctccctatcctgccgcttggacggagctggtccaacccggtggagaatctgttgtggtaaaaatcttcgagacggagaaaataggggaatcccatcaactggttcccggaaccttgcagacagacgggaagacctatatccgcgttgctgccgaagatggctttgtcggcatctgctccctccagcttccgggcaagaagaaactgaaaacggatgaactgttgcgcggcttccggttgacggaaggatacgtgatgaaataactgattgtcattcaatgacttcctactgcaaaactactgcactcgttttgcagcgtcactgcaaaccgctttgcagtgttgctgcaactaatatgcagtgtgactgcaactgctttgcagtgctactgcaacacgtttgcagtgacgctgcaaaaggtatgcagtaagtttgcagtgagagttttgatttccaatgttaggctgaattaaatcttttctctatatttcctctatgaaaagcaagaccgcgactatctttgtgagtggaaacgagtgtctattcctttctacatcttttttccttgcactactgcatgacggttcagttccgattatagtcggaacaatgaacaattatgtacatttcctcttcgagattaaaactcaaccgggtgtcctactccgtccgaaacgatagccactttgcgaaaacgggatataatcaccacaaatatattgaccttgtaacggacggttgtatcattatacggcagtcatatcggttgccgtataatgatctgttggtttgatatactgagttccctgactaagtacataccatactgcaacaagtatttttctcgcaatagctacttgcaccttcatcttgttctttcttctttcgatacattgcctgtatgagaattctgcgaaaaatgaatctttcatacgtgcagctccccatgaacattcaatcatggtttttcttacaaacctgttaccatgtgtgatacctcgtgccttgattttgccagcgctttcctcgttacggggtcttagccccacccatgacaccaatttctttggtgtctggaaatgtgtcatgtctgttcctatttctgctattattgaggtcgaactacgttctttcactcccggtatagtctgaaggttttcaacttcttgaggaaaccactccatgcatagtgcagtcatcttttcctgtgcttcgtccttgtgtcgttgctgcaattcaatctcttctacaagctggtttataatgtctatgtcggtctcgctgacaactccggtaagtgctttcaccaatgtttctctgccatgcctgttgattgttcttccatgcagttccttcacaaggacttccgcatctgtcacaccttgggatataagtttaactattgaacggtaccctttggaatctgttgtggatatataattactgattctgatgttgcacctctggatgcattggtcaagtttgactaaattgcggcttatggaaacattcaggtcaaatatccttctgtcatattgacgcagacgttgaattttatcatcaggaacaaagcttgatgctatcagttctttactcagacaagtagctatccattcggcatcattcacatcactctttttgccaggaagctgttttataaaataagggtttaccagatgaagtttcactgacccttcaagcactcgccatatgggtatccagtagatactggtactctccattgcacactcttcaacaccttcagagaccataaggtcgcgaagtgtgaccaactcttcggtaagaactccgaatttatgctggattttttctccattagcacacagaatacagcaaaaaacactatctttgtgtacgtcaagaccgcagactaccttcatagaagtatttttttattgggacatcaagcccgttggacatatgaggatggggaaaccctatgacctcgtttttaccacaaagatagtcgcggtcttgactttcttatttaccgggcgtaaaaaatctgtttttttatatacctttgtacataacaaagttcgtaaactttagaacataacattatgaaaccaatcatatccccttctattctctctgccgattttggttatctggcacgagacattgaaatgattaacgaaagtgaggctgagtgggtacatatcgacatcatggacggtgtgtttgtccccaatatttctttcggattcccggtactgaagtatgtggcaaaactgtcgcagaaacctttggatgtgcatctgatgattgtacagccggagaagtttattccggaggtgaaggctctgggggcacatgtcatgaatgtgcattacgaggcttgtccgcatctgcaccgtgtggtgcagcaaatccgcgaagcagggatgcagccggcggtaacaattaatccggcaactcccgtatccttgttgaaggatattattaatgatgtatacatggtgctgataatgagcgtaaatcctggcttcggcggacaaaagttcatagagcattctcttgataaagtgcgcgagttgcgtgaattgattacggttaccggttcgcaggccttgatagaagtggacggtggcgtaaacttggaaaccggttcgcgtctggtagaagctggagcagatgtactggtggcaggcaatgccgttttctcggctcccgatccgaaggaggccatccgtgcattaaggaatctgtaatccgtcttctggattgataatcgacagctggcaacggcatcctttccttcgactgttgatgccgttggtagttggtattttgtgtggagatgcgtttccacacgtgctttctgcatgggagtatgtggcaggttttctgctttttctttttattataggtagatacaagcataccggatgggtgtatggagcggcggtataccttttcttgggtggtacggggtgctgcttgatgagttggcagcagggaaagagggtatttcccttttcgggcaaacctgctgtttatagggtttgtatccgcgagcatcccgaagagagggagcgcagcatattgtgcagggttaccctgctgggagaggtagagcaggatacagttacgggttgcccccggaatcatctttttctggcttattttccgaaagattctgctacggccactttgcgccgtggtgatgagttgctggtatctacccggcttgctcctccggcgaacaatggtaatcccgacgagtttgactatgctcgctacctgaggcggaaaggttatagcggcacggtctacgtggctgacggacattggcggaagacggggcatgatgcctcccgcactgtcagccaggtagcactggattatagggcgaaagtagttggcttataccggagtttgggttttgaaactgatgaattggcggtacttgctgcgttgacagtgggggataaagaggaactgagcgatgatattgtggagacctactccgtctcgggagccagccatgtactggcactttcgggattgcatatagggtttctgtatgctttgctcttgtttgtgcttcgtcctttgtggaggcgatggcggcggttgaaacctttgttacttttgcttctggtctttttcttggtgagttttgcttttttcacgggattgtcttcctcggtggtgcggtcggtcgtcatgttctctttgttggcgtttgccggtttgcagccggaaaagccgctgactctgaatacgctggcggcaactgctttcctgatgctgctgtgcaagccggtctggttgtttgatgtcggttttcagttgtcattctcggcggttgcagctattgtacttgtacagcctaagttgtatgccctttggaaggttgacaatcgtttcctgcgatatttgtggggacttatgacagtgtccatggcggctcagctgggtacggcccctttggtcattttctatttctcccgtttttccactcattttctgttgactaatctttgggtaatttccatggtgtcgctcgttctgtattcggctgtctttctgttgatacttacgccgctgccttttgtacaacatctgtttgcaagggtagtagaggcattggtacatgtccagaatgaagtgctccgctggatagagcgtcttcctggcgctgctgtcgatgatatttggttggatatatggggtgttctgctcgtctatctgttcttggggatgacatattatggctttctacgccttacggtacgtagaatctgctttgcgttgctggcattgttggcagtggtttcctggcattccctttccatcatgtccaatgcttcccggcaggggattgctttttatagcgtgagaggctgtcccgttgtccattgtatggcagacaaccgtcattcttggttggcatgtgccgatagcttgccggatatgccgcgtctgtgccgtgccctttctccgcattggaaccgcctgcatctggagactccccgattggttgccggagattataccacttccggcttatccatgcgtaaccagattgtctcttacgccggtaagcgcatctgtcttctttccgacaaccgttggagaaacaagaactcttcccatcccctttcagttgattatttgtatgtctccaaggggtatcaaggtgggatagaggaacttacttcgctcttttccatgagcatggtggtgcttgacgcttctctttcagactattatcagaataagattgccaatgattgcgttcgcttaggtattccctatcttcttctttctcaaaaaggttcttaccgcatattgttataaatcacaaacttttcgtacttttgccccttcaatttgttataaacgccaaatagtaaatagtcaatcgtcaaatagtaaataaaaatatgttgaccaaagtaatagaacaatccaagatagaccatttcaccaaatggtttgaccgtgcagacaagatagtaatcgtttcacatgtgggtcccgacggggacgccatcggctcttctctgggcttgtggcacttcttcagctcgcagggaaagacggcgaatgttattgtgccgaacgcctttcccgacttcttgaaatggatgcccgggagcaaggacgtccttctgtacgaccgctacaaggagtttgccgacaagctgattgccgaggcagatgtcatttgttgtctggactttaatgctatccatcgtatagatgccatgggtgacgctgttcttgcatccccggcaagaaaaatactgatagaccatcatctccatccggaggatttctgcaagattatcatttcccatccggagatatcttccacttcggaactggttttccgcctgatttgccgtatgggctatttcagtgacatttcaagggaaggagcggagtgcatctatacgggtatgatgacggataccggcgggttcacctataattccaataaccgggaaatctatttcatcatcagcgaactgttgtcgaaaggtattgacaaggacgagatttaccgcaaggtgttcaatacttattcagaaagccgtttgcgcctaatgggatatgtcttgtcacaaatgaaggtctatccggactatcatgcagccttaatttctctgactaaagccgaacaaagccagttcgactatgtgcgtggagatagtgaggggtttgtgaacattcctttaagcatcaaaggggtgattttctcttgcttcctgcgtgaagatacggagaagccgatgataaagatttctttacgttcggtcggtacattcccctgcaatcagctggctgccgagttctttggcggcggcggtcatttgaatgcttccggcggtgaattttatggaacgatggatgaggcccgcaaggtctttgagcaggctttggagaaatacaaaccgctgctgaatgccaaaggataaaaaaagttcagttgtaaaggttaaaagttacgaactttctatccgcagctttcaactttcaaggaaatcagatacttttgtacgaaattactaaataacagaaatgaagaaacttactttattcttttttgccttacttgcagtttgtttagccttccaggcatgcgataattctaaaacttatgccgaaatgcttgaggaagaaaaagatgccatcaaagcatttatcaaagacagtagcattgtcgttatttctcaaagtgaattctatgcgcaagattcgacaacggatgtaagcaggaatgagtatgtgcagctggcaagcggggtgtatatgcagattgtggataaaggttcgacgaatcctgcagatacagttaaaccgaatgatttgattttggtgcgctttgaagaacaagggttgatagctgttggaggggtgaaatcgtatataaccaatatgaatagtccgactgttgtggatgagtttagatattctgttacttcttcgtctattgccggacttttcactcaaggctatatgcttatatatcatggttcgtctgtacctgctggctggctggttgcgttgaattatattcgtaacggagcacatgtgaagctgattgttccttccaagatgggacagtcggatgctatgcgggacgttcatccttattattacgatttacataaactccaaatttggaactaaccgataaattttaaatcattaacctatgactctaatcaaatctatttctggaatccgcggaacaattggcggtggtgctggcgagggattgaatccgctcgacattgtgaagttcacttcagcttatgctaccctgattcgtaagacgtgtactgtaaaaagtaacaaaatcgtggtagggcgtgatgcccgcatctctggcgagatggtcaagaacgtagtagtcggtaccttgatgggtatgggctgggatgtagtggacattgatttggcttctactccgactaccgagctggctgtaaccatggaaggtgccagtggaggtattatcctgactgcctcgcataatcccaagcagtggaatgcgttgaaactgctgaatgaaaagggcgaatttctgaacgctgccgaaggtaaggaagtactccgcattgcagctgccgaagagttcgactatgccgaagtggaccaacttggctcgtaccgtcaggatttaagctacaaccagaaacacatcgacagcgtattggcacttgacctcgtagatgtggaagctatccgaaaggcaaacttccgtgtagccatcgattgtgtaaactctgtaggtggtattattctgccgcaactacttgaacaacttggcgttcagcacgtagagaagctctattgcgaaccgaccggtaacttccagcataatcccgagcctctggaaaagaacttgggtgacatcatgaatctgatgaaaggggggaaggcagatgttgcatttgttgtagaccctgatgtagaccgcctggcaatgatttgcgaagacggcaagatgtacggtgaagaatatacactggttactgttgccgactacgtattgaaacatactccgggcaatacggtatccaatttgagttcgacccgtgccttgcgcgatgtaactcgcaagtatgggcaagaatattacgcttctgccgtaggtgaagtgaatgtaactaccaaaatgaaggaagtaggtgccgttatcggtggcgaaggaaacggtggggtaatctatccggccagccactatggacgtgatgccttggtaggtattgccttgttcttgagccatctggcacacgaaggtaagaaggtgagcgaactccgtgcatcctatcctgcatacttcatggcaaagaatcgtgtagacttgactcctgaaacagatgtagatgctattcttgccaaggtgaaggagctgtataagaatgaagaaatcaatgatatagacggtgtgaagattgacttccccgacaaatgggttcatctgcgtaagagcaatacggaaccgattatccgtgtctatagtgaggctgccacaccggaggctgccgaggaaatcggccagcagattatgaaggtgattgaagacctggctaaataaggccgaacgaaatgttataatgaatgtcccactttcccgtgaaagagaagtgggactttttttaaaccttcccatgaactcctccatcaaactactactatgaatggcattttagattctataggctcagcaataaccactgtcagtgactttgtctgcgggtatcccttatttatccttctgatagggggaggacttttcttgttcttttattccggagctgtgtccctctgccgcatcggatattcgataaaggccttacgctataaatcggaagtggcgggcgaaggacaaatcagttctttccaggccttgatgagcgccatagcgtcaacagtgggtatggggaatattgcgggggtggctatcgctattacagtaggagggcccggagccattttctggatgtgggtaagtgccgttgtgggtatgtccaccaaattctttgaaggggctcttgccattatgtacaaaggacacgattctgccggagaaccgcaaggggggacgatgtatatcattcttcatgggttgggcgaacgctggaaaccgtttgcttatttctttgcggtggtggggttgataggtacgttgtgtgtaatgcaagccaatcagttggtcgagtctgtcactacggtatttactactccggcaggaatagagaatacactcggtctgcgttttgtgatgggtattgtcattagcctggtggtaggggcagtcattatcggtggcatccggcgcatttcggttatctcggctaaaatagtgccgatgatggttacttgctatatgctgcttgtcttcgttattctttgtttgaattttgataagttgccgggagtgttggcttccattttccagtctgccttcagcctggaagccggtatcggtggaattttgggaactgcactgactggtgcccgccgtgctgcctacgtcaatgaagcaggtgtaggtacggcctctatgatgcatggcgcctcccgtaatgacaatcccattcgtgaggggctggtagccatgattggaccggccatcgactcggggcttgtttgtacattgacggccttccctattcttatagctggaaactatgcgtcggaaggaggcataaaaggcctttatattgctttgaattcttttgagcagctccttcccggctatgggcattatctgttgatggtgatggtctttttctttgccttttctaccatgttctcttattcgtattatggactgaagtgcaccaacttcttgtttggtgcggagaatgccaagtattataactacttctatttggtgatgattgttgtggctgccatgattccgttgggagcagtggttgccatcatggatttggcttttgccttgatggcattgcctacgatgacgtcactgctgttacttgctccacgggtcaggagaaagatgaaggaatattttgcgaactgatagaaagcagcttccactacaagttgatgacctttcctatctctccttcaaaattcggggtgaatacacctttgccgatatttgccttgatttcatcggggctccaaaaacgtcctccgtccagctcgtcactgggatgtatttcaccgtcgtagacagttttgtgtacgaagaccagttccttttcgcgggcagactcgaagacataatgcaagacggtttcgggaacaaagtcggtaatgccgagttcttcgcgtacctcgcgtttcagcgccatctctacactttcacctaaatcgacgtgtccgcctacggaggtgtcccacttccccggttgtatgtctttccattcgggacgtttctgtagatacaactcacctttggaattgaatacatgaagatggattaccggatgaagcagtttgctaccgttatggcattcgccacgggtggcggcacctgtgatgttgccttgttcgtcgacaagggggaacatctcttgattgttatcgtggttcattgtgcttagggtattaataatgatgaatctccatagctcaggaagcggaaatcatgtgccagtgcatagttgtaaatcttcggccaatcaccgtgtacgaaagctgatacgagcagcagcaaggtactttgcggttggtggaaattagtcaccatagccttcacgattttgtattcatatcccggagcgataatgatttgagtgctggtatgcagagcctccatgctatgtctgtccagataggcaacaatggcttgcagggcttctactgcagaggtggcggtggccttggcagacatttcataaggttgccattggtggacgtgcaagtcttcctctgtggcttctggattattcagtaaagtgactccgatgtgataaaggctttccaatgtgcgcactgaagttgttcctacggccactgccttgccgccgtgtactatgagtttttccaatgtgttgcgcgagacagagatgtattccgtatgcatttcgtgcccttctatttcttcacttttcaccggtttgaaggttccggctcccacatggagtgtcagctcttccaattctactcctttattgcgcaatgcgtccaatacgcgtggggtgaaatgcagtcccgctgtaggggcagccaccgaacctttgattttggagtagacagtctggtaagtctccttgtcactttcctgggtctcccggttcaagtagggggggatgggcaattcaccgaagacctcgagaatgtcggcaaaagtcacttccggattattccagcggaagtttatccaatggctggttccgtggcattcaccccgttcggcggtcagggtgagtgacttgcctttcacggtcatctcacgtctcagcatgccttccttccattttttcaggttgccgaccatgcagagccaggcggcatgctcggtttgctggaagttgagggcgtagtcgttcggctgtatgggttccaggcagaatacttcaatcagtgctcccgtttctttccggaaatgcaggcgtgcttggatgactttggtattgttgaatatcatcaggcttcccgatggcagatactccggcagtgaagtgaatctgtcttctgaaacttctccgtggcgatacaataacagtttggactggtcacgtacggacaatgggaactttgcaatgcgttcgtccggcaacgggtagttgaattcgctgattctgatatgtctggggtcttctttcatgatggctttctctttattatatcggctgcaaaggtacggatatttgggaagatttgaagaataagggaaataattcctaactttgcaggaagaaagtaggaaaagacaaactaaaagataagttactatgaagataggagataaagttcgtttcctcagcgaagttgggggcggtgttgtgacaggatttcaagggaaaaacatcgtgttggtggaagatgccgacggttttgacataccgatgcccataaacgaatgtgtggtgatagagaccgatgattataatatccccactccggcagccaaagcggctgccaagaagaagcgggaagaagagcaacaattgcgcacggccgctactgcggcaaggccgtctgctatggagtctcaggtttcagagcctcaatcggtccgtttggagaaaccgcagatatctgtttatcgtcagcccgagatgaaaggcggagatatcctgaatgtttttctggcttttgttccggaggatatcaaggctgtcagcactacacctttcgagacatatttggtgaacgatagtaattattatatgtattatacctattcgagtgccgaaggaaagtcctggacagcccgttcgcatggtttgatagagccgaatacgaaacttctgctggaggagttcgaaaagtccgagttgaacgaccgtgaacgtgtgatggtacagctggtggcattcaaagataaccgtgcgttcacaatgaaaccggctgtcagtgtggaagtccgcatagatatggtaaagttctataaactgcatacattccagcagacggttttctttgaaacaccggccttggtgtatgatattgtccggaatgaccagcctgccaagcaggtgtatgtttcggcagaggaactgaaggaggctttgatacagaaaaaaacggcagatactccgtccaaaccgcagacggtcatcaagcgtggtggcaagaatgggattgtcgagattgacctgcatatcggcgagttgctggatgacacctgcggtatgagcaacagcgaaatattgaattaccagctggataagtttcgtgaagtgatggaacaatacaagaaaaaacgcgaacaacgcatcgtctttattcacggcaagggagatggagtgctgcgtaaagccttgctggacgagctgaaacgtaaatatcctgactgccgccatcaggatgcttcgttccaggagtacggatttggggcgacgatggtgacgattaaataaaatcaagtatttgaatagtgaatagggcagttcaaacattggaatgccctattcattatttatagtctgacattgactcttgtatttttccttatgtgtatttcttgagtggaaggattggactgcatcatttctgattctatttgctggattgctcttttggctttgtgtacaaacctgcctttgggatattttcgcaaatattcttcgtaatctgctatcgactggcaactatagaagaggcgttcttcattttctcttctgacttctcttatatcagtaatgggaagaactggctgtgaagaaggttgtggatgtgggtggacaatctgttttttaggttcctcttggaactgttcaagttttgcagtatccgtttttaccgagtccataacgatgttttcttctctatttattggggagattggatttaccttgtttcccaaaaattgttttataaagtttgcatgagatgaggaggggtattcttttagaaaatctctgtagtcttcttctgtacggcatgcagcgtacttgcgctcttcttcaaggtgtctaaagtatatggaacctcctttgacaagcaatagaatcaatactataccaaggccggtccatcctgctatgcgtttatgcatgttcgaaggacagaacttttctttaaggcgtggtgatgttgttttaggaaaaagtggagcaataggcttcagctgtactgaaggagagtctgtctttgtttgttttagtatggagcaagcaaactcataggcttgttgggctgtggggcggtcccaagtgttgagggcaaggcatgcgtgaacaaactgggacaattgggaagaatatttctcatctaatgctggaatatgtgcaccattcagttggacacaacctcccataccttcccataatacaagaccagtggataattcataaacactcatccctaaagaccatatatcgctggtagccacaatcagtggtttctctgcaaaacgttctggtcccatataggcaagtgttccggaactttctactttgttgatacttttacgaaaagtatgctccagtttacggctgatgccaaaatctgagatgatgaatttgtcatcatcccctatcaaaatattatcgggttttatatcttgatgaatgataggaggattctgattatgaagaaacatcaatccgcatgatacatcgcgtatgaagcgccagatttgcttttcagacattttgcctttcaagctcgctgaggaccctttgggacagtaaggcattaccaaaaaagggcactgtccaaaaacatcaaaatgattaaggtgcagtagattgggatggtgtaatttgtaggcaagtttgaattcttcccggaaatcttttatgccgttgtcatccaacagtccgtacaactttatggcaacgtctacatctgctaatatatttcgggcaagccagacttcaccaaagcttccgactcctaatagtttcttcagctgatagtgttcagcaaatatatcaccatttttcagttgcatagtttcacaatagtaatcaatctgttagggtagtgttagtagtgtctgtctctgtaactagaaccgtatctgcctgatatagtatcgttttccattttgcatattgctgtggatttctatataaatagaagcctgccgctaaagccagtaccaggagtaacagaagaattttccggattttgtggtggttgggtttgctgaacactgtattattcaactttactttgggctcggtatcctgtagcatgatgtggcataacacaattgtaatattgtcatatccacctgcttcaagagcagcttctatcaacctatccttgcatgtcattaaatcatcctggttctcttctataatttgcattatctcttcgtcgtggcataaaccacataacccatcactacacagtaggagagtatcgccatcctttaaattataggaacggaaatcgggattggaacgattggtcgggtctcccaaacagcgggtaatgatattactgtaaggatggtcaaacgcattttcaggatctagttttccctgatctactaaatcttgtacataggaatggtctttagataaacggcaaaaacctgaattgccattgaatacataacaacgactgtcgccacaccaacagatataggctttatcgttcaatatccaagcaatgacaatagtagtacccattccctgggtactactatcttctttacttgtattgacaatatttaaatcagcggttttgacagttctgctcagaaattcttcaacggcttcttctgaggtaacaatgccttcctgcgtaacgatatctcctaaattctcgggggtgaatgcattttgcaccgtctcaatggctatggcagaagcaacttctccggcattggtgccgcccattccgtcggccactaccaatatgctgccataccgtcctaaagaaatgggttctatcgattgggggataatccactctgattggcataaatcacgattgacaacaaaattgtcttcgttgtttttcctgactaaaccaacattggtacctgccgctaatttaatgcttatctcggacatgtttaattttaatgtattaaatttctgattggtactaaacgatccttaccctctatgcttcctaccatgaaacccactactttgtaagaaccattttctagaaggaatgctggagaaccataataaccgggctctgccacacgattctgtaatatggtagtctcatattttgtgtcggctatattggtatggtcattgaaatgagccggagtaagattatgaatatcagcataacctgcatagcccaccatttgaacttctgtacctccactcatgttgtctgcggcggtaatgtcgtaaggcaatccctcaccataaacgccttttcctctaatgtatgcccaactgttggcagcaggggtaacaatgctgacactgatatatttcctacgtgtataggtcaattttatcccatgttcccttagttgtaccctgatggatttatctacttctatttcggtcacttgtacatcatttcgtccgtctttggcaaaatcgctactggtaaatgtcagaggctttccagttcctttggtactgtatgcacggtaatggataatgatattacatcctgctcctttgtatacagccaatagtttacgccatgggtctttccactctgtgttggagtatatccatggctcgacattctgcctgtctgttacaaacattccgtttgatagcatgaagccagttccgcagattatatctgaaacttgtatgcccggatcaaactttgttccattatattcgatttcaatacggtcgactttaattgtatagatataatcataataatctttcaaatctcctgaagcattactgtcttgttcatctgctatatcagggtcttcataatattggtctttggagagtctggtgccttcttgtatatttgcgttaatggcattgcttgaattctcaatgcttttagtgcttatgctgtttgagagattgtccaagtctgatttgaccttatagaaacttgcattgacattctttaattgactattaacgttgtccaactgtgtttttaaggcctctgcattaccgtcactgtttcgtaatttggtctctaactcccgttgctgtgcttctagagatgctctttcggtccccagtgaatccaattggttttggtatcctttcagttgaagttcttgttcttctgtcttctgtgccaacaaatcattttttacacctaaactgtagttccaggcagccaatcctgccaccgccagtacgaaaacaattcccatgattgttaatgcggtcttgtaggggcgtaaggcttgtttgcggaaaaggctcattctctcagtcaatccaatgctggaagttaatgcttggcgaccttgtggaacaatgaatcccaagcgtggtccgccaacggataattgtatttcatctcctgtttgtaaatagtaggacccatttataggatgtccgttgaccaatgtcggattggagtgtgaaaggtggataagtttccagttttcaccgtcgcgtacaattgcagcatgtttgcggctaactgtttcgaaactttcatcaaagcgtacttggcaggaagcgtctctacctaattctacttggtcgacaatgattttttgggattctcccgcttgatgatactttgaagaggtcttgtgctccaaaataaagtaagttctaccggaagcacccattaatgcccccataccagcccctactgagccggctaaggtacgtttgtaattttgtgtatccatactacttgatatataattaatagttttcaaatctcatttttacatccccaatggagatgatatctccaattttcagtatatgcccttgtttggtgacttgggtggaattgacataagtcccattactggactcctgccacaactttaactccttctgccattgcccgtcccgaataatccatttatcagtggcgggatttgtttctattgtgcaatgatggcgtgatatataggcactttgctgttctgttatatgtagcagattgtcgcgttctctcccgatagtaaggattctattgccatattttataagttcacttaattgatatatttttccgtactcttcaccttgcataatacgtatacagaaaccattgactgtttgtggtggacaatatcctctttccatagggacttggcttattgctggcaggtgttccaatacctcttgcacagactggaaacgttttttgaaatctggattaagacatcctgcaaagagttgctgccactgctctctatgtttcaactgtgtcaatttctgccggttccaatctccatttttcccacgtttctggtatagtgccaattcattatgactgctcaattcgccaaagggcaaactgccagttaataattgaaaggctaatactccaaaagaaaaaatgtccgtagtgggtaggacagtggcctcacctcgcatgcggttcacttgttctggcggcatatatgcataagtcccgaagatttggttgggtttaccaaaaatattgcgttcagtcatacgtttgtttctatcccctgctataccgaaatctgtcaacgcagcaattccgttactcttgaaaaggacattctccggctttaggtcacggtgaaccttgcctctggtatgcaaagcatgtaaacctattagaatttgttggcaaattagaggaatcttactgcttccagaacctaaataaggtgttaaatctcctccggaacagtattccattacaatataagggttgcctccaactgtaccgtagtccaatgaacgcactaaatagtcacaatcaatttgcccagttttgaattccatctcgaaacgttccattaatggtttacgtatttcaggaggaacttcccataatctcagtagtttaagcgcataatctttgcttgcgctgtccgtaacccgatatactttaccgaatgaaccttcgcctaatgtttgggaaaccctataacggttattgatatattcccctacattataatcacatctgtcgacagtccggttattcacaagagttatatttagtcacattcaaacttgaatcttcggtcgcctagtacaatgatatcatccggtatgatttctatttttctgtttacctggatataggtcgtttggagcatacttcggtcaagcagataccaatgaccatcatcgaaaactatttcagcttgttcctttgaggtgattgtacgattagacatttctgtattttcccggttcaagatgatggagttcccttcatattcaaatcttttcggaagaatgttctcttcttcttccggtataattgttaatgaacagtgaggtttggtttccggttctgtctctgtgatgttctttatttgtcggcgtatggttggccgatgtacgcggacaccgcagttcgggcaaaaagagcaggttattgctatcttacttccacattcatgacagagcattttctcttcagaaacggaagatgcttcctcttctactcttattgttttgtattcattgtttgttgatatgtttgccttttttaatggagttccgcagcaagggcaacttgtgaaatctcctactaccgggtaattgcaattgggacattctataattggctgtacaacagtagaatgattctcttcttcatttgttgtggaaaacactacagtttttctgcatttttcttcattagagctgacattcaatactgtcggtttgggtatagcttctccatgaccttcttttgaaataaaaatgtcctgactgttggcataattctccggcattcgcaaaggttgcccgcatttcaggcatactgttgtgttggaatggttgtcccaaccgcaattcatacatctcataagattttactttaataatggaattactttgtataaatcagagtttctcaccattgtcggtttaccatgaatttagaatagacctccctttttctgggaaagaataattgaagatatttttcctcctttgcttttaactatgagagttccttctctggccttcttggtttttcccacttttagaatgagtttgccacggtcttttgctatagcttcacaccattcaggaatatctgcaacttcccattcggcattggagtctacttgcagttctttaatttctcctttggagccgaattccaatttatctaatgcgatattaatgaattcttcttggccaccttgggtaacactgaccgtagctttcatcttttcattactgattgtaatggtggctttacgttcgatagtcagccaattggtctggcagcttatggagagtttcttctcaccgggagtcacttgacaccagtctgcatctgatattgcagtccattgttctggaagactttctatttttatactttctgcagtctttgtttcacacccaaattccaggctttttctgtctatggtaagtctggtgatttcggcaggaggcgctggcttgggagcgggatttattttttcctcacactctttgattttatttttgcatgcttgctccagattgctgtcgcatttcatggctgctttaaaacttttaatagcgtctctgtatcttcctcttttcatgtatgtctctcccttttgatagatggaggcgcattgcccccatatacttattggcatagagagagcgaacgctaaaacaatcagtctgataagtttattcattttcattgttgtctatgtttatatatggttctattttttttgcacggtcttcaaaagcctgggctgctacggcttggtcaaggtctttcatgatatttgccttttctttaaaaacatgataggcagaatccagtatggcctctacttgctgtttcagttctgttgcatttaagtatattttcgcggagatggaatctttgtagtaatttatttggcggtatttgccaatggcatttatgtaaaaatcctcaaatacggaatcattgttttgctttaaagtgtcaatgtcaaatcggaaaacatctccttgtattttagagttttcgccttcttgaatgattgacagacacattttgtcgtaatcaatcgttggagtcggttccggtatggattccactactggttctttgccgcttattagcgaaaagatgatgacaattgttgcgaatatagctgtgattgctgctacgactataacttttttgcgtttccctttgtcttgatagggtgacatcttatttatgtcagaagagtgtgcgctaatggaatcctcatgggttttgtcctcttcctcttgcaaagtatcatggctgttgtttgacagactaaaggggacgggacttccattgatatgttgggaagtgtagtctgcaatttgtctggctgtgggtctgtcccatggatttaaggcaaggcacttgtaaatgatatcctttaattcttgagaaaagtcttcgttgataagtggaatgtctgcaccgtttttttgcaatacgcctccatgatcgccatagggcggcataccggttagaagctcatacattgttgctcccaatgaccaaatgtcactagccataataggggcgggagatggaccaaaacgttctggtcccatataggccaaagttcctccactggattcttggccttggttcctgcgtaatgtacttctaatccgtgcgctgattccgaaatccgtaatcatatacctattctcatcattaatcagaatattatcgggttttatatcctgatggataaccgggggagtttttgcatgaagataagccagtccctctgcaacatcatggagcaaatgccagctttccgtttctgttatccggttgttgtcagtaaggtattggaaggccgaaccgtttttgcaaaaaggcaaaatcaggtatggcatccgttcccagcagtcataataagtaggatgcagtaaattggtatgattcatatcaaatacgagggagaactcttgtgtgaaaagggatatccccgcatcgtcaagccccatccctggagcatatatttttatggcgaccttaacatccgtaagtttgtcttgtgccagccaaacttcagaaaatcctcctcttcctagttgtttgagtagctcgtatctatctgctatgatttgtccactgtctaacatagaacttataaattatgtaaaagaactgttttcttttggaaacagcctttctttgtgtgattgtattattttgtttgattgagtatattcgcaattctttatccacaaagtaattaataaaaatgtaaataaaaaaatgagaaaaagtttgaaatgtactaaaatgttgttttaatggcttatgtagctaaatattgtactatgatgtgattttttgtttcgttttaataaagcggtagcgtatgctcttttgtggttgagaaatacgccttatgcttgacggtatttcgcaaaaatattttaagtttgtagatgtattgaataaataatctaattacgagaaacatgggagagaggatggataagcgaattcgattttatatttattggatattagggtttgtgcttctaggagcttgtgcgcccggagataaagaggacgtatacacagaaatgagagcttttgaggatttttcccatataaatggagattctgtggccattgtgccccgaaaggtaaggttgaaggcttttcaaaagatggaagaggcaaaggatagcttggtcaagtataattatctggcaatgacactgaaaacatatttgattacttcacagcttgattcggcacaaatcgtaatccagcagatacatgactttatagaaaggcagcatagttcttctcaaatggcagatttggagtctgaatgtttcaatatgaagggaaatatctttgcacgtgttgggaatatggattctgccgaaatttgtttccggaaggcttatgaattacggatgagagggactaggattgaagtggtgccggatattttgatgaatcttgcagatgcgaataaccgtttaggaaaattggatataggggcagcttggtataggagagctttgttgatgtgcgactctttgcatatagcttctaccaagaaacctcccatttattatggtttggcacaagtatatgttaccatgcgtgattttgaacagtgtgattactattataatctagcaggagaaagctatgacagtatgctaccttatgaaaaatatatttatttgaataatagagggacttcttactattatagggaggattaccagacagcgataaaatatttccaaaaggttattgatttagtcgaaggatatgctgatatgagttttgaacttaatctggggaggttgaatttaggagactgttatcttcaactgaataaggttgatttggctgttaaatatataaatgaatgccaacttttttttgaggaaatgggggtgagtactgcactatattatatcgatacgcagaaaatagaattggctctgcttcagaaagactttcaagaggcacgtcgtttattgtccgagagtgtagtccctccgggcatcgaccctgatatggtacatatccgtaataaataccttcagcagttttacgaggaaaccggcaactacaagagggcttatcactatctgcagaggaacaacctgcttgatgattctatcaggaatgagcgtgtccggatgcgtacggcagacttgactttgcgttatcagcaggattctaccttgatggcacatcgggttttgcttcaggagcagaaaaacgaggtgctggtgctgaggcagacacagtttgtcgtgtttgctgtagctgttgtatctatattgacggcggttttcctttatctgtacagcaaaaagaaacgtgctttgttgcttgcacggaatcatcgcacagtctctacacttcgtctggagaatatccgtaaccgcttgtcccctcatttcatcttcaatatgctgaaccgggagatggtggagcggaatgtggaagaaaagcaagagctttcgtcgctggtaaaactgatgcgtcgcaatctggaattggtggaacaactgtgtgtaaccttggcagaggagctggattttgtgaaaacatatattaatctggaacgccgttctttaggtccggattttcattcggaactgaagatagaaaaggatgtgcagccggagcaaataaggattccgtctatgatgattcaaattccggttgaaaatgcagtgaagcatgcgttgcgcgagaaggaaggtgaacgtaatctttgggtttcggtctgccgccggggaaatggtatctgtataaagataacggataatggtggcggttatcgtccggacagtcggaaccggggcacggggacgggaatgaaagtcattatgcagaccattcggattctcaacaataagaacaaggaggccattgatgttttggtgcacaatgtctctctacagagtggtgagatgggctgtgaggtgactttctggctgcctgacaactacgattacagaatttaaaagaaccgtttaatcttattttttgcaaggataggcatatttacagacaaatagtccgtaaatgaccttctattgctttgtatgggagtaggattatgtatacctcaaatccgcaactacgcgcctaatatgatacagaagcgaaaagaatctgcatcgttagtaaaaagggggcacagtgcatcgaatgtcaccataaagacatataaatgccccttaccccaccatgcgacttgaggcaatacgcaaaatcacgactataagttgtcggtgttatccaaagtcattctggaacacattggcataagcattgttgcatgaatagatattcagcacatacttccttgatgtcctgacccatttggctggcacagagatgaacttaaagacaaacgtcttgatgcggcttgttgctttgagtccgaacctcttcacgtcaagcctcgccatgatgaatttatagaagttgcgtatgagtgccataagcagaagaaacaccgtgttttctcccataaaggattttggaagcctgttccagccgaatccgttattcatatcatcgaagatgcgttccttccctccacggaggttatagaattcgacaatctctttctcggaagactcgtagtcatttgtaaggatgcagcggtaggtgtattctccttcccacaggtcgagttcgccgtctatccgcttctgtctttgaatcacaagacggtatgccttccctttccatttctcgatgagaatggaggccagctcaaactcaatgccgcccaattccactttcttccaacctctgagggcaaagatgtcattgtagagcgaactgcatcggttagcacggatatagaaggtcttgcagtgtttagcaatctcttccactatctcttcagaacacgagccgcaatcagctctgaaacggttgataataagcttgttttgttcaaacctttcaaagaacctcttcagcgtgtccttctggtggaaacggacatttgtgttgccgtcgctgttctcaatgccgacaatcaagttgccaataaccgccacgccagggcgataaccaaggaacttcttgtatgtaggcttcgcatcaaacttctcagcctctatgaactggtggtcgaagtcaacgtcatacccctcgccctctttcagctgccctgtggacaataggcaattgaggagcagtgtattcagcttgtctgccgtgttgaagtcgtaggtcttgccagtgtcggatgtgtaggaaatgttatcctgggtcagttcctttatggctctaagaatcgtgtcggcactgcatgtgcgaagtgtcggatgaagcgaaaggtggtacatcagatgagtggtgacatcctcgatgcatgagccgccacaaaaataaacgctcataagcgaacggatgatttcgctgtattgataaccatacagcctgcatctcataccgagggttgagtcgattacagatgagagtctggagtcaaattgctccattattgaaaatattcctccaaaaggagtgagtttctcggatttaattgctacctttgccatgtctgtcgggtttgatacatattttgatttgcaacactaagataggtgaaaaatctgacatggcaaattcctgagcaactttttgttgctcaggtacttaaaaagttatatttgtaatagtgttgcggaattaagggtatatattcgcgagaagaaaaacataaaaggaacatggataaatataaggttgcaatagttgacgacgatgaggtggctcttgagaatctgagttttgaattgggaaaggatgcacgcttctttttgaaaggaactgcccgtaatggtaaacaagggaaaaaactcattgccaaggtacagccggatttgttgttcttggatgtggaactgccggacatgactggaatggaattactgcaggaaatacgtgacagtgtttcgtggaatatgcggattgttttctatacggcttatgataagtacatgattcaggctatccgggaggctgcgttcgactatctgctgaaaccttttgaagagcaggagttgcgggatattcttgcgcgttttgtagagcaggcagaggctgggcagagaatgtcatatcccattggtgcaccgttgcataccggacagacatttatcgtatttacgccaactaatgatatgcgtgcgttgcgtccggctgaaatcggcttttttcgctattgttccgagcgtaaacaatgggaggtgatactaaacaaccagccgccgttggtgttgcgtcgcggaatgactgctgagcagattactcaatattcatccagtttcgtgcagatacatcaatcgtatattatcaatattgattatctgatgattataaaggatagcaaatgcatgctttatccaccatttgacaaagtgacggaactgctggtttccagaaagtataagaaagagctgcaagacagattctgcttgtaaagtgataagaattatttggttagggagttgacgccgcaggttttggtggcgttgacgtaaagaaaaggcattgaacctctaaagtccaatgcctttttatttatcaaatactattttcgtatttatcagaagcgaagtttatttcacttcgatacctttgttctgcagtgtgacgttcaatactctggcataatcagcatactgcttttcattcagagtctttttcatcaacttcagattaccataaactgcattacggagtaacttctcctgattcttcttggaatttgtagcgcgttccatctgttctgtaaaatattcgcagatgtttgccacttcttcatgctggttggaatccagattcaaatacttgctcaactttgttatgttgatgttaccttcccattttgcagttgtaggttggtttcctgctgcaaatgttgtagcagtcaggcagactgctgccactaatgttaatcctaaacgtttcataatacctactttttaattgttattcctaaaaactaatctcaatctaatacctattgaaaactctctaagcgcttagctttttctttttacctatgcaaatataggtatatgttttataacacaaaaatgaatacgtaaaaaagtgtagtttataccttcatttcttgacttaaatcaattttgtagtgtgaaaatgctttatttggatgctttttgtaatacgaatgtaatgtaggttaaatgaaattcagtttattgtaatggataaaaggatttttattagtcaaaatgttattgccaaacagtttcgggcaattctatgattactctgctttcagagcagactcccacaaagcctaatccacctatgacgttgcaaggcagactgataggttccattaaagtattgtcgtaatccccatcatccaggcagtttaaggctttcaggtagcggtattcggcttcagtgatactaagcagccgtacggtgatggtttgtttgcgggatatatggtcgtagtagtgtccctctaccggataatattcttggtagagaggggtatatacttttaatgtggcatacgaatcacggaaagtgttatcattgaatatgttgtatttgttatttatggtgggaaacaattcattttcttcatcatcatagttgccagggtggccgtcagtcagtataacatcttcccggttgatgatttcgttctgtcggggagcaaggatggtagtgtctctgggtatggaggcccaatgccaagagccgtcctcgtcttccactttgatgaggctgccgttttcatcttccaggtattctttccatttgcaatagtaactacggtcattccaaatgtccagccggtagtagttcttctcgttggggcggtcttgcaatgtaattttgtattggcggtaaagggtttgtccgctgtactcgcgcaggtaggccaagcaagtgtccacgtgcaggctctctatcggttgcggcacggtgacttcggcactggcatggtattttccgttttcggcagtggcttctaggcgtatgttgtcgccgggatgcaaaggggtgttgaggcgaaacagcttatacaagatagcatcgtatacaaagatggcgtcttccggataattttccggtggaccgaagatttcctccggtgtcagtgcttgaggagtttcagcaatgcggttattgataaacaaggtcagtgtagcttcgttcaaacgtactatgctgctgcccttgctcaagtgcagaaagacttcattaacgtcttttcctgcatccagttgggcattcatgatgagtagcggttgttggttgtctggattgtaaggaatttcattttcacatgatgccaacaagacaatagctactatatataataggtgtaatttcatttggatcttcatatgctgatgtgtttaaaatctgtaagtataggtaactgaagggatgcagggcaggatggtcagttttttgatactgattttcccttcctctttatgttctatgaatcctccattaccatccggttggtatagataactgcttttcttgtatttgctgtaaacgatgttcggattcatggcattgtatgcattgtagatactgatattccaggtgcgtatgccatgtttggtttttttgttgaagttaacacctaggttcaaacgatggctggcaggcaggcgatagttgttgcgtctggagatgtagccggtctcttcgatgactccatcggggctgacgataatagtagccttttcggggatagtgatacatccaccggtattgaatatccaggaagctcctgcatcaatgcggtcactgaacttatggctgagattgaggctgatgctgtggcggcggtcatatttgtaggggaaccatcggccttggttgatggtaccgttcttaaaacggtgatcggtcttggatagggtatatgccagccagccggtagtcttgcccaatgttttctgtaccatcagttccagaccgaaggagcggccttcgcccatttccactttttcttcccagttggtagaggtgccgaagaaggatacaccgtcttgatattcaagtatgtgtttcatctgtttataatatccctcgacggagaactcccaacccggcagtccggaatagtagcctcctatggagaactggttggcatacatcggactgatgtctttggtaatgggtacccagaggtcggtaggcatagacagcggagtagaggacagcagatgcacatactgtgccatgcacgtataggatgctttggcagaatatccttgtccgaggtcatagcgggcggaaaggcggggctgcagcgaatagtagcttttcccttgtgtgtggaacagcgatgtgcgtacacctgcattcagactgaacctggcgtttacattgaaattgtcttcggcgtaaagggagatttcttgtccgcgcatggcatggctgttgctggtattgtaaaccgtatcttcctggagggcgccattatctatatcttgtattttcgaggtagctattcccggacggaacgtatggtggatgtactctgcaccgaacttgatgtggtgctgcggcatgggggtgtagtcaaagtccatacgcgcactccagtcacggataccggagttgaacttggaggagtaatagtatctgtcttgtactttattggcgacagtataggtatcttccatgtttccgtccagccccatctcatatttgttgtatgagacggtggtgttgcaaaacagcttgctgttgaatacatagttccagcggccgtaggcgatggtgtttccccaattcagatggctgttgtccttggaataattcttaatgctgttgtcgtaattgtcaccgtggtagtaactgtcataatgatagtggtctttccccttgtagaaactgaggaagatgcggctacggtcgctgaacttatggttgacctttgcattgacgtcgtaaaaatagtagttgtatttgtcggaataggtgtcgtctttgtctacaatgagatttttgaagaatagggtggggatggctcgtgcgctgaaactgaaggaggtccgttctttccagatagggccttcgatatgcagtttgtccgtcagcaggcctatgctgaatgcgccgtggtatttatgcatgtccccgtcgttggtccgtacatctactatagacgaaagacgcccgccgtagcgggcaggaaaagaacttttgaagagtgtggtgttctttaccgcttcgggcgtaaagatggagaatactcccagcaggtggtctgcgttgtaaacaggaattccgtccagcataaccaggttttggtcgggacctccccctcgcacatacatgcctgcaaaaccttccataccggcttgcacacccggcatcagctgaatggtcttcagcaggtcggcttctcccaatatggacggggtatgcctgatttgtgtcatcggtatctcatgcgctcccatggctgtgctttctatgccggcctcccgcttgtccgagagcaccacgacctctgccagctggttattgctgtccagcctgacgttgagtaaggtgtctttcgtcagttcgaaccggctatgccggctttcgtagcccaggtaggagaaaaccagttccgtttccccttccggcagggtgagggaatagaaaccgaaaggattggtggcagtacctgtggaacgacgactctcaaggatattggcaccaatcagcgtctcggaagacgctccgtcggtcacgtatccgctgatggtgaacttacggctaacgggtttctgcggcacgggccgcttatggagtagaatgtgctttccggatatttcgaacgtgatgggttcgttttcaaaggcacgttgcaatatctcactgatgttcttttgtttcatctccagtgtgatgcggtgcgtgagctttacttcttccccatagatgaaggagaatccggttgcattttccagttgcttcacgaaactctctaaagttgcgttacggatattcaggtttatacgtgtttccttgttttgtgcctgtgcatggagtgaggcgcttaaaagaaccacacacatcagaagtacggttctgatgcggtggtgcgaacagatagtagagctggtcattgtcagttaagtttagtagtaaggataatagtgttgttttcttttttataggtaaagttgccggcgtccttcagtaggtcgaggatttctgtaagactctccccttcgcggaaggtagctgtcatatgatagttcttcaggctgtctccttcgatacgtatatcggtacggaacgtttcggaaagttgacggacgatttcctgcaagggttgctgatcgaatgtcagtacgctatgaattacttgggtttcctcggtagtatgtatggcttctgtgggaatggcttcccgtggtggtgctacgtataagaactgataggctgcccagctcgttacacagagcaggactacggctgcggcactggctgtacgcatccagaaccgcttcatgctgcggcgctttagcaaacggctttccagcagcctccagctgttctctgccgtaaagcgtcctcgtggggaacgggtagaagcaaccagtttgttcagtaccttgtcgaaattctcgttattcactttcatttttggcaatttattaagagcctatgactccttttctgcatgtaaagacagctccttttcaggaattccctatgcctatatcctgaaataatgttaatctaaagctctttgtccgtgaaagtccgtcctgcctacgtatgacttccttgtttctctgtttcaatcaatagggaaggtgtgctcgagatgtgcatctcatgttgtgcgagatgtgtatctcatgcagctcgagatgtacatctcatacatgcatacgcggcttcttgcaaggaagatgaagcagagttcactccgtcagcaatgcttccttgagtcttgtgagtgctttttgcagttgcgcgtctactgtctttgtgctgatgttcagctcctccgccacttgtgcatagctttgtttctcttcgcgcaggcggatgaatacttcacggcaacgctccggcaggcggtcgagcgccttgacatatcgggcaaacagttcttcgctgataagagtgtcttcgggggaatcggcctggccggaaacttcgggaagctgttcggacgagagtgtagggtgccggttctctttttccaggtaattgagggaggcatttttggtaaggataaagcagtaatcctctatgttgttcacttccggcaacagggcgcgttgttcccaaagcttcatgaagacgtcgagcacaatttcttgcgcccattcttcgtgcttcacgaaatagcaggcaatacggaacaagcggtcgtagcacagattgtagaaactgtgaaaagcccgttccgagtcttcttccttcatttggcgcaagtagcgtctgacttcttgttcggtcatgcagtctcccggttttgctgttaatcaatgaacatcaggtcgcttattatgccgtccgaaacaaagataccttcccgggtcaggcgcaggcggtctgcctgcatctccagtttgtggctttggaggtagggggctgccattttcgtgcaatattggcacaactctgtgccgaaggcttcttccgtatatgtcagggagattccccacatggtacgcagggaagtcataatgtattcattgtaacgggtcactttatccagaatttctgtttcggaggaacggtgtccctcttcaatggactttatgtatccttccagagaagctgtgttccattcccttgtctccgcattgaaggagtgggctgaagggccgcagcccaaatacggaatgcctttccagtaagcagtgttgtggcgtgagtacatgccgggcttgcagaagttggatatttcgtaatgctcataccccgcggctcccagggtgtccatgagcgccgagaagaagcgcacgctactctcttcatccacttcgctgatacgatggctctgcagcatttcgtagatgcgggtacctttttcgtaagtcagatgataagcggagatatgctccacatcaaggccgacggcttgttgcaggtcgcgttcccaccgttggtctgtttcatccggtagtccatagatgaggtcgatgctgatattccggaagccggcttggcggaggcggtgtatggctgcgatggcttgcgcggcattgtgccggcggttcaacagtttcagggtgggggcgtcgaatgtctgtatccccatgcttatgcggttgaaggggagggtgcgcagcatggacacatattcttccgtcaggtcgtcgggattggcctcgagggtaatttcttcggcatgttctgttccatacacctctttgatagtccggaatatctgctcgaaatcttcgtgagcgagctgtgagggagttcctccgccaaagtagatggtctctatcggttcttccttcagataacccttgcgggttttcagttcagtgcacaaggcacggatgtactgctgcttcaattcgctgcgagtggtggaatagaaatcgcaatagatacagcgtgtcttgcaaaaaggtatatgaatatagatgcctgccatggtatgcttatggatatttgttgcaaaaatagtctttgggcaggagaatatatcggttttcgggacatttaatgtaatatggaagtagtcagtgtcttggtggatattctcagttttgtctgtaatccggaaaaatagaacattttttgagtcgtatggaaattcattattccgaataatctccttctatgttgtattccaaataactgaatacttttttatttgttattaactttataaatcaatttgttacatgattttttcccaaaaggagaaacaataccccctttagataagggtaaatatccttatcctcaacagcgcacaagtcctaatttcttatgctgttatactctaaaataaaatccctatcagacaaacttcgataagttgacttggtgtcttgtaccaagcaacaagttactacttcaggctataggataaacgcaacaatctttctttagatgaagcgcaatactcatcatggagattgtaggagtcgttttaattatcttgttccaatagggttctatttttatcgcaccttgtcatattggtatttcttaccggatttgagtacgctcaaaatcctatttgacatttttcttgctatcctgatgatggcttcttgccctttcatccgtttgcaatatgctccataagccattgacatagctctgtcatgccgtatagagacccatgcactttctataaccaaaggaccaaggtgtttattgcctctgaaagtcttttccatattgtaaatattttcaccactgctatggcaagacggaatcagaccaagaaaagacgcaaattctctttgattgtgaaaccttgacacatctccaatttccgtaagaagacacatggctgtcacaaggcctataccaggaatggagatcaagttctcatattgtcgagaatattgcggtttctttgataaatcacgaaccatccgggtagctttcagtagattttttctgaacagcttaacctggtctatcaacaaatccaaagaaagtctggtggacgacaataatctcacttcattttccaaccaatatataaaacgattggaccaatgagaacggctgttctcaaaacaatcaggataggaaatcccattattgtaaagtaaatgcttcacacgtgatttatatcctccaagttgcttctgtaaagttttaggtaatctgataagactacggtcatccaattcttctttgtccctgacgtatattcctctcaataaccctccttttaaagatttagccaatttttctgaatctatggcatctgtcttcatcacattctcatattgagacgtaggaacatccgcagcatgaattatcatgcactttattccgtactccttcaaagcatagtaagtggaatacccactaaagccgctttcatatacagcttgatatttgccattgggataatgtttcttcaaatgttcaaagagctctttggctgaaggtttttgtgagtgagttcttttataacccgattctgttattatagttacactccaactcttcagatgcacatcaatacctatatagatattttgaccattaaaatttattcctttactttgtaccataggtgtaatagtttggattattaattcattgataaactctcatttacaaagttaataattctattattacgcctattcttatttaatcatcggtcggggagcgcccagcggcaaggggcgggaccacccgtcccgacgagcgattattttgaacgtctacaaacatagtatctttcctttgttatcagaaaaaggaatgggtgtctattaaaataatgagtaatatgtttgaaggacttgacttttggtttgaacagattatagcttattgcattgccctcgtactggtgcagttcatgaagaaacaaatatagcggcaaatactttattcacttccgtcgtagcacggtttaatcttaggctttttcttgtgatttctgagcttttggggtactaatgaccgatatttacccctttttgaaacaatagtgcccccgaaattaccgggaatggggtaattttgcagtattgaaaaacaaacttaaataatatcatgagaaaaagtaactacttatggctgctgctggtggcagttttattgctgcccgctcaggaaatggctgccaagaagaaaaaagagaaggaagtgacagaccgcgaactttgggccggggtgttgtatcaaatggctgctccggtactgagcaatatgagtgaagggaagctccaggaaaatatgcaggtggagcttagccccacttgggatggacgcgacaaacgggtgacctatatggaatgtttcggacgtctgatggcggggttggcgccctggctctctttgccggacgatgacactgccgaaggcaagcagcgcaggcagctccgcgagtgggcattgaaaagttatgcgcaggcggtagacccggaaagtcaggattacctactttggcggaaagaggggcagccgctggtcgatgccgcttatgttgctgaaagcttcctgcgaggatacgatgctttgtgggtgcctctggatagtttgactaaacggcgttacattgaagagttcacccagttgcgccgtgtggaccctccttataccaactggctgctgttctcgtctacggtagaatgtttcctgcgcaaggctggtgccaagagtgatgcttaccgtattgtctccgctctgcgcaaggtggaagagtggtatgtaggtgacggcttctatagcgacggaccgggatttgcctttgactattacaacagcttcgtactccatcccatgtatgtggagtgtctggaagtctttacgaacagtggaaaaaataagatatggaatgcgccggattgcaatttccagcgtgcccagaagcgcatgcagcgtttcggcatgattctggaacgtttcatctctcccgagggggccttccccgtattcgggcgttccattacctaccgcaccggtaccctccaaccattggctttgttggcatggcgtggatggttgcccaaggaattgtcgaacggacaggtacgtgctgccatgacagctgtcatcaaccgtatgttcggtgacaaccggaacttcaacgagaaaggttttctgacattgggattcaatggttcccagcctcatatctccgactggtatactaacaacggcagcctttacatggcttccctggcattcttgcccctgggcttgcccgccgaccatccgttctggacagatgctccgcaggcatggacctcgaaaaaggcgtggggtggtgaagaattccccaaagaccatgcctattatgagtaagactgattcattttttatagtatttatattaattgtttgggggattggtggatttccggtggcactctgtgcacagggtgctgccggtgtccttcccgaaacgcatctggtggaagtggggaaaggatacagccagacttccgtcaacactgccgtattccgtaataattcgctggtgacgcaaggtgacgagcaatacatcagttactatgatgcggaagggttcctgactcttggaaaacggaacctccatgccggacagtggacactgcaccgcacacagtataaagggaatgtgaaggatgcccataacgtcatcagcatgatgctggacggtgacgggtatattcatgtagccttcgaccatcacggacagcccttgaactactgtcgcagcattgcaccccattcgctggaattgggtgagaaggagcccatgacgggcgtggatgaaggcaatgtaacctatccggagttttatctgctgtccggaggcgacctgctgtttgcataccgttccggttcttccggccggggcaacctggtgatgaaccgctattccttgaaggagaagaaatggagccgtgtgcaggatgtactgattgatggcgagaacaagcgcaatgcttactggcagctatatgtagatgagcttggaaccatccatctgtcgtgggtctggcgcgagacttggcatgtggaaaccaaccatgacctatgctacgcccgttcctttgacaatggcgtaacatggtataaggcaaatggcaagaaatatgatttgcccatccgtctgggtaatgcagagtatgcctgccgcattcctcagaattcggaactgataaaccagaccagcatgagtgccgatgcaggcggcaatccgtacattgcttcctattggcgcgacccggacagcgacgtcccgcaataccggattgtctggcatgacgggcagatgtggcacagccgccaggtctccgggcgtaccactccgttttccctgaaaggtggaggcacgaagatgattccgatggcccgtccgcgcatcgtagtagatggcggggagatattttatgtatttagggatgaagaacgggggagcaaagtctctttggcgcacgctacggatgtggcaaacagtaagtggagcatcagcgatttgaccgacttcactgtcggtgcctgggaaccgtctcatgacacggaattgtggaagagcaggaagcggctgcatctgtttgtgcagcatgccaagcaaggagacggagagcgggttgtggagtttgcaccgcaaccggtatatgtattggaagtgataagataaaagaacagtattagtatatgaaaacgacatgcttatttttattgggtttggctttttgctggggactgttctcatgcaccgctcagcagccgaaaccggaagaagtgattgagattatcaatcgggtgaacaactattggcaggagacccatccgcaacatgggcgctctttctgggacaatgccgcctatcatacgggaaacatggaggtgttcttcctgaccggtaatccggaatgctatgcctattccgaggcgtgggcagaacataatgaatggaaaggcgcgaagagtgacaacaaggaagagtggaagtacagctatggggagagtgatgattatgtgcttttcggtgattatcagatttgtttccagacttatgcggatttgtataccgtgaagccggattccgggaagatagcccgtgcgcgcgaagtgatggaataccagatgagtacggacaagaacgattattggtggtgggcagacggactttacatggtaatgcccgttatgacaaagatgtacaagctgaccggcaatccgttatatctggagaaactgcatgaatactggacctatgccaacagcatcatgtacgatgcggaggaaggcctatactatcgcgacggcaaatatatttatccaaaacataaaagtgtgaatggtaagaaagacttctgggcgcgtggcgacggttgggtgctggctgccttggcaaaggtactgaaagacctgcccgaaacagaccaataccgccaggagtacatagaccgcttccagacgatggccaaatccgtggctgcctgccagcagccggaaggctactggacacgcagtatgctcgaccctgagcatgctcccggtcctgaaaccagcggtacggctttctttacctatggtctgttatgggggatgaacaacggcttgctggacaaggctacttatcaacccgtagtgatgaaggcgtggaattatctgactactgtagccttgcagcccgatggccgcatagggtatgtacagccgattggcgagaaagccattcccggacaagtggttgatgccaactctactgctaactttggggtaggggcatttctgctggcagcttgtgagatggtgcgttttttgaatgccgactgattggagagattaaataagtgtatatgttacacaacatatacactttctttgtattataatgtatatagtgttaattttacacccgttaaaaggtttaatataaaaagattatgattgtacggatgaaaaacactttccggatgcttttggcggcaatgttattgtcgttgtttgcacttccgggatattcctggcaaaaatcctttcccgaaaaagattatgtagcttatttgttcacttatttcactgggaatagtggcgatgaagaagctgtgcgctatgctgtaagcatggacggttatacctactgggcattgaatgataatgaaccggtaatcgactcgaaagtcatcagctccaccgggggagtccgcgacccgcatatccttcgttgcgaggatggcaagactttctatatggtagtgacagatatggtttcagccaatggatggagttccaaccgtgccatggttttgctgaaatctaccgacttggtcaactggtcccactccgttatcaatatacagaaacgttattcaggtcaggaggatttgaagcgtgtatgggctccgcagactatctacgacccggaggcgggaaagtacatggtgtattggtccatgctgcatggcgatggagccgatgtcatatattatgcttatgccaatgcggagtttacggatttggagggagagcccaagccattgtttctgccggagaacgggaaatcgtgcatcgatggagacattgtctataaggatggtgttttccaccttttctataagacggaagggcatggaaacggcataaaggtggccaccacccgttccctgacctccggggcatggacggaagagcccgattacaagcaacagactaaggaagccgtagagggtgcgggcactttcaaactgatagggcaggataagtatatcctgatgtacgacgtctatatgaaaggaagctatcagtttacggaaaccactgacttgaagaattttaaggtgatagacagcgaggtgaagatgaacttccatccccgtcatgggaccattatccccattacccgccatgagctgttgcgcattaccgatgaatggggcaagccgacagaactgggcgcattgcccaacaatcccgtattgccgggtttccatgccgacccggaaatcctttattcccatcagacccaaaagtattacatctattctactacggacggacagccggggtggggaggctggtactttaccgtattctcctccacggatttgaagacttggcaggatgaaggcgtcatgttggacttgaagtcggagcaagtgccttgggcagatggcaatgcttgggcgccttgcattgaagagaaaaaagtggacggcaagtataaatacttcttctattacagtggaaatcccaagaatggcggcggcaagcagattggagtggctacgagcgattctcctgccggccctttcaccgatttgggacgccctgtcgttactgcctcacccgtcggtggcgggcaacagattgatgtggatgtgtttacagaccctgtttcgggcaaatcctatctttactggggcaacggctacatggcaggtgccgagctgaacgacgatatggtgtccatcaaggaaaataccgttacggtgatgacaccggcgggaggcaccttgcaggactatgctttccgcgaagcagcttatgtcttttatcgcaacgggctctactatttcatgtggtcggtagacgataccggttcgcccaattaccatgtggcatacggtacatccaagtcgccgctcggtcctatcgaagttgccaagcaacccgttgtgctgattcagaatccggaaaaggaaatttacggtccggcacacaacgctgtattgcagattcccggtacagatgagtggagaatcgtttaccaccgtattaataaatggtacttgaaagatggccccggcgttcatcgtgaagtctgcatagaccggatggagttcaatgaagacggaaccatcaggccggtggtgcctaccttttaatttaatgatataacataataatttaataccatgaagaatagattgaaattactggtttggttgtttgccctctcaggtccgctggcagcacagagtgtatctgtcaatggtccggatggaaaattgcagcttacggtatcctgcccgtcagccaacggcgaagtgtcttacgccgtcacctacaatggaaagcaaatgctggaatcttctcccttggggatggagacaaatgtgggtgatttctatagaggattgcagttgaaggaacataaagtcacagctcttgatacggtttatgaacaatcccgaatcaaagcttcgcacatccattaccgggcaaacgaattgctttgttcattcgtcaacggtgaggggaagaatgtgcagataactttccgcgtcagcaacaatgacgtggctttccgttacaccttgccgagggagcagggaaaaggaagcgtcacggtgaacagcgaacggaccggcttccgcttcccgtcgcagaccaccactttcctttgtccgcagagcgacgccatgatagggtggaagcgtaccaaacccagttacgaagaagaatataaggcagatgccccgatgaacgaacgttcgggttatggacatggatatacatttccctgcttgttcaaggtgggggatgacggctgggtactgctcagtgaaaccggagtggacagccgttattgtggctcgcgtttgagtgattgggataacggcgtgtatcgcattgctttccccatgccggaagagaacaacggcaacggaacggtgtcacctgccttttccctgccgggctccacgccgtggcgtactgtgacggtgggcgaaaccttgaagccgattgtggaaaccaccgtcccctgggatgtagtggaaccacgctataccaccacccatgattacaagccgggccgtggcacctggagctggattctctggcaggacggcagcatcaactacgacgaccaggtgcgctatgttgacttggcggccgccatgggatacgaatatgtattgattgacaactggtgggacaacaacatcggtcgcgaccgcatggaacagtttgtcaagtatgcccgcagcaagggtgtggaggtattcttgtggtatagctccagtggttactggaacgatatagagcagagtcccgtcaaccggatggataactccattgcccgcaagcaagagatgcgctggttgcaaagtctgggtgtgaagggtatcaaagtagacttcttcggcggtgacaagcaggagaccctgcgtttgtacgaggagattctgagcgatgccgacgaccacggtctgatggttatcttccacggctgtaccttgcctcgcggctgggaacggatgtatcccaattacgtaggcagcgaggcggtgctggcttccgagaatctggtatttagccaacatttctgtgataacgaggccttcaatgccacgctgcaccctttcatccgcaatgctgtgggatgcatggagtttggcggtgtgttcctgaacaagtgtctgaaccgcagcaacgatggtggaactattcgccgcaccacggacatctttcagctggcaacggcagtgctgttccaaaatcctatccagaacttcgccttggcacctaataacttgacggatgctccgcaaatctgcctcgactttatgaaacaagtgcccactacttgggacgagacccgtttcattgacggctatccggggagatatattgttcttgcccgccgtcatggaaacacgtggtacatagccgctgccaatgcaacggcggaaccgttgaaactgaagcttgaccttcctatgctggcaggacaagaggtgtctttgtatagtgatgacaagaagatgcagcctcaattaaagctgcagaagataaagactgatggctctctgcaactcacggttcagccgcagggaggggcggtaatcgtgaaataaagaaggcatggagcaacccttgttttgtaatgatatatcataacggattgctttatttgtaaatacctgattatcaaatgactataattggtctaattcagtcgtatactgaatggcattcactatacgactgaactttattcactatacgactgaatggcattcagaatacggctgattgtgactatcgaactaaatgtaaatgattaataccgacttaataccatgaatagattcttgaaattattgtccttgtgtctgttcttgacactgaccgttcctttgcaggctgtaacgaatggagtggcgaatgaacccgattcagtctacctcttttcctattcccatgccgacggcagtggcggtctgaaactagcctggagtcccgatggcaaccgatggttcagcgtggcagacggcaactcttttgtcaactcggacttcggcccctgggggcaaatgaagcggatgctgaaaccgcacttgatgcagacccgtgccgacgaccgctggcactgcatctgggaactgacggaaagcggaaactccctcgcatacgtcgagtctcccaacctgctgcaatggaaagcgcagaaatactttgaccgttcccgccttgccgaatatcggccggcagaggtctatcccaccgtgcggaaggaggttctgctgaacggtaccatgcagcagggctggatgcagcgtgtgccgtatgccacggtgcagcgtgtcatctcctttgcggagcataagaagtaccgccaggcactctatgccgaacgtaccgagcaagaccccgtccgctttgccggcctgaagccggtggaggcaaccatcgaagtggagacggaatgtgcaaaacccatcagcaagcatctgataggcatcttcttcgaagacataaactatgctgcggatggaggactgtatgccgagctgatacagaaccgcgacttcgagtattcgtccaaagacggttctcgtcaaggttgggacgctacatatgcctgggcggtgaaagagggcgatgcttcggctgccgtaaccattgccactgccgaccccatccatcccaacaatcctcattatgccgtactggaagctcgtcccggagtgacattgcagaacgacggtttcgacggcatcagcctgaagaaaggggagaagtacgatttctctctcttcgcccgcgtggcaccgggcagcaaggaaggcaaggtggttgtttgcctgctcgaccaggatggccgtgagattgcccgttcttccgtcaatgtgtcctccaaagagtggaagaaacagcagacggtgctgacagcaaacgccgatgtgcgtgccgccgtgctctcgcttcagccgcagacggtggggacactgcacctcgatatgatttccctttttccgcaaaatacattcaagggacataagaacggcttgcgtatcgacctggcgcagacgcttgccgacctgcatccacgcttcgtccgctttcccggcggctgcgtggctcatggcgacggcatcgacaatatctatgactggaaaggctctatcggcccgctcgaggctcgtaagccgttgcgcaatctgtgggggtatcatcagacacgcggactgggctacttcgagtacttccgcttctgcgaagatataggtgccgaacctctgccggtattggcagcgggcgtgccgtgccagaattcgggcacacactcgcactatgccgacaactgtccgcagggggccaacaaggaactgatgcgctacggccagcagggtggcatcccgatggaagagatgcctgcctatatccaggatgtgctcgacctgatagagtatgccaacggcgatgcacgccgcaccgtgtggggcaggaagcgtgctgaggcaggccatcccaagcctttcaatctgaagtatatcggcatcggcaacgaggatatgattaccgaagtgtttgaggagcgctttgccatgatatacaaggctgtcagggagaagcatcccgaaattacggttgtcggcactgtaggtcccttctacgaaggcacggactatgcggagggctggcgccttgccacggaactgggcgtgcccatggtggacgaacactattacgtggatccgggctggatgattcacaaccaggactactacgaccgttatgaccgtaccaagtccaaggtctatctgggcgaatatgccgcccacctgcccggacgtcccaacaacatagagacagcgttggcagaagctctctatctgacttcggtggaacgtaatgccgatgtggtggagatgacctcgtacgccccgttgctggcgaaggaaggccatacgcagtggaatcccgacttgatttatttcaataacacggaagtgaagcctaccgtgggctactacacacagcagatgtacggacagaatgcgggtacgcagtacatcacctcgcacatcacactgagtaatgggcaagaggctgtccgtaagcgcgtcggtgtttcggtggtaaaggatgaggccacgggtgaccatattgtaaagctggtgaacctgcttccggtggaggtttcctctacagtgaagctgaagggcatcgacttgcagaatccctcggcagtgaagacgctcctgacgggtgacccgaaagacaagcaggcacgttccgtgacttccgccttcgtcgacatcggcggtacggagtttccttataccttgcctgcctattcgtttacggtgatacgtatccatgagaataaggggaaataaggataaatccgtgtaattccgtgcgtgggaacttaagaacttaaaaacttaaaagatatgatacgattattgactttggcacttgttgcagccatgaccggcagtgtgtcggcacaaaagcaacagactttgcattccggttatcccatcgacccggttcctttcacttcagtgaaggtgacggacagtttctggggacaacgcttgaaggcaagccgcgaggtaaccatcccgttggctttcagtaagtgtgaggaaacgggacgttatgaaaactttgtgaaagctactcatcccagtgatgagtataaggtgggaggcttctcctttgacgatacggatgtctataagacgattgaaggtgcaagttactccttgcagacttacccggacaagaaactggaagaatatatcgacagcgtattggtcatagtggccgccgcccaagaaccggacgggtatctttacaccgcacgtaccatgaaccccaagcatccgcacgattggtcggggccggaacgctggtcggaggtggagaatttgagccacgagttctataatctgggtcacatggtggaaggggctgtggcttattatcaagctacaggcaagcggaacttcctggatatagctatccgttatgccgactgcgtatgcaagaatatcggtgaaggccccggacagaagcgtgtgattcccggacatcagattgccgaaatggcattggtacgcctctataccgtgacaggagataagaaatatctcgaccaggccaagttcttcctcgacgcgcgcggcactacggcacgcaaggacatctatttgcagtcgcacaagcctgtactggagcaggaagaggcagtgggacatgccgtacgtgccggttacatgtattccggtatggctgatgtggctgccattacgggtgacagctcctacatcaaggctatcgacaagatatgggagaatatcgtcggcaagaagatatatattaccggcggtatcggtgcgcgtcatgcgggcgaagctttcggtgataactatgaattgccgaatctgactgcctacaatgagacctgtgccgccatcggcaatgtttacatgaattaccgcctctttctgctgcatggcgattccaagtatttcgacgtgctggaacgtacgctttacaacggattaatctccggcgtttcattggacggaggcaagttcttctatcccaatccgttgtcttgcgatggtaagtatcactttaatgccgaccatacgattacacgccagccgtggtttggttgtgcctgctgtcctagcaacatcagccggttcattccttctttgccgggatatgtgtatgccgtgaaagacaatcaggtgtacgtcaaccttttcttgtccaaccgtgccgagctgaagttgaatgaaaagaaagtggtgctggagcaggaaaccggatacccctggaacggagatattcgtgtgaaggtggctcagggcaacctgccgtttacgatgaatatccgtattccgggttgggtgcgcggcagtgtacttccgagtgacctttattcgtatgccgacgacctgaagttgggctatcgtgtattggtgaatggcgaggaggtgaccggtgaacttcgtaaaggctatctccggatagaccggaagtggaagaaaggggatgtggtagaggtgcatttcgacatgcacccccgtgtggtgaaagccaatgaaaaagtggttgccgaccgtggacgggtggccgttgagcgtggtcctatcgtttattgtgccgagtgggccgataatgattttaatatacagaatatcatcctgaaccgtcatccgaaattccaggtgacggagaagcccgaactgctgtatggcatcaacgaaattaccacagaagtgcaggctcttggttttgatgctgccggaaagttggcaaccagagatgtgacgctgaccctgataccttattatgcatgggcacaccggggtgagggcaagatggatgtatggttgccggtaaataggattgatgtagaataggtaagtatgtcgtcataatttagcttatgctatcgttataaacagattaaaaccatgaaaagacttttatttctattgacattgttcgttgttcttggcatgcaggcgcaacagcatgtgatgactgttgatgtatcaaaaccgacggctcggataaatcctgccatgtatggaatcttcttcgaagacattaatttcggtgcggacggtggtttgtatgccgaactggtaaagaaccgctcttttgagttcccgcagccgctggtggggtggataccttttggcgaggtgacggtacaggacgagcggccctgcttcgaccgcaatccgcattatgtgcgcattaccaatgacggctgtcttttgcgtgccggactggataatgaaggttatcgtggcatcggcctgaaaaaaggagaagattaccgtttctccgcctatgtccgtacgccggataccaaaccaatgaagctttccgtcgaactggtgaattccaacggagagaatctcctgaagaaggaactggaagtgaaaggcagtgaatggcagaagctgacggctgtgctgaaagctccttttaccgatgttcgctcgcgtctgcgtgttgtgttgcagacggagggtacggtagatatggaccacatctctctcttcccggtgaacacttggaagaagcgtgagaatggattgcgtgccgacttggtacaagccctctatgacctcaatcccggagtattccgttttcccggcggttgtatcatcgaaggcaacagccttgccacccgttatcaatggaagaattccgtgggtccggtagagaaccgtcctttgaacgaaaatcgctggaactatacattcaagcataaagctttcccggattatttccagagttacggacttggcttttacgaatatttcctgctgagtgaagacctcggtgcagagcctctgccggtactgagctgcgggctgtcctgccaatacgaaagcaacgaagtggttccccttggagaactcggcccgtacgtgcaggatgccctcgacctcatcgagtttgccaacggtgctgcaacctccaagtggggaaaggtgcgtgccgatatgggacatcccgaaccgttcggtctgaaaatgattgccatcggcaatgaacagtggggggaagtctatcccgagcgtctggaagtgttcacgaaagccatccgtgcggaatatcccgatatgcagattgtaggttcttccggtccgagtgcagatggggacaagttcgattacctctggcccgaaatgaaacgcatcggggtggatttggtggacgagcattattatatggctcccgactggttctttgccaatgctgcccgctatgatgactatgaccgtaaaggaccgaaagtctttgccggtgaatatgcatcgcatgaccaccccaccgggaaagccaataatttcttggcggcactgtccgaagcagcttttatgacgggactggaacgtaatgccgatgtggtgcgcctggctacctatgctccgttgtttgcccatgtggatgcctggcagtggaatcccgatttgatttggttcgacaatctccgtatgatgcggactcccaactattacgtacagcagatgtacggtatgaatgccggaacagatgtgctgaacctgcaaatggacggaaaacccgtgacggggcaggacagcctttatgcatcggcagtgctggatgctcctacgggagaagtaattctgaagcttgtcaatgcgggcagcagatcggagaaggtacagatagagttcagcggattgaagaagcggcagcttgtctcgggttcctgcacctatttgcaaagtgatgactggaaagccaagaatacactggagcaggaggctattgttccacgtattcgtccggtggaggtggcttcccgttctctgagcctggagcttcagccccgttcgttcggagtctatcgtttgcggataagtactcaatcaaaataaattcccatttagtcacctaatttaattatgtgaactagttatgaacacttatttaaagaattaaattcagccttttttgaacgattattcttccttttaattataggataggcgtatctttgtgacggcataccggttctgcttgtatgccgttgctaatttttataaactatttaccatgaagaaacatttcattaccggactgcttgcgacttttgccattgccgcaagcgcacagtccttcactgaatggcaaaaccctgaagtgaatgccgtgaaccgtgctccgatgcacaccaactattttgcctatgagtcggcagatgctgcggctcgtggagcaaaagaacattcttccaattacatgactctgaacggtatctggaaattcttctgggtgaagaatgccgatgcccgtcccacggatttctggaaagtggggttcaacgacaagggatggagcgatatggccgttcccggtatgtgggaactgaacggtttcggcgaccctatctacgtgaataccggatatgcctggcgcaatcagttcaagaacaatccaccgcaggtgccaacggagaataacaatgtaggttcctaccgtcgtgagattgtaatacctgccgactggaagagtaaggacatcattgctcatttcggttccgtgacttccaatatgtatttgtgggtaaacggcaagtacgtaggttatagtgaggacagcaaactggaggctgaattcaacctgacaccctacttgaagccgggacaaaagaatctgatagcctttcaggtattccgctggtgtgacgggacgtatctggaagaccaggacttcttccgttatagcggtgtagggcgcgattgctacttgtatgcccgtgacaagaagcgcattcaggacatccgtgtcactcccgatttggatactgcttataagaacggttccctgaaagtacagcttgatgtgaagggtggcggcaatgtcagtcttgaactgctggacgctgccggaaaacaggtggctacagctgtcgccaaaggtaacgctactgccttgataaatgtggagaatcctcataagtggacggcggaaacgccctacttgtataccctacgtgccactttgcaaggcagcagtgaggtgattcccgtaaaggtgggcttccgaaagatagagctgaaaggaagtcagatacttgtcaacggccagcccgttctcttcaagggagccaaccgccacgagatggatccggacggtggttacgtcatttctcgcgaacgcatgattcaggatattcaggtgatgaagcagttcaacctgaatgccgtgcgcacctgccactatcccgacaataatctctggtacgacctctgcgaccaatatggtatttacgtagtggccgaagccaatatcgaatcccacggaatgggttatggggaagagacacttgccaaacgtgaggactataggaaagcacatatggagcgtaaccagcgcaatgtgcagcgtagcttcaatcatcccagcatcattttctggtctttgggcaacgaagccggctatggcgctaatttcgaagctgcctacgattggataaaggctgaagacccgagccgtgccgtacaatatgaacaagccggtaaaacaggcaagacagacatctattgcccgatgtattatggctatgacggatgtaagaaatacagtgaggatgattctatgacaaagcccctgattcagtgcgaatatgctcatgcgatgggaaactcgcaaggaggttttaaagaatattgggatttggtgcgtaaatattccaaattccaaggtggctttatttgggattttgttgatcagtctgtacgttggacaggaaaaaacggtaagatgatttatgcctacggcggtgactttaaccgttttgatgccagcgacggtaacttctgcgataacggtcttatcagccccgaccgtgtgcccaatccccacatgtatgaggtaggccgtatctatcaggacatctggactactccggccgacttgaagaacggcgaaatcaatgtgttcaatgaatacttcttccgtgatctttctgcctattatatggagtgggaggtactgaaaggcggtaaggtgatacggaccggtcgtgtggataatctgaatgtagctccccaacagacagccaaaatcaagttggacttgggcaagacttgccaatgcaccgagtggttgctgaatgtttcctataagctgaagaaccgtgaaggattgctttccgccggacatgtagtggcaaaagaccagttgacgctcaatccttaccaagctccttccatggaattgaagaactgcgaacagagcaatatcgagatgacggctccccaagtacaggataacgattggaactacctcatcgtctccggtgatgctttccgcgtagaaatcaacaagcacaacggttatctgactaagtacgaagtgaatggccgggatatgattaaagacggcgaggctttaaaaccaaacttctggcgtgcgcctgttgacaacgactacggtgccaatctgcaacgcaaatatatcgcttggaagaatccggaaatcaaactgacctctttcaaacagcgcacggagaacaatcaggtgattgtagaatctgcttacgacatgccgggtgtttcagctaagctgaaccttgtttatgtcatcaacaatgccggtgccgtcaaggtgacccagaagctgactgccgacaagaatgccaaagtatcgaacatgttccgtttcggtctgcagatgcctatgccgcgcagctttgaaaccgttgaatactatggacgcggtccggttgaaaactatattgaccgtaatcattgcgccgacttaggcatttatcgccaaagtgtggctgagcagttctatccctacatccgtccgcaggaaaatggaacaaagaccgatattcgttggtggaagatgttggatcagtctggtaatggcatcaagattgtggcggccgctcccttctccgcatctgccttgcactataccatcgagtctttagatgaaggctggagcaaagagcaaggacactcgcaagaggtggatgaagctgatttgactaatctctgtatcgacaaggtgcaagccggtctgggttgcgaagacagttggggacgtatagcccgtccggaatacctggtgccatacgctgattatgagtttacgttcatcctttttcccgtatgccatagtatcggaatagaataatatttcttctcagtgtattacatactgagaaacagattttataacactgaagcggtcgcctttccgatgggggagggtgaccgctttgtgttgatgttttgcttgcttctgtatatttctttgttttattgtttctgatttcggcaaatgcaatccgtcagatggtcgttgataaaccccgaagcttgcagatgggcatagcaaatggtagagccgaagaacttgaatccccgttttttcatgtctttgctcatggcatctgattcgggagatgataccggaatctcactcaatgactgaaaatgattgataatggggttccggtcggggaagaaggatagcgtatagttgtaaaagctgccgaattctttctgtatgacaagaaactgctttgcattggtgatggtcgacttgattttcagacggtttttcacgatgccgtcaaagtgcatcagccgttccacgtcttcgtcggtcatttgcgccacttgcgcggcatcgaaattgcaaaaggctttgcggtagccttcccgctttttgaggatggttatccagctcagtcccgcctgggcactttccaatacaagaaactcgaatagtgtcttgtcgtctgttaccgtttttccccactcttcatcgtggtatttcacatacagctcgtcggttccgcaccagccgcaacgtccgtttataatgtcttgcataagcgttatttttgtaatgaggtgctaaggtagtgctttcattccgaataaacaaatctatctattctaaatggatagatttgtttattcagaatggaatgtttatatttgtatctgaatataaatgacatagccctatgataagcaaatcggatatagtagaagccatacgtgtgcaacgtgaacggttgaggaaatttcaaagtttccgacgtgacctattgttgtctttacctcccttggtagcagactatgcactgattatatctggtattcgccgttgtggtaagagtacattgctggcacaattatcggtggatagatacaagccggaagaggtgctctccttgaattttgatacccctttactgtatggatttgaattcagtgatttccgtatagtggatgaagttattaaggaacatgaagggtgtatcgctcttctttttgacgaaatacagattgttgatggttgggaggtgtatattcggggcaagttggatgaagggttttatgtgggaatcaccggctccaatgcttcgatgttgagtcgtgaattgggcacgaagttgacaggaagacatattacgaaagaactgttccctttttcgtatgctgaatattgcggttttacgggtaagactatcggtgacagttccttgtacgactatctgcatcggggtggcttccctcaatacttgcaactggatgatcaggatgttctgacggatttagtcaatgatatagtatatcgtgatattgccgtgagatataatatacgtgatgaccactctttgaaaagtctcttggcctatttgatggggaatgtgggcaatctggtgtctgctacaaaactgaaacagatactgggaatgaaaagtacttctactgtgtctgattatttctcttatttcgaacagacttacttgataaactttgttccgaaattttcatattcatataaagcgcaactgttgaacccgaagaaagtgtattgtgtggacaatggtgttgtatttgtcacctcttcatctttcacccgtgatgaggggcggaggctggagaacatggtttttgcggaattgcgtcgccgttattctgagatattctattataatgagaaccggaaggaatgcgactttatagttgtacgcaattctgtgccccagcttgccatccaggtatgctatgccttgaccgcagaaaaccggaaaagggaagtagatggcttactggatgccttgtctttcttcaagatggggcatggactgatactcacttataaccaacatgacaaattttccgtaggagataaaacgatagaagcattgccggtgtctgaatattttaaagactaatcttcttgtctcttgcactccaccacatgatacagcgtgccgaaccgtgttctgcgggacggcacttcatgtttctgcagtatccttccgaatacattcactctcttggtggacagcgggatggcgctgtaccggcgcaggcggttcagtatttcggcagacgacagccattctccctcctcgtcatttccggcaacgcggaaatagtggtagaacagttgctcttcgggcggtatctgttcgaaatcgtggttgttttccgtcataatccgttcgtccgactggtcgaaccaatagcgttcgccgtggtccagttcgtgcatggcctgggcataaagctggttgtagtctatcgggcggttggtgtctattgcttccgtcacttctatgcagatgaaccggcgactgccgctggggtcggtcagcaagtccttctggttgctggtggcgatgaacgaggcatatcggcgcatctcgagcacggcattggcgtatggcttgcgcacgttgaccaccggcttctggaggatatgtttcaggaatccttgctgggtgctgcttatctggtcgaattcatcgatgttgatgagcgcaaaacggttgaggtaaagttcggcgtcgcgcttgcgcgagaagtcgatgctgtccgtataataggcacgcagctcgggcgggacgatgcttcggcaaaaggtgcttttgcgggtgccttgtgcacctaccaataagggggagacgctgttggcatatttcttgtcggtattgccgcgccagtgtgccaccatgttgagaaaccagcggtggaacagttcggcccagtacgggttgttgcagggtactgtccgggcgagtgccaggatacggtctttcccgtcccagtgcggaaggtcgtacagataatcttccagcggattgaataccgggatgcggttggagtagatgtaccggctgatgtctctgtcccacaagggaatgccttccgactgtgcatccagtgcaatgctgttcagcgtgcgcttgtcgatgggggagaagcggaaacggaacgagtggcgttcacggtattccacttcgcccacctgggtattgtagcggaagtcgtagcggcgtttcatgaactcgtccgtctgtatggcaagtctttgctctttgctgaggctgctttgggtattgaagcctttgttctcttggtaaacgcttcttacaatctgccggatgacagtctctttttggcgcagataataatggaaataggtacgcttcacggtctcttcttcggggatgcccgaacggaaacagttctcggcaaggcgtacggtcagggagtgcaggctgttgtcggcaccggcacccgtcgcttcggcgaaagtcttctgcaaggcggcttcaaacagcatgatgatggcttcttcggcttcatatcccggcacggcgcgcgtcagggtgacttctcgtcttgcagggcttcccgataggtggtttcgtcgggcatggagacgggctgtgcaagatagaactgtatggagtccgggcggtacatggcttcggggtcgaaggagaggcgggagtactgttccagcttgggctctttcagcagaatgtcgaaaggcagttggggctggtagcatttcacggcaaggcggtaggcatgggcgtggaatacttcggcttcttcccgtttgcccggcagcgaattgttcggacgggtgaaggtagtccaaatctttacagtccgtccgctggaaccggtgaatacgagccgcgtctggggctgttcccaggcaagacgtttcacaagggctatttcggacttgccggaaagcgggcctacggtcagttccacgatgccgttgtaggttttcatctggcagacaccgttcgtcttgcggaattcggctgccgggagtactttgggcagtcggtctgcctcgttgcagcgcttgccgggcaagcagtatcgcagttgctggcggaaagtggatacgggctgggttttggtctccgttttgattttctgtaggaaggtgtccaagtctgtcgtgctcagtgtcagattcccgtctttttctctcagttgggtgattttcatttctattttttgttttgtcacatgcaggcaaaatggtttgcttacagtgtactaaggtacgacaattaggctctttttgcaagtgattccatgcttttttaggtcgattccagcgtttttctgtggaaaatctgatgttttgagtcgaaaaagctggtgatttgggatgctttgtgcagacttccacgctggttttgcttgtcggaacaatagtttccagctattgaaacaaaaggttttacttgttgaaaccaatggttttcctaagggaaactctcagtttctcttgttgaaacttttgttttagaaggttaaaaccaatagtatttgcttaagaaactaaaagtttcatactgagaactaggcatatagcactattctgtggtgaatgaagtaagtatcggatactgcttttgttatggcgtgatggatggttgtgaagatttttatctatcacgggtatctttcacgctttaatcggtttataatcaaaaggatatccccctctgcgtgatagcatgacagatgtttttcaaaaataaactttgtaagagctgagctgtccggatgcttcaatcgttgtagctgtattcttcgctgtatctctcgaatttcggttcttcggcaattccgtattgtttgaaaacctgacggatatatgcttgtgcctttggaaacaagccttgttcctggcggtaaaagcgataataggtggtcttgccaaagtgtcctacaagctggttcctcatcggggctgcacatttgtggggtacattgtccagcagatgccggatgccccatgctactcggtacttttgggctttccgaaaataagggcagtcggtggtatcggcagggatacggttcgggttgatgatacttaaggtgggatattgcgaggtacaattgatagcggccagatggtgcaggcattcttccttatggatgcactggctgtggaagcaatgcgcaaagccataaggcacagactggtagtcgaatttatttttcatatgttgtttgcttgtctacggttagggtgtagaacacggctgtaaaggtaaggaataaagttgttataacaaggcttttcttgaaggagttagagggggagcacggctctttcatttaagggagttatcgggagttagaaggagttatcgccctctaactccttcaagaaaagcctcgtttgaagtatttgcagacaaaaaaagagtataattcttctttaaagtgagctgaacttgctatatttgtcataattcctaatatctggtatatgaaaaatagagtaagttttttttgtctgcatacgtgtcttctcctgttcagctgttggacaatgtatcctgccttggggcatgcggctgatggggatgttatttcccgtttgaagttcaagcagatttctacattagacggattaccgacggatgaggtccagaaaatatatcaggataaggaagggtttttgtggtttgccacccggtatggtttctgtaaatacgacggttaccagattactgtctataaatcgagcttgaatactcccggtttgttgaccagtaacaacatttattgttttgccgatgacaatgacggcttcttgtggattggtacacaagaggggttgaacacactcaataagaaaaccggagaaatccgtcaatatactgcgcctgccattcccaacaatgcggtctcatgcctgttggtcacccgggaaaatgaggtatggattggtacggattctggcttatgccggtatgtggcagagaaggactccttcgtgatgtatgacggcaagtccaccgatggtatatttcccgcagcttccatcaaatcgttgttcgaggactcggatggggatttgtgggtcggtacctggtccagtggtctttttcgttattcccggaaggaggataaattctatgcatatcccaaaatcaatgaacggaactcggcacatgttatctatcaggattcaaaccggaaaatgtgggtcggtggctgggattgcggattatttctcttgaatcacccaaaggatatggcaaacgtgtcttatacgcattattcgcataggataggggatgatgccagcttgtcggacaatattgtttatgatattgtggaggatgtacacacccataccttgtggatagggacccgggtggggctgagcattatgaagcaggagaatcccggtacattcattaattacaagtcgttgcattcggcatatcatataccttgtgatgaaataaattcactgttgcgcgaccgcttcaataatatctggctgggttccattggcggcggtgtcctgatgatagacacgaaacaatctccgtttgctttctattctttgaatctggcagaggatgacgtgcctactactgccgtccgcgctttgtttgccgatgcagataaagacctttggctgggtaccggaagttatgggctggcacgcaaggattatgaaaccggtgtgttgtcgttcttttcccatatcccggaattctcggatattcccagtgtacccacggtcaattacattattcagcgtaagaatggagaagtatggttcgctacctatgacggtggtatcttgatttatgagaaaggagagaaagtgaaggtgctgactgaatccgacacgccttatctctattcggattgcgtttcggccttgtgtgaggacagtaaggggaattgttgggtaggctgtcgcggcggtatgggaatcagtttggccgatggagggcattataggttcggaacactttcttttgccggaggcgggttggcggattggtatcatgtgaaggacattgtggaggatgcggatggcagcttctggattgcgacagccaactatggaattatacatattatgggggatgtgttgcatcccgaaacgctgaaatatagtaactatagttataacaacggccagctggcaacgaactcggtgttgtgtttgcatgtggataaatcgggaaggctatgggccggaactgagggaggagggttgtatctatatgattataaggaaaatgtatttacggaaaagaatcaggaatatcagctgtctgccgacatgatagggtctatagaggaagacaggcaagggtgtctatggatggggactaatatggggctggtacagctttttgtaccgatggacgagaatttggctacggtccgtgtctatacgacagcagacggtctgcaggataactttttcatatcacagtcttcttgcagtagggagggcgagttattctttggaggaaataagggttataacagtttccttcctgcatctctggagaaagacaatgaagccgtgccttatctgattacggatataaaaatcttcaaccgttcttttgcggtattggaaccggaggtcagagaacggatttcttctgtcatgccttcgtttacgcggaagttagatctgccttacggatataataatttcagtattgaattcgcatcccttacttataagaatcccggtttaaatcggtatgcttatcagcttgtaggttttgacaaggattggcaatatacggatgccaaccgccgttttgcctattataataatttgaagagcggtacttatcggttccgtctgaaagccaccaatgaaaatggcatttggagtcaggaaatccgtgaacttgaggtggtggtattgccaccgttctgggctacatggtgggcttatatcatttatgcactgataggggcagctattgtctgcttcattctccgaacagcaaagaacaggatgcagctgcgtaatgagctgcatcttcgggagatggagaagtccaaactggaagaactgaatcatgccaaattgcagttctttacaaatatcacgcatgaactgctgactccgctgaccattatctcggctaccgtcgatgagttgaagatgcggtttcccgggcatgacgacctttatacggtaatgggtagcaatatcagcaggctcatccgtctgttgcagcagattcttgaatttcgtaaagcagaaaccggcaatctgaagttgcgtgtctctccaggagatgtggcggcgtttgtgaaaaatgaagccgaatctttcctgccgcttgtcaaaaagcgcaagatacatttctccgtactctgtaatccggagtcgattatcggttattttgatacggacaagctggacaagattctctacaacctgctttccaatgccgccaaatataataaggagggtggctatatacaagtcacgctgatgtatgccgaagacagggacttcgtccggttgcatgtaaaggataatggcagtggcatttcaaaggacaagcagaagagcctcttcaagcggttctacgagggggattaccggaagttcaacaccattggtacgggcatcggcctttctttggtaaaggacttggtggagctgcatggaggaagcattgaagtggagagcgaggaaggccggggaacggaattcatcgtgaccttgcccgtagaccgctcttactttaaggaagaacagattgatgaggaagctgtacttccggtacagaaaaccgttacctatcttgaagaggagaatgcggagaatgtggttgctgaaaagcccaaagcgcataccatactggtggtggaggacaatgaggagcttttgcagttaatggtccggctgctgaaacgtgaatacaatgtccatacggccgaaaacggtcaggaggctgtgactgtgcttgacaatgaggatattgacctgattgtttcggacgtgatgatgcccgtaatggacggcatcgagttttgcaggtatgtgaagaacaagttggaactcagtcatattcccgtgattcttctgacagccaagaacaaggaggaagaccgtgccgaagcttatgaagtgggggcggatgcctttatcagtaaaccgttcaacctggccgtgctgcatgcacgcatccgcaatctgctgaaatacaaagaacgcaaggcgcatgactttaagaaccaactggtgttcgaaatcaaggaactggactataccagcattgatgaggacttcatgcagcgtgccattgactgcgtaaaccgccatctggaagattcagacttcgaccagccccagtttgtggaggagatgggcaccagcaagtccaccctttacaagaaactgaaatccctgacgggactgaatacttctgcctttatccgtaacatccgtctgaaagcggcctgccgcattatggaggagaaggggagttctgtgcgtgtttccgatctggcgtatgccgtcggttttaatgacccgaaatatttcagttcttgtttcaaaaaggaattcggcatgttgccgacggaatatcaggaacgcttcatacagtcatagatcaagtcaaattatgcttcaattaggtcgaataactaaaattctacctcgtagaagcattattggaggtcttcctatcagcattcgcctacatttgccattgttttcacggttaaaatgaagagtgaaagtgaaacaattaatgtttaatcttaaagtttatcctcaaatccgcaactacgcgcctaatatgatacagaagcgaaaagaatctgcatcgttagtaaaaagggggcacagtgcatcgaatgtcaccataaagacatataaatgccccttaccccaccatgcgacttgaggcaatacgcaaaatcacgactataagttgtcggtgttatccaaagtcattctggaacacattggcataagcattgttgcatgaatagatattcagcacatacttccttgatgtcctgacccatttggctggcacagagatgaacttaaagacaaacgtcttgatgcggcttgttgctttgagtccgaacctcttcacgtcaagcctcgccatgatgaatttatagaagttgcgtatgagtgccataagcagaagaaacaccgtgttttctcccataaaggattttggaagcctgttccagccgaatccgttattcatatcatcgaagatgcgttccttccctccacggaggttatagaattcgacaatctctttctcggaagactcgtagtcatttgtaaggatgcagcggtaggtgtattctccttcccacaggtcgagttcgccgtctatccgcttctgtctttgaatcacaagacggtatgccttccctttccatttctcgatgagaatggaggccagctcaaactcaatgccgcccaattccactttcttccaacctctgagggcaaagatgtcattgtagagcgaactgcatcggttagcacggatatagaaggtcttgcagtgtttagcaatctcttccactatctcttcagaacacgagccgcaatcagctctgaaacggttgataataagcttgttttgttcaaacctttcaaagaacctcttcagcgtgtccttctggtggaaacggacatttgtgttgccgtcgctgttctcaatgccgacaatcaagttgccaataaccgccacgccagggcgataaccaaggaacttcttgtatgtaggcttcgcatcaaacttctcagcctctatgaactggtggtcgaagtcaacgtcatacccctcgccctctttcagctgccctgtggacaataggcaattgaggagcagtgtattcagcttgtctgccgtgttgaagtcgtaggtcttgccagtgtcggatgtgtaggaaatgttatcctgggtcagttcctttatggctctaagaatcgtgtcggcactgcatgtgcgaagtgtcggatgaagcgaaaggtggtacatcagatgagtggtgacatcctcgatgcatgagccgccacaaaaataaacgctcataagcgaacggatgatttcgctgtattgataaccatacagcctgcatctcataccgagggttgagtcgattacagatgagagtctggagtcaaattgctccattattgaaaatattcctccaaaaggagtgagtttctcggatttaattgctacctttgccatgtctgtcgggtttgatacatattttgatttgcaacactaagataggtgaaaaatctgacatggcaaattcctgagcaactttttgttgctcaggtacttaaaaagttatatttgtaatagtgttgcggaattaaggtttatacaatgaaaagacagagattctttgaaggactcgggctgaaagtgtatgtcactttggccatttgtatggcccttctgttgaatgttcagttcttgaacgcacagagttcgacaatcaatgtaaaaggtgtggttaatgatgcgatgggaccggtgattggcgccagtgtagtggagaaagggaatgcgacgaatggaacaattaccgacattgacggtaatttctctttgaaagtcccttcggatgccactttgacaatcagctttatcggttataagacggtagagctgccggtggctggaaaaacatcctttactgtgactctgaaagaagacagcgaaatgctggacgaggtggtagtggtaggtttcggcacgcagaagaaggtgaacctgacaggttctgtggggctggctacggcgaaggaaattgaagcacgtccggtagcgaatgccacgcaggcattgcagggcttggtaccgggcttgcagattacgaccaataccggtgaactggacaagaatatgtccatcaatatccgtggcaacggtaccatcggtgacggctcaagcggaagtccgctgattttgattgacggtatggaaggtgacatcaatacggtgaatccgcaggacatcgagaatatttctgtattgaaggatgctgccgcttcctctatttatgggtcgcgtgcaccgttcggtgttatcttggtgactaccaagaaaggcaaatcgggcaagccgactatcaactacaacaacagcttccgcttcaacagtccggtgaatctgccggagatgatggactcctatacctttgccaactacttcaatgaggctgcacgcaacggtcaggacaatgcccagttctctgatacagtgatgcagcagatgcttgacttccaggctgcgggaggtactaatcgtggcggtttgcctactgatggcaatgtatggggtaaaccggcaggcgacccgtttactacggcgtatgccaatactgactggttttccgaaatctacaagggctcttccttctcgcaagaacataatttcagtgtaagcggtggtggtgacaagttcaattattatgcttcattgggctatctggatcagaatggtttgctccgtcatggttccgatgacttgaagcgctataatgctactgccaaatttggtgccgagctgaccaaatggttgaagttcaattacagcttgcgttatgtccgtcaagaccttggccgtcctaccaattttggtggcggtttgtatgagagaatcggccgtcagacttggcctaatcttccggtttatgatgaaaacggctattattttaatggtaatgccgatacgccggcgatgtcacttgcattgggtggtgagcgcgatgtgcagacagataaggtttatcatcaagcaagcttggtattcgaacccgtgaagaattggattaccaatgttgagttcaactatagtaccaattctatagatacacgtgaaaccggacttccttactataaccacgatgtgagtggaaatattgtggatacgcaaggaacctcaagtctctatcaagactacaagaaagagagctacatgaactggaatatttactccacttattctcttgctatcaatgatgatcataattttaaggtaatgggtggttttcagtccgaagaaatgcgccagaagttttttagtgccaaaggatatggtttgcaggtggaagaccttccggaactggacttgatttcgaatattgacggcgccggtaaggataaggtgcccgaggtgggtggctatcgtaatgagtgggccacagcgggtttctttggccgcttgaactatgattataaaggtcgttatctggcagaggccaatttgcgctatgatggtacctcccgcttccgccgtggcaatcgttggcagttgtctccctccttctctttgggttggaacattgcccaggaaaacttctgggaagattttgcggatgtttgcaatcagttgaagttccgtttctcttatggtgaactggggaatatgaatacaaacggctggtatcctacttatcgtgccatgacattgaagcaggcaaacggaagctggctgcagaatggactgaaaccaaacactgcttatgtaggcgaccttatcagtacagccttgacttgggagaaagtgcgtacctggaatatcggtcttgactgggggctgttcaacaaccgtctgaccgggtcattcgatgcttatatccgttatacggacaatatggtaggtccgtctgtagagttgcccgctacattgggtattgcgactcccaagaccaataactgtgacttgaagacgaagggttgggaacttaccatcggatggcaggaccgcaccaacttcggtatgggctatggcattaagttcaatgtttctgatgcacgtacttatatagacagatacccgggtaacccgacaaactcaatcaatacttatatcgcaggccgcgagattggtgaaatctggggctttgaaaccgtgggaattgccaagacagatgatgagatgcaggcgcatctgaataaagtgggcggacaaagtgccatcggttccggcgtttggactgccggtgacatcatgtatgccgaccaggatggaaaaccgggcatcaccaaaggtgcacagactttggaggaccacggtgatttgaaggtgataggcaacaatactccccgttatcatttcggtcttgacttgaatgccaattacaagggatttgatgttcgcctcttcttccagggagtgatgaagcgtgactactggcagggttccaatatcttctggggcgttggccaatggggtatgtggtggtcaaccggtttgaaggaacacgaagattacttccgtgatgaacccgtcgggctggccggtcatgagattgccgccaatgtcaattcatactatgcgcgtccgagatttgacagtacccagaaccaggaaacccaaacccgctatctgcaggatgcgtcttatatccgtttgaagaacttccagcttggctacacattgcctgcttccatgattcgcaaaatcggtatcaccaactgccgcatcttcgtatcgggcgagaatctgtggacgggaaccaaactgagcaagttgttcgatcccgaaaccatcagcggtggtaacacggacagcaatgcttctgcacctatcaagagtgccggtaatgcatacccgctttcaagaacttggtcttttggacttagcgtatcactttaatcccataaataatgaagaatattatgaaatcgaattatagatatattgtaaaagcgttcatggcaatggcagtgattgccggaacgacttcctgcgatgattttctggacagagagccgatgtcaagcatttctcccgaaacctattactccactgcggcccagttggaagccaatctgaatgatgaatatcccaatgtccttccgtcattcggccagtggacttatggcatcttcggtgaagacaaaggaaccgataaccagatagaggtgaatgccaatgaccgctatacccaggatcgctggaaagtacctcatagcgaaagtgacaattggaagttcgaacgcatctatcgtattaatttctttttgtctgaagcacttcccaaattcggtgaggacatgagcggttcacaaaatacaatttccgggagtgtagccaccatcaagcactatatcggagaaatgtacttcctgcgtgcttacgagtactttaagaagctccagttgttcggcgacttcccgattatcaaccaaccgcttgccgatgagatggaagctctccgtgaagccagcaaacgttttccgcgtaatgaagtggcacgtttcatcatttccgatcttgacaaggcttatgcctatatgagtgatgtcgatatggcgacgacccgtatcaataaggatgttgcgatgctggttaagtcacgtgtggcactgttcgaggctacttggttgcagaatttcaagggtacggcattcgtacctggtggagaaggctggccgggggcatctcttcacaacaattatcagtatccgagcggaaacattgataatgaagtgaagtacttcttggaacaggccgtagaggcttccaaacttgtagcagataaatacaaagggagtttgacggagaataccggtgtgttgcaacaatcagctgatgacccgtcaaatccttactttgatatgtttgcacaagaagacctttcggatgtgaaggaagtactgttgtggcgccagtatgcccgcggactctctactcataacatcaatgccgctgccggacgtggtaattaccgtatcggtctgacccgtggattcgtacagaatttcctgatgaaggatggtactccggtttatgctcacggttcttatgcggatggtgacggctattatatgggcgacaagacggttgctgatgtacgtgtaaaccgtgacccgcgtctcagtatcttcctgaaagaaccgggacagaagaacatcctttttgaagttgataataatgaaggtacggaagttgtgatggaagagccctatccggccattacgagtggtgacggtgagcgtggctatgctaccggctatgcattgcgcaagggtggttcattcaaccgtaagtattatgccaatggcggtggttatacggcagctgtatgtttccgtgcggctgaggctctgctgaattatatggaagcaagttatctgctcaatggaacgctggatgctacggctcgtgaatattggactgtacttcgtcaacgtgccggcatcagtactgattttgacaagactatcgctgcaacggacatgagcaaggaggctgaaaatgattggggagcctatacgggtggaagtgtcatctctgacaagactctgtataatatccgtcgtgaacgtcgttgcgagttcctggctgaaggtcttcgctacatggacttgtgccgttggcgttctatggaccaactgatgactgctcccagccatctggaaggtatgcatttgtggaatactccgatggaggactggtatctggatgataatggaaaatccattttggttgctgacgggacagacaaggctaatgtctcatcgaaagacaagagtgagtatctccgtccgttcgagagaagcagcaaccagtctgcctataacggctgtacttggaaaatggcacactatttgaatcctatcatgatcaagcaattccagttgacagccacttcgggagcggatgtatcgacttccattctttaccagaatccttattggccggtggtagctgaccagccggctgagaaataaaggcatttttcaataggtatttgatttagggggtaggatacactttccggtgagaaggcgtcctgctcccttctttataaatagaaacaagacagagtatgactaattttaatttcaagtttttaggggcatggttggttatcgtagcgtcaatcaccggcctacaggcacaaaatgatttcaccttaaagggaaaggacgaaatggttccggccggagtgtggaacgatgtaaacggggagtatattaatgcacacggtggtggtatactgttatttgacagtaaatattattggttcggtgaacaccgtccggcaaagggattctctacggaagtgggagtaacttgctactcttctaccgatttatgtaactggagatacgagggggtggccttgtctgtatcggaagaagcgggcaatgaaatagagaaaggctgtattatggaacgtcccaaggtgatttacaataaaaggacgaagaaatttgtcatgtggtttcatttggagctgaagggtaaaggctatgaggctgcccgtgcgggagtggctgtcagtgattctccgacgggaccttatcgttttgtttcttcgagtcgtgtctgccctggaatatttccgctgaatatgacggaggaagaacgggacatgcagtggaatatggaacagtttgaagaatggtggacacccgagtggagagaggctgtaaataaggggttgttcgtgaagcgtgacttggagggcggacagatgtcccgtgacatgacattgtatgttgacgatgatgggatagcttatcatatctactcttcggaagagaatctgaccttgcaaatagccgaactgacagatgactatcaaggacattccggaaaatatgtccgtctctttccggggggacacaatgaggcaccggctatcttcaagaaagacggcacttactggatgataacttccggttgtaccggctgggcgcccaatgcggcgcgtctgttctcggctccttccatctggggaccgtggaaacagcatcccaatccctgccagggcgagggaagtgagcggactttcggcggtcaaagcacttacattttgcagcttcccggcaaccgctaccttttcatggccgatatttggcggcccaagagcctaatgtattcgggatatctctggattccggtccggtttgatgaagaggggatgccttatcttaccctttccggcaaatgcaatccgtcagatggtcgttgataaaccccgaagcttgcagatgggcatagcagatagtagagccgaagaacttgaatccccgttttttcatgtctttgctcatggcatctgattcgggagatgataccggaatctcactcaatgactgaaaatgattgataatggggttccggttggggaagaaggatagcgtatagttgtaaaagctgccgaattctttctgtatggcaagaaacagctttgcattggtgatggtcgacttgattttcagacggtttttcacgatgccgtcaaagtgcatcagccgttccacgtcttcgtcggtcatttgcgccacttgcgtggcatcgaaattgcaaaaggctttgcggtagccttcccgctttttgaggatggttatccagctcagtcccgcctgggcactttccaatacaagaaactcgaatagtgtcttgtcgtctgttaccgtttttccccactcttcatcgtggtatttcatatacagctcgtcggttccgcaccagccgcaacgtccgtttgttatgtcttgcataagcgtaattaatatatgtaatgaagtgctaagatattgttttcattgcgaacaaacaaatctatccattcagaatggacagttctcatattctttcttacttttgcaaaaaggtaacgggtcgtttgaacgcctgaaaaacaagaaaattaataataaagaatggaaaagacttggagatggtttggcaagaaagacaagataacccttgccatgttgcaacagataggagtggaaggcgttgtcactgccttgcatgaagttcccaacggtgaaatatggacgttggaagccattgaagatttgagggattatattgaatccttcggattgcgctggtctgtagtagaaagtctgccggtgtgcgaggctgtcaaatatgcggggagtgagcgtgaccgattgatagagaactataagataagccttgccaatctcggcaaggcaggcatccggacggtatgctacaacttcatgccggtgattgactggattcgcacggacttgcaacatccctgggaagacgggacatcttctctttatttcgacagaatccgttttgcctacttcgacctgatgatattggaacgggagaatgcggaagccgattattctccggaagagctggacaaggtggcagaactggataaggtgattacggagtttgaaaaggcagagctggtagatacgattatcgtaaagacacaaggattcgtaaatggcaacatcaaggaaggtgacaaggagccggtaaccctgttcaagcgtttgctggcgctatacaaagggatagaccgggaggctctgcgcgagaatatgcgttatttcttgtctgccatcatgccggtatgcgaggaatatggggtgaatatgtgtgtacaccccgatgaccctccttttcaggtattggggttgccgcgcattgtgacagacgaggcagatattgcctggatactgagtgcagtggacaatccccataatggcctgactttttgcgccggttcattgagtgcgggtgaacagaatgatacccgtgaactggcaaggaagtttgccaggcgtacccactttgtgcatttgcgcagtacgaaggcaataccgggtggaaactttatcgaaagttcccatctggagggaaggggacacctcattgatttgattcgtatctttgagaaagaaaatccgggattgccgatgcgtgtggaccacggtcgcatgatgttgggcgacgaggataaagggtacaatacaggttattcttttcatggccgtatgctggcattggctcaagtggagggaatgctggctgtggtagacgatgaattgtacggaaaatctgtttgattgattttaagttaggcacggattacgcgaaaaatcatggatattcttcatttattatccatgatttttcatgtaatccgtgtctaaagaatctattagtgttgtaaatccggcttaatagttgaaagccctggattttacgtaaaccttgaagtctttgattccacccggtacctcgctttccattctgggtagatattgtatgccggtcagggtgcgggtactacccaagtcaatcacgacagaatgcgggtatggagtgtcttttgttgtgctccaataggttgattcctggaggtcgaagattttgtccgcagaacagttgacgtgggatacgtcttcgctgtcggcataattgacaatccagggttcgcgtgacagacgttccccattctcatccagcagatacatttcggcaatgcaagccaggtcttttccatcttgtgcactcaaggcttccaggcagacataacgtccggtgacgggttggtcgaatttgcgttcctgccaaccgttgccgggattgaagctgccggagaggacgggctgctcaccggacaagtcgagattttcaccctcattgcggtgcgtcagcggtttggtgacgagcaactggtccagtaatggctcgctcagtccttcggacttaacttctttgggaccgatgatgtcgaagacaatcacttcattctcacctttcttcaaccagcatcccgggatgtagagggtctgttgcgggccgatttcccaaatgcgtcccatggcgtgcccgttgacgtagacaagtcccttgccccaagtctcgaagtttaggaatgtgtcgctgggcttgttcaccttaaaggtggcacggtagcaacccggaatgcgttgtcctaactcatctttcagtgagccgatgggctggaacttcatgttcttatagaaatcgtatgtatcttcgagattatagacttcccaatccttcaggttgcaggtgaaaggacggccgtcgatgtctacggtaagttctacgctttgggtgatacccttgaagtccttgatggcacgtccaaagttgatgcggcccatggcttctaccagaatgtcgaggcgtgcacctttggggcaggcggggaattccagttgcttttcaccgttgcggcggtccagtttgccgatgtatttgccatccaggaaaacttgggcataatcgtgcgcatcgttcacagtgagcagggacggggttttcatctcgggcagtgtggtgcggtagagaatacttccgaatccctggttatattcctccatggtacggatattgcggtctttcttggcagcaggaagattgtcgaacaaaggagccatctctgtaaattggaaagacggaatacggatgggcttgattaaagcgggaactttagcctgcttctcgccgttcatgtatttggacaatgcttttcgcaattcccagtatttgggagtggtctgtcccgattcgctgatgggggcgtcgtagtcgtaagaggttacgtcaggggcgaatccgggtgagttggctcctgcccagtgtccccagttggtccctccgtgggtcatgtagaggctgaaggagatgcctttggacaacatctcgtcaatgccggcaatcatgtcggcagccggacgggtttcgtggttggctccccacttgtcgaaccagccgctccagaattcggagcacatcagcgggctatcaggacggagtttcttcagcggtgcaaactgttggtcgatgttggctcctgtaccgaagttcatggtccataccaggtcgtggagtccgttcttggtgaagttggacgcccagtcgcattggaacagtgctacgccggggtagttggcgcgtacgatgtcgcggatttgcgatacgtagcctttgtcttccccgtaggagccgtattcgttctctacttgtaccatgatgatgggacctccgttctgtatggtcataccggctacctgctcggcaacggctttttcgaagatacctacacgctccataaagtaggggtcggattcgcgcaggcggatatcttttttcttgagtaaccaccagggcagtccgcccatttcccattcggcacagacatacggtcccgggcgcaggatgacatacatgtcgttctgctggcataggcggcagaattccgccaggtcattctgtccggtgaagtcgaacactcccggctgagactcgtgggagttccagaatacataaaggcagatggtgttcatgcccagtgccttgcatagcttgatgcgttggtcccaataggctttggggatacgtggatagtgcagctctgcggctttgatgacaaacggcttgccattcaataggaatgttcctttgccggcagagaagtcgccttgtccttcccattgggtacgcgggtcccagctgtcgcgccagggtatcgcgattgtgccgtccttgccgaattcaagcgggagccatacgtagcgtgagtcctcaaggtttttctttttccagcggtcgaacatggcaatgtaggcatttccttttccgtatacttgctgcacgtaagtgctttgtgcatagaaggtcttatctgcatcaggaccggtacacggattgccgatggtagtccattgccccatgatggagtcggccacagccagttcggcaacattgggatcccagccggtacaaccggaagagagcatatagtacttgccgttatacttgaatacggcgggtgcttcgcggctttgcttcacgaaattgcgtgtatagcgaccagtgggcttcaggtagtcatccgttagttcgcttatatataaggtagcgttgttttccgacgagtagaactgatatgccttgccgttatcatcaacgaacactgtttggtcgcggctcatcgcaccgttgggacggaagctgcctacataggtgaatgtcccggtaggagaatcgctgaccgctacgccggcacatgccttactgtagtcggcgctttccacatgcgcccacatgacgaatttctttgtcttttcgttgtaaatcactttgggacgttccaacaccttgctggggtgcaggtcgtgtttctcgtcatctttcacggcaggaagtacaataccctcgaacttccagttcagcaggtcttttgaagagtagcagctgacaccggttacgtcggtgcggtagcattcccacgtagcccattcgggcaggatggtttccccttttttgtattcgccataccaatagtaggtcccttcgtggtaaagaaggccgccgccatgggcgttgatgggattgccgtcggtgtctttccatacttccccgggtatgattgcggcatttttcgtttgtgcttttgtttttgcagatggcaggcagcaaaggcaggccagcaatgcaaaactccaaataattttccttttcatttaagaattcggtattagataattaataaatcgtttatgttttgggcaaagatatgcgaaagttgagaaatggagggtatgtaaatgtgtcaaaaaggagagattatagctctaatctctcctttttgtgatgtttttcggtcttttctatttggtttgtacttgtttcatcacccggaggaaatttccaccccatatcttggcgatgtctgtttctgtaaatccatgttccagcagacggacggtgatattgatgaaatcattgtccccattgcatcctttgaccccgcctccaccgtcgaagtccgagccaatgcccacgtggtctatgcctgccacttcaaccatgtgcagcaggtgtttcatgaagtccgtaaggttggttttcttggcatccgggttcagaaactcgtctaccaggcaggcttgagccacaccgccatgtgcggcaagggcgcgtagctgttcgtcggtcagattgcggtcgtgtctgtagatggcgcttgcagaggagtgggagactatgaccggtgcttttgaatatttcagtacatcccagaaggtgctttcggctgcatgggaaaggtctatcattattcccagccggttcatttctttcaccacttttctaccgtaaggacttaagccgttccaacgggcagtcgtgtccgaagaactgtcgcagatgtcattgttgcgggtgtggcaaagggtgatgtaggtaacgcctgcatcatggaaacgggtgatattcttcaaatccttgccgatgccgtatccgttttcgatgccaatataaaaggctttctttccttcggtcttgagcctggacaaatcatcgggcgtgcgggctatggcacattgctccccgttcatctccacttgtcggtagatgtggcgtatcaactcatccactcggtcaatggctttcagactgttctcttcatcgcacgggccttgacgcacccagcatgccaggtattgtccatccaattttccttctcgcatcttgggcaggcaaacctgcgttttttcgcgcgtacctatattataggaaacgtcaaaatcaagtggggtgtctgtatgcgtgtcgagggagaggatgcggcgatgaatctctttggcatgccggtaggtagctgccttttgaaccagaaaatagaagaatctggcagagatgctgtcgcctgccgtagccagagcttcgggatggaattgcacaccccatatcggatattcgtgggaagactctatagcttcgggaatactgtctgacgaccaacccgttacgctgaatcccggggcaacttgcttgaccgcctggtgatggtgagtattggtgaaaagttgtgtctgtccggttatggatgccatggcagaaccgggagtgaggtggacggtatgagttggtatactgctcggttcctgctgctggtggcagacagtggtgtcgggatgctgggtagggatatcctgataaagggttccgccgaaagctacattgattaactgttctccccggcagatgccaaacatcggaatgttacgccgggtagccaggcggatgagtgccatgtcgtatacatcacgcagggagtccacctctcccagctgttcgatgggcgattcattgaaataggaagggtggatgtctcctcctcctatcagaatgataccgtccagccggttggcaatgtctgtcaagacaaggctatcggtagtgatggaaatcagtataggtgttccacctgcctggattacagactcggtatacgtcatctgtgtggatgagcttcggcccggatgtgagcaggaaatgccgatgagaggggctttcctggttgttttttggttggactgtcccattgccaaatatggacatagaacgagcagtgttgttaacagtagtttgttcatggttttcgggggggattctttttcctgcaaagttataagaaatatttaagccgtccaagaagttggatgacttgtgaattcgggcagtttattggcagaagaacattatattctttgttggtggaggaagtgtgttatataacatgcttcccgatgttgcttttctttgaattaatgcctaatttgcgcctcacaaaaagttaacggcatcatcgtatgtcaggttattcacttaaaatcttaatatatcatgaaagtatatcagacgaatgaaattaagaacattgccctccttggcaatgacggctcgggtaaaaccactctcacggaagcgctgctctttgagagtggtattataaaacgtcgcggcaggattactgctaagaatacagtcagcgattacttcccggtggagcaggaatacggctattctgtgttttccaccgttttccatgtggagtggaacggcaagaaactgaatatcattgactgcccgggtagtgatgactttgtaggggctgccatgacggcgctcaacgttacagatactgccattctgctgctgaacgggcaatacggtcccgaggtaggtacgcagaaccatttccgctacaccgagaaactgggcaaaccggttattttcctggtaaaccagctcgataatgaaaagtgcgattatgatatggtgcttgagcagttgcaaaccatatacggtccgaaggtggtgcccgtgcaatatccgctggctaccggaccgaacttcaattcgttgatcgatgtacttttgatgaaaaaatattcgtggggacccgaaggtggcgctcccattattgaagaaattccggccgaagaaatggaaaaggctacagaactgcacaaggctttggtagaagctgcagccgaacatgacgaaggcctgatggaaaaattctttgagcaggactctttgacagaagacgaaatgcgcgaaggtatccgcaagggactggcttcacgaggtatgttcccggtattctgcgtctgtgccggcaaggatatgggtgtacgccgtctgatggagttcctgggtaatgtggtgccgtttgtggacgaaatgccaccggtgcacaatacacgcggtgaggtggtgaagccggattctaacggaccgacttccttgtatttcttcaagactgccgttgagccgcatatcggtgatgttcaatacttcaaggttatgagtggtaaagtgcacgaaggtgatgattttaccaatgcagaccgcggttccaaggaacgcatcgcgcagatttatgcttgtgccggtgccaaccgtatcaaggtagaggaaatggtagccggtgacatcggctgtacagtgaaactgaaggatgtacataccggcaatacattgaacggtaagggctctgaaaaccgtttcaacttcattaaatatccgaactccaaatactcacgtgctatcaagccgttgaacgagtcggatacagaaaagatgatggttgctttgaaccgtatgcgagaggaagacccgacgtgggtgatagaccagtctaaagaattgcgtcagactattgtacacggacaaggtgaattccatttgcgtaccttgaagtggcgtctggaaaacaatgaaaaactgcaaatcaagtttgaagaaccgagaataccgtatcgcgaaacgattaccaaagctgcccgtgcggattatcgccataagaagcagtcgggtggtgcaggccagttcggtgaagttcatctgattgttgagccttactacgaaggcatgccgttgcccgaaacctataaattcaatggtcaggagttcaagatgaacgtcaagggtaccgaagaagttccattggaatggggtggcaagctggtattcgtcaatagtattgtgggtggttccattgatgcacgtttcatgccggccatcttgaagggtatcatgtcacgtatggagcagggaccgttgactggttcgtatgctcgcgatgtacgtgtcatcgtatatgacggaaaaatgcatccggttgactccaatgaaatctcctttatgctggcgggacggaatgcgttcagcgaagcgttcaagaatgcaggcccgaagattctagaacccatttatgacgtggaagtatttgttccgtcggacaagatgggtgatgtgatgggggacttgcagggacgccgtgccatgattatgggtatgagcagcgaggccggttacgaaaaactgagtgctaaggtgcctttgaaggaaatgtcatcctactctacggcacttagctcactgaccggtggacgtgcttcgttcatcatgaagtttgccagctatgaactcgttccgagtgatgtgcaggataaactgattaaggaatttgaggcaaagcaagctgaagaatgattttcaggggttggtagtttggctgttgtaactaccggttgctaatataacaattgttaaagccgttgttacttcatggcaagtaataacggcttttttcattaacgtagattaagaacatgcagaattgtgaattgaatgattaattttttattaaatttgcaaaccaaaggcttgtgtttttgttataatgctcataatacaacctaaaaaatggtcttcggttaatttacgagaacgtccggttaaatcaggttaattggttaggagtgttaattagggagtgttaattttgtgactatgaaaaagtcaactatatggatattaggtgttgttatggggctttccttccttagtttgctgtatctgcagataagctatattgaggaaatggtgaagatgcgtaacggacaatttgatgaatcggtgaagcgtgcgttgatggctgcttcgaaagaggcagagtccgcagaggttgtgcgttggctgaatgaggatatctccgaggcagaaaagaaggcgtgggaacaatcgcagagcagtagcggagtgatgcgtacccagcggtttgtgatgacagctccggatggcagtgtccgttcttcggtggaattgaaaactttcagtaacgagccttctgaattgccaagagcaatgatttcacgcaaacatggagcaaaaaccattcctcagacttcacgctcgcagatagagatgcttaaaaaccgctatctttaccagcgtgcattggtagacgaggtggtgttgcagatggtatacaatgccagcgacaagccgattgaggagcgtgttaatctcaaaagtctggaccagtatctaaaagcaggtctgatagagaatggtctcggtgatatggattatcacttcaaggtgatagaccgggaaggtcgggaggtataccgttgtgcggattatagcgatgcagggagtgaaagctcttattcgcagccattgtttttgaatgacccaccagcccgtatgagtatcgtcaagatacattttccgggaaagaaggattatatcttcgattcggtcaggtttatgataccgtcgatgatatttacttttgtactgctggtgacgttcatctttacgatttacatcgtattccgccagaagaagctgacggagatgaagaatgatttcatcaacaatatgacgcacgagttcaagacgccgatatcgacgatttctctggcggcacagatgttgaaagacccggctgtgggcaagtctccgactatgttccagcatatatcgggtgtcatcaacgatgaaacgaagcgcttgaggttccaggtagaaaaagtgcttcagatgtcgatgtttgaccgtcagaaggctactttgaagaataaggaactggatgccaacgagctgatagcgggtgttatcaacacgtttacactgaaagtggagcgttataatggaaagattgaatcggagcttaaagctaccaactctgccatttttgccgatgagatgcatatcaccaatgtgattttcaatctcatggataatgcagtgaagtataaacgtccggatgcggatctgcaactgacggtgaagacttggaatgagcctggcaaactgatgatttccatccaagataacggcatcggcatcaagaaggagaatttgaaaaagatattcgagaagttctatcgcgtgcatacaggtaatctgcacgatgtgaaaggcttcggcttgggactggcttatgtgaagaagattatcatggatcataagggaactatccgggcagaaagtgaactgaacgtaggaactaaatttattattgcattacctttattaaaaaattgattgatatggacgagaaactgcgtattttattgtgcgaagatgatgaaaatcttggcatgcttttaagagaatatttacaggcaaaaggttacgctgccgagttatatcccgatggagaagcaggatacaaggctttcctgaagaataaatatgacttgtgtgtgtttgatgtgatgatgccgaagaaagacggattcacactggcacaagaagtgcgtgcggccaatgccgaaatacctattatcttcttgacggcaaaaacattgaaggaagatattctggaaggtttcaagattggtgccgatgactacatcaccaagcccttcagtatggaagagctgactttcagaattgaagctatcctgagacgtgttcgcggaaagaagaacaaggagagcaacatctataagattggtaagtttacattcgacacgcagaaacagattctggcgactgccgagaagcagactaaactgaccaccaaagaatccgaactgctgggcttgctttgtgcacatgccaacgaaattctgcagcgtgactttgcgttgaagactatttggattgatgacaactatttcaatgcacgtagtatggatgtatatatcacaaagctgcgtaagcacctgaaagaagatgattcgattgaaatcatcaacattcacggaaaaggatataaactgattactccggaagctgagtcttgatgagactcggctcctctgggggagagaaaataaaaaaggcggtttgcatgtatatgctaaccgccttctttatttcttttcttttgatattagtcgacaattctcttgttgatgacaatgtaggaaatcaatcccactacaaccaaaacggcagaactgcccaagatggcattgttgttaacattgccggtaaaagaacatgcaaccaggattacagctcctattacgactaatatcaatcccagattttttaataagcctttcatgtgtgtgtattttaattagattattatattctttcgtattcttgtcacaaagaaaagcataattctttaacaagcgaaattatttttgcaaaaaatccatattttaataaagaatggaagatgaggaatgaaaaatgacgcttcatccccttgttttctcctcccttaatctctaatccttaacccctaatccctatatcttagtccttcgtattgaagaaaatcttcctcagcacctcctggctcacactgagctcttcgatggtgatgcctttcaaggcttctttgagggtctggttggcaatgacgcgcgcgcgttcttccagctccttgccgtccttggtcagatgtatcagattggttcggcggtctttcttgtccgatatgcgcacgacgagatgctgacgctccatattgtctatcaagcgcgtcatgctgggcttgtctttgaaagttgcattacacaactcttgttgcgtcaccccgtccttttcccataagaagatgaggacggtccactgttccggagtaatctccaaaccgttctggcggaagttgcgggacagctttcggttaatggcagccgacactttaccgttcagtatggcaaagataaggcggatatcaaagttgaattgctctatcatgaaattattgtttaaacaactttgcaaagatagtgcaagccgaagacaattcctatatccctacacaaaaaaacattaaatgtttgtagttcaaaataaaatgtctacctttgcaccgcatttttaaaacgaataatttatttatttaattaaacgagtatgaatcaatacgaaaccgttttcattttgactcccgttttgtctgatgttcagatgaaggaagcggtagaaaaattcaaaggcatccttactgctgaaggtgctgagattgtaaatgaagaaaactggggactgaagaagctggcatatcctatccagaagaagtcaaccggtttctatcagctgattgagttcaatgcagaacctactgtcattgagaaactggaaataaacttccgtcgtgacgagcgcgttatccgtttcttgactttcaagcaagacaagtacgctgctgaatatgctgcgaagagaagaagtgttaaatcaactaaaaaggaggattaatcatggcacaacaagttcaatcagaaatcagatatttaactccgccctcagtagacgttaagaagaaaaaatactgccgtttcaaaaagagcggtattaagtacatcgactacaaagatcccgaattcttgaagaaattcttgaatgagcaaggtaaaatccttccgcgtcgtattaccggtacttctttgaagttccaacgtcgtgtagctcaagctgtgaagagagcacgtcacttggcgttgctgccctatgtaactgacatgatgaaataataggaggaggaaagtatggaaattatattgaaagaagacattgtaaacttgggttataagaacgacatcgtaacagtaaagtctggttacggtcgtaactacctcatcccgactggtaaagctgtcatcgcttcaccggctgcaaagaaaatgttggctgaagagctgaaacaacgtgctcacaagctggagaaaatcaaaaaggatgctgaagaactggctgctaagctggaaggcgtatcattgaagattgctactaaggttagctctactggtactatcttcggttctgttggtaacatccagattgctgaagagttggctaaattgggtcacaacatcgatcgtaagattatcgttgttaaggacgcagtgaaagaagttggtaactacaaggctatcgttaagctgcacaaggaagtttctgtagaaattcctttcgaagtagttgctgaagaagcataagaaaagacttcataatgataaggaagcccggttctgataaaggaccgggcttttctatgttcggagcgtatgtgtgtgagcttattgagggatacgtaaagctgcggttatagaggtttacgaatctgaagtagaggtttacgcgcgtggtatagaggtttggcaagaatactcttgtgtctctttacgaggttactaatgcaaaaaaaagagcatatccactcaggggtatgctctttgccttattgtcagccaataattcttttagtttcttggcaatgcttctttcactaccatttggcggcctacatattctgctccattcagtttgttgattgcttgttgggcttcagcagcttcgggcatctctacgaaggcaaaaccttttgatctgtttgtattacggtccataatcagttttactgattctactgttccatactcttccattacttgtctcaaatctgattccctaacgttgtagctaaggtttccaatgtacatattcataaaatacaaaaataaaaaattaataattcaataaaggagtcttaggaagttgtagtcagaaatgaaaattctcaatgtggctaatcgaggagaaacatagtgaaacgtagatcgtaataaacctcttattgttttg

SEQ ID NO: 95 - DNA, 855933 bp, Bacteroides uniformis
  source 1..855933: mol_type = genomic DNA
aattttactaaaaataggtatgagttacaatttgttgaaaggaaaaagaggcattattttcggtgctctgaatgagcagtccattgcctggaaagtagcagaaaaagctgtagaagaaggtgcaaccattactttgtcgaatacaccggttgctgtccgtatgggcgaagtgtccgctctttcggagaaactgaactgcgaggtgattcccgcagatgctacaagtgtagaagatttggaaaatgtattcaaacgctctatggaagtattgggtggcccggttgacttcgtgctgcactccattggtatgtctcccaatgtgcgtaagaaacgtacgtatgatgatttggattacgatatgttggaaaagacgctggacatctccgctgtctctttccacaagatgatacaagctgccaagaaactcaacgccattgccgactacggttcaattctggctttgagttatgtggctgcgcaacgtacgttctacggttacaacgatatggcagatgccaaggcactgctggaatccattgcccgtagcttcggttacatctacggacgcgaacaccatgtacgtgtcaacaccatttcccagtctcccacgatgaccactgccggttccggtgtgaagggtatggacaaactgttcgacttcgccaaccgcatgtctcctctgggtaatgcttctgccgatgagtgtgcggactactgtatcgtgatgttttccgacctcacccgcaaggtcactatgcagaacttgttccacgatggaggtttctccagcgtaggtatgagccttcgcgccatggctacttacgagaagggactggatgagtataaggacgaaaacggaaatatcatttacggctaatggaactcgcactttatcttctgccggtcaccttgggcgatacgcccattgaaacggtgttgcctccttataacaaggagataatacttggaatccgccatttcatcgtggaggatgtgcgttcggcgcgccggtttctgaaaaaggtggacaagggaatagatattgatgcgctgacattctatacgttgaacaagcatacgtcgcccgaagacatctccggctatctgaagccgctggtggaggggcagccgatgggcgtaatctccgaagccggttgtccggccgtggccgacccgggagcggacgtagtggctattgcacaacggaaaaacttgagagtggtccccctggtgggaccctcttccattatcctttccgtcatgggttccggcttcaacggacagagctttgccttccacggttatctccccatagaaccggcagagcgtgccaagaagctgaaaatgctggaacaacgcgtctataatgaacatcagactcagcttttcattgaaacgccttatcgcaataataagatgatagaggatattcttcataactgccgtccgcagaccaagctctgcattgcggcgaacattacttgtgaaggggagtatatcaaaaccaagaccgtgagggagtggcagggcaagactcccgacctttctaagattccttgtatttttctcttgtataaataatagcttccaggtgctcgaattcatattccaggcaactgctgaagaagttccgtcccaggttgtgttccatttgctggaatgtccatagctttccccccttgaaattcttattgcataggatggagtcatcgtccaggtctagcgtgaagagatagaccaggcggttggtggcttcattctcaaaatgatacatgaagttgaagtgcaaatggtctaatggggcggtgggaagcgtttgtcgtaaaattctgtgtgcgccttgttccaatgtttctccatatatcaggtaaccctccatcagcaagtcgattttatctttctcgaaaacgttgcatttggggcgggggaggagaaacagcatgctgtgtgaggcaacggcaatccggatgaccggattgatatagtcgtttttccggttgatggcctctgaggcgatggctttccccatgacatctcctttggtgttgactatcggtacgaaaaccgtgtggttcatcactatattgaaatagaaaatgccgaactgattgaacagaatgcctgatataaagacgaggggaggcgccacataaaacagaatgtggcgggtagtgtctcccaaagggtaactgaccagaaccgccaagaagataatcagaaaatgcagcaggcttatgataaggattacgcgtgcggatacgatggcggcttctgccccttgtgcaaaaagttgcttgcagcatttctgtgtctgagacatgtggtagtccagaaaccttctcctattgaggtagatgatgaacggggggatgatggcgctgatttccagcgtgaacggaagcatgaaacggggacagtagtttacgaggaatagggttgttaccgataatagcagtaacattccggtagtacagtaaagtatgatttgcggaacatgcgttcctctatgcctcaccgaatagatgctaaacaagagtcctacacctgcaccgatgtagatggacatgtcctgcgttataaactcgcataatatgatggatattataacggggatgaatcccagcgacatattgaatcttgatgataaaattctttgatggctcattatccgtattatgattttgtcgtttacatcataacaactgggatatttaaatgtttcctattttacttcttttttgtataaaatggatctgtttttccgcatgataagaggagcgtaccaatggagcgctttccacttgctgaaacccttttttcaatcctttctctctgtagagtgcaaattgttcgggagtaatatatgctgctaccggataatgcttgtgtgtgggttgaaggtattggcctatggtcagtatgtggcagtccacccggcggaggtcgtccatcagttcttccacttcttccggagtctcgcccaatcccaccataatgccggacttggtggtaatattgctttctgcaatctgccgcaacacttccaggcttgtctcatacttggcggcactgcgtacgagggggctgatgcggcggacagtctccatgttgtgcgaaatgatttccggttgtgcatcgatgacttgtgccacgagctcctttcttccttgaaagtcgggaatcagcacttcgacggtggtgtccggattgagccgcttgatttcccggatggtacgtacccagtgcgacgcgcctaagtcgggcaggtcgtcacggtctacggaggtgacgactgcatgggagagtttcatcaaggcaatggactctgccacatgtgtaggctcatcggcatccagtggcaagggcttcccgcttgccgtgttgcagaacttacagcaccgggtgcagatatttcccccaatcatgaaagttgcggtgcctttcccccaacattcccccatattggggcaacggccgctgctgcagatggtatggaggcaatgcgattcgacaatgcgtttggtctcggtatagcgctcgttggcaccgatgcttattttaagccattcaggcttacgtactctttcgggcattatttcaattctttgttgaagaagttggtcaaccgcgtatataggtgtaaccgggtatttcctccgtagatactgtggttgcggttggtgtaaacctgcatatcgaactgtttgccgagctgtaccagttgttcggcatattcggcatagttctggaagtgtacattgtcgtctgccatgccgtgtaccagcagcaggttgccgtgcagcttgtcggcacgggtaaaggcggaactggccttatagccttcggcgttttctttcggtgtgcgcataaagcgttcgccgtaaacggtgtcgtagtagttccagtcggtaacagcagctacggctactccggccttgaataccggtgttccttcactcatactcataatggtcgtgtatccaccgtaactccatccccagattccgatgcggtttttgtccacataaggctggttgcccatgtagagggcagtttccacctggtctttggcttccttgatacccaggttcagataggtgcatttggcgaattcggcaccacgtcctccggtgccacgcccgtctacgcaaaccacgatatagccttgtgatgccatgtatgtttcccagcttacactgaacttgtcaagcacttgctgcgaaccggggccgctgtactggtacatcagtaccgggtatttcttgccggcggagaagtcggctggtttcatcatccagccattcaatgtggttccgtcggaagtctggaaagtgaagaattccttccgtggcatgtcatagccgctgatttcctgcttcaatgccgcattgtccatcagggtggcaagagtcttgccggtattgtcgttcagcgtaatgacggtcggagtgtccagattggaataacggttcatatagtacttcatgttcgcactgaactgcgcactgtttgttccggcttgtgacgatagcctggtctttttacctttccggtcaatcttgtagatggcactgcgcatggggctttcctcgttgctgctgaagtagaagcttccttcttcggggtcataacccaggaactcctgcacttcatatggtccggctgtcacttgtttcagcagattgccacctatgctataccagtacagatggttgtatccgctcttttcgctgacaaagctgaaattttccggatagaagacgatgttgtcgaatacattctcgcggatataggtatcgctttcatcacgcagagccagtttggctaccgtgctgcgagggtcggcaaagtataggtcgaaccggttctgatggcggttcagtgtcatgacggcaagcttgttggggtcttgggtaaagcggatgcggggaatatagccgtctgcatctaccggcacgtttatcttgcgggtcactttcgacttgatatcgaaggtgtgtacggacactttggaatttacttctcccgttttaggatatttgtaagtatactctcccggatacttctcgaaaggggtgaagtggggggcttgtccggcaaaaagagggaaagagtaggagggaacatctttctcgtcaaagcggatgaaagccagcatctggctgtcggcactgaattccagcgcacggttgaaggagaactcctcttcgtaaacccagtcggggatgccgttcagcacctcgttctgttttccgtcttccgtcacctggctttcgctgttgccatagagcagttttacaaggaagatgttgttgtcgcgtacgaaagccacttgattgccgtccggtgaaaatacgggcacctgctgcgggccgccgtccgaaagcttttccacaatattgttgattttaccgtccagattgcgcttcaggctgtagatgtaatgcacagccgtataggaatggcggtagatgggagttgtttcggtggcaatgagcagcttgctgccgtccggagcaaagctgtagctgtcgaatgtcttgaacgtgcattcgcgtgcggtagcggcatcaaacagcacttccacgggttttcccgttttgaaggagtatttgatgatttgtgtcctgtccgcattcatttgcgaataatgttccccgtctcccgggatggggataacgccggaaatgttcttcggagtgaacttgcccgatacgatttctttcaaatcgagcgccttgccattttgggcgaaacctgccagcgtacagaggcagaggagaagtgcgatgcttatctgtttcatatctatcttttatgcttatctgtttccctattttttctggggaacaaatatacaacaaagggaagatttatcgaagcagtgggccgattttattctttttgaacagaaaaagcccgtcctgctccttgggggcgaagcagggacgggcctccgtcactcatggatgatgattggatgagatgatgattggaatatctttcgttacaagcacttgacttttctttgatattctgcaatggctgcatccagtcgttcgtgggcggttgtgtcacccggaacgttgtgcgacggatggatgtacaagtgtacgccacggtcggcaaggatttcggcaacggtagtgatggtcatccataccatggtgacgaaactcaatgtagacaacggacctaccttgtcgaagtggttcttcaaaggtacggaggcgtctaccaggggaacgcaggaatccactacgatatctgccaactggaagaggttctttccgctggagtgacggctggccttgtcgcccgtttcgctggccgaaccgtatacgataactttcatgccgcgcttcttggcttccaatgccatgtctatattgacggcattgataccggtatgtgagaaaatccacatacagtctttggaatcaaaatcatagttcttcatgatttcctggccgtagccttctgcccgttccaggaagaggaactggtgaatacccatctggccgataatctgcgtgaagaatgtcagaggcaattcgcaaagcgggtggaatcctacaaagctgccgatacgcggatacatttcttctacgggaattgttgcgtggccgcaaccaaacgtgtggacccaacgaccggcttcgatggaatctgccataacagtggctgcttttttgatgttttccaactgggtagcctccagtttttccataatgccatgggcattctttaaccattcgagtgctaacataacttttttgttttttaagaagttaataaatttatttgagtgagcgtttatacaaaaggagcatgacggcaagtgaggcaatcatcagataaggataaagtccgatgccattggcgtattgggaaatcatgcccatcaggccgttcattgcagtctggccaatgagggctatggcaagcgccacgctgaatgctgttcccgataaggacgggtaccggcttccaagaatgctgagtatcacgggatacgtggccgacagccccatacctaccagcaccatgccgactgccgcgcgtgcaaaactcggcgagaacataaggaaacagaatcctatggcagtgatcgtaaggctgtagggcagcacggtttccggttttatcttcttgaatatcgcaacttgcatcatacgtgctacggtcagtcccgctaccatgcaggtcagtgcaatcaatgcctgattggccggaatatccgtcatctgcccaaagtaactcgtggaccagttgttgcagacaccctcgatgccgctttggaaaaaaagaatgaagctgagtagcagtaagctgctttctttcagcagtcccaatccctcttttaccgggaaaccttgcgcctgcttaggggcggggaagcgtacggggatgcagaatataatgcccgcaagcatcactacgccaattcccagtaagatggtttcgaatgaataatgcctggaaagagagcccaacaacatcggtatgcccaatgcacccagtccgtagaacatgcccagaaaactgaggcgtgagcctttttcggattctcctgagatgtcggataccaatgcattggtttctccgttgaggatgcctccgcccaggccgatgccgacgatggaagcttgcagcagtggcacgctttcaaagaaggcaagcccttccatccccagcagtacgatgatgcagctgggcaccagcagggctttatgtccgaaccggtctacgatgggaccgaaaatcagggaaccggccagcatgcccagaggcaggaaagtgaccagtgaggttgtctgcaacccgctcagattcagcttggctatgagggatggcaacactgctcccaatgtaatcatggagactccgaagaaacacatcccgatgcacgctgccgtgaatacgagattcttgtgataactgttactcatacaagtgatttttgatggcaagaaacgctgctcctatcagtccggcattaccggacaattgagaaggtacaaattccacctgcttgatgctgagcggttgcgcccatttgcaggcttccttgtaaatgtcatctataaagataccggcagggccgaatacgcctccgccccaaattatcttctgcgggttgagcaggctgaccagatttgcggaagccatgccccacatctcgacagctttgtgcaatacggagatggcgataggatctttttcattataggcactgaacacatcataggccgatatgcggcagatgggtttctggcgcagttttcctttgtatgccttgttggcgcgtacggcatcgcgtacccgtgccccgataccattgccggaagcgtaatattcgaaacatccgcatgcgtcatactcttcccggtagggaggttgcagggccatccagccggtggcgccgataatgtcgttggctccgtgcaacacgtgcccgtcgatgatgatgccggcaccgataccggttcccacggcaatgaatatggcactgtgacattctttggcggcaccttgccacatctctccatacatatagcaggtacggtcgctgtcgatgtatatctcgatgcccggaggcgttacactgcgcagctcctcatagagggggtagttgtcccagcccggtatgttgggggcccatacccggttggtttgggagtaaacgataccggggatgcagacacctattccgtcgacgtgtatacggcttctgcgtgctacggtaagaagtttggcgaggatatccgcggcgagcttgcccacttcgtgtccggttcttcctttcaggagccgtttgcggttaaacatcatgcttccgtccggaaagaaaatggcgctggctatttttgtgccgcctatgtccaatgcgattgttgccatggtgttatagtatttataggttgattcattaaggttgtatgcaaagctatgaatttatttcattcttgaggtgtataaactgaggaatttgtgtataaaaagagtgtctaatcactaaattgtgtttaatgtaattgcgcttggatgtactctttctcaattaattagttgtatatcagtggatgaaacattttttagtgcaggtggaatttctttgttttatgttcgttaacaaatcgggtggaaagtattcttgtttttgcaggttcatcccacggaaaaatcctatatttgccacttacataaggaatatgtatggaaaccaaatctacgctctataatgagttccctttttttctgaagcgatattttccctataaggtacagaaaatatcgctgaatgccggttttacgtgccccaaccgggatggaaacaaaggagtcggcggttgcacctattgcaacaaccagaccttcaaccccgattattgccgtacggagaaatccattacccgccagctggaagaaggcaagcagttctttgcacacaaatatccggaaatgaagtatctcgcctatttccaggcctataccaatacgtatggtgaattggaagacctgaagcggaaatacgaggaggccttgtcggcagacggagtggtgggcctggttatcggcacccgtccggactgtatgcccgacagcctgctggactatctggaggagatgaaccggcataccttccttttagtggagtacggcatagagagtaccgacgacaagacactttgccgcatcaaccgcgggcatactttccatgccgccgccgatgcggtggaaagaaccgcttcgcgcggaatcctgaccggtgggcatgtcatcctcggactgccgggcgagacgcacgaaagcatcgtggcacaagccggcgtactgtcccgtctgccgctcactaccttgaagatgcaccagctgcaactgataaggggcacccgtatggctctggagtaccggcagcatcccgaagatttccatctgttcggtgtggaggaatatatcgacctcgtgatagactatatcgagcatctgcggccggacttggtactggagcgtttcgtttcccagtctcccaaggaactactcattgcacccgactggggactaaaaaattatgaatttaatcaccgggttcaaaaaagaatgaaagaactcggtgcatatcagggaaagaagtatgaaatgtgagaaaaaagaattatttttgccgcaactttaaatgtggaatcaatctaaataaagatacagttatgaacccaaaaacagtgataaaaggaaaaatccactacgtgggagtgaatgaccgcaataagcatttgtttgaaggcatgtggccgttgccgtacggggtttcctacaactcttacctgatagatgatgagacggtcgctttggtcgatacggtagacatctgctacttcgaggtgtatctgcgcaagataaagagcattatcggcgagcgccccatccagtatctcatcatcaaccatatggagccggaccattcgggctctatccgcctgataaagcagcattatcccgacatcatcatcgtgggcaacaagcagaccttcggcatgatagagggcttttatggcgtgacgggcgaacagtacatggtgaaggacgaggattttctggctttggggcatcataagctccgtttctatatgaccccgatggtgcactggcccgagacgatgatgacttttgacgaaacggaaggagtccttttcgccggtgacggcttcggctgtttcggtacgttggacggcgggttcctggatacgcgcatcaatctggacagatactgggacgagatggtgcgttactattccaacatcgtgggcaagtacggctctccggtgcagaaggcacttgccaagctgggtggtctgcccatttccaccatctgctccacgcacgggccggtgtggacggaaaacatagccaaggttatcggcatctacgacaagttgagccgctacgccgctgacgaaggtgtggtcattgcttacggttccatgtacggcaacacggagcagatggcggaagccattgcggcggaactttctgcacagggcatcaggaacatcgtgatgcacaatgtgagcaagagcaatccttcttatatcattgccgacatattcaagtatcgcggacttatcatcggcagccccacctacagcaaccagatttatcctgagatagaatccttgctctccaagattctggtacgcgaagtgaagggacgctatctgggatacttcggctccttctgctgggcgggtgccgccgtgaagcgcatgggcgagtttgccgaaaagagcaagttcgagattgtgggcgacccggtagagatgaagcaggccatgaaggacattacttacgaacaatgcgaaaacctggcacgtgccatggcagagcgtttgaagaaggataggaagtagttgaaaattacccctaatttattaacctaataaaacaatcacaatgagactaatcattcaaccggattatcaatccgtatcaaagtgggcggcacattatgtggctgccaaaatcaaggccgctcatccgacacctgaaaaaccgtttgtattgggatgccccaccggttcttctccgttgggcatgtacaaggaacttatcgacctgaacaagaaaggcatcgtgtctttccagaacgtagtgactttcaatatggacgagtatgtaggtttgcccaaggaacatcccgaaagctactattcctttatgtggaacaacttcttcagccatatagacatcaagccggagaacaccaatatcctgaacggcaacgctgccgacctggatgccgagtgtgcacgctatgaagagaaaatcaagtcctacggcggcatcgacctcttcatgggcggtatcggtcccgacggacatatcgctttcaacgagccgggttcttccctttcgtcacgcacccgccagaagacattgactaccgataccatcattgccaactcccgtttctttgacaacgacgtgaacaaggtgcccaagactgccctgaccgtcggtgtcggtactgtgcttagcgcccgcgaggtaatgattatcgtaaacggacacaacaaggcacgtgccctctatcatgcagtcgagggtcccgtgatgcagatgtggactatcagcgccttgcagatgcacgaaaagggtatcatcgtttgtgacgatgcggccaccgaagaattgaaggtgggtacttaccgctacttcaaggatattgaggcagagcacctggatgcggaaagcttgctgaaataagcaaactaataaaagttttgcaattccaccctcaccaccctcaccgcttgtctgcatctgcttgttcatcggtgtttcaggggtgagtgagagcaatttaaaagggtgagggcaaattttgccctcaccctttttgttctcctgattttggttgactgttttcaggacagggcgttatgtgatgaaaacgggctctgctccgctgtaaggctttgggtgccaatgttaaagataccaaatactcactgcaaaaccagtgcatcgtttttgcagtgccgctgcaacatagatgcagtgccactgcaactgttttgcagtgctactgcaacgcctttgcagtgttactgcaaaagatgtgcagtaggtttgcagtgagggcttgtgatgaaaaagccatgggcgtgctttcttttttgcggaatatgtgctatctttgtcatacttgtaatttaaacagtagcagctatggaattgagtggcagacgctatccgatagggatacagaattttgagcaactgcgtacgcggaattgtgtgtatgtggataagacggagctggtgtacaaattggtgaatacagaccaaatttatttcttcagccgcccccgtcggtttggcaaaagcttgctcgtgtctacgctggaggcctatttccaggggaaaaaggaacttttcgaagggctggctatggaacgtctggagcaggaatgggaggtttgcccggtgctgcacgttgatttcagcttgacgaaatatactgagctgcgtgacttgacggggcaattgaatttgtttttatctcgttgggaagaaatttacggaaaaaaggaagaggaagagggggcggcagagcgtctgcaaggcatcatcctgcgtgcctacgccaagaccggaaagccggttgtagtgctgattgacgagtacgatgctcctctgcttgacagtaattccgatgcccttttgcaacaacagcttcgcaacgagatgcgcaagttcttcagtcctctcaaggggctggggcaatatctccgttttctttttatcacgggtatcagcaagttcagccagctgagcatcttcagcgaactgaacaatttgcaaaatatcagtatgcgcgatgacttcagtgccctctgcggcatcaccgaggaggaactgctgacgcagttgaaacccgatattgagcggatggccgaggctaatgatgagacttacgaggaggcatgcttgcatttgaagcggcaatatgacggttatcatttcagtaaggcttgtgcggatatttacaacccgttcagcctgttcaatgctttcaattccaaagaatacaagaactattggttctccacgggcacgcctactttcctgatagatattctgcgccatgcagacttcgatgtgcgtgcgctggaaggtgttgaggctaccgatgagcagtttgatgcgcctacggaacagataacgagtcccatcccggtgctctaccagagcggttatctgaccattaagggctatgaccgtaatttccaaatctatcgtttggcctatcccaacggtgaggtccgtaaagggttcattgaatccctgcttccctcttacgtgcacttgcctgcccagaacaacaccttctacgtcgtctctttccttcgcgacttgatgaagggtgatgtggagagctgcctggagcgtacccgttccttctttgcctccattcccaatgatttggagaacaagaccgagaagcattatcagaccattttctatttgttgttccggttgatggggcaatatgtggagtcggaagtgaagagttccgtaggccgtgcggatgtggtggtgcagttgcaggatgccgtttatgtcttcgaattcaaatacgacggtaccccggaagaggcgttggctcagattgacagcaagcagtatgccatcccttaccgggcggacggcaggcgtgtggtcaagatcggtgtgaattttgacagtgccacgtggacgattggcgggtggaaaatagctaaagcggattagaagaagaaactttattaataaattagggaaacatgaaattaattaggttaaacagctttttatatttgttctgcatgttgagtgtttttgcatcatgtgtgcaaaaaccagatagtagtgtagaagattgggatcgtacttttataaatacaaagaagcttatttcagaggcttgtttggatagagaattaattttgggacgtccttttttaatccaatatgtagattcatctttgcttatttatgatgatattggagattctctttttcttttggttgatttgaaagaaaacgatagggtttatcgttttgggcaaaaaggtgaaggaaataatgaattcttgcaagtttttgctttctgtaatatgaagtccgattctattcttggtgtttatgatgcatataaacatgaattgcgtgagataaacttagataaggttaagcgtggagaaatgaattttccagttgtttttaaagatactttatcgagtattaagctatccccgacaaaatatgacgcatatcttggattaggattctatgaaagtaacatgttgagtcttacggataattctattggaagtaagttcttttttgaatatccttataaagatagtcgcgagaaagctatttcaaatcgtttgcgagggatggcttatcaagggactttgtgctctaatcggtcattggacaaattcttgtatgctgtgtgtagtgctcctatctttatgctgttttctgtaaataaagatggaattgagaaaacttatgaattgataggtggatatcccaattatgttacagaagaaacaggtgaatatcgatcggctccaatgagtgcagataataaaatgtcttttaccatggcatatgcaacggataattacatctatctgctgtattccggaaagaattttagagatgctggtatggatgcatttaaagctaatgtcatttatcagttatcttggaatggaaaaccgataaataagtttgaaactgattatccactgacaaatttttgtgtttctgataatgatgatgtcttgtatgctttggctgataaaggtgaagtggaactggtacagtatactttgaaatagattaagttatgtttatggttggctcgctctatccaaatactgtttcttatcagttcttggtttttcttaagcattttacctgctgcgcaatggtatcacgccgtcctttattaagcaaacggtaagaagatgattaagatgggtgtctcttgttaaaaaaatatctaactttgaggcggattaatatttgaacacacacaacgtggacgagaaaagagggagacggcaaatgctattgatatacgttgctatagggattattgcagcagtaattactggttggtttgtatatcaaaaccggatggagtactgggaaacgcaggcacgcagtgcttttcgtgtagctttagggaaggagttgcagaaaaggaatgaagttgacgtgtatttcagttcgtcagggaatattaggttaccggatgattccattgacattaagaaggagccgataaaggtagaaatggaaagtgaatatggtaaaaaggacttttttgttccttatgaaaagtactttcataatgtggagcaatcttctaatttgagagggatgcactcttatatactgcatatgttccctttgcaagctgattcgttgaataggatatggtatcgcttactggaagaaatgaattattctgggaaaacggtagtacgtatatctgtggctgattgggatgaacgtgaaacttatactttttcggacgattcactttatatgttaaaaccggatagtcttatgtcttgttatttgggctataggtgcgaaattggtgtgacgggatatttgtattattcttggttgaacatttttactgctaaggataagattcttttgtgcgctcttgttctttgttgctttctgctgttttttctgcaagaatacattgctaaagtctatcgccgtttttttgtcaaagaggtgacggtagaaaaaacagttccgatatttgtggagaaagaaataccgatgattgcagtagataggagtgaggcgcatgtttatcggttggaagatgatttgttttttaatgccgattccggtgtgctgtatagagtagacaatagggtgaagttgacggcaacccttgcaagactgctgcaagccttcttggatgcggaagattataggttgtcagtcaatggaattatggaactattgtggccggacggttcagtaacaccgggtaatgtacatactgtaataacaagattacgaaaagccctgtccgaagtctctgattgggggatagaaaataaaaaattttgttatcaactaaaaagtcccatttcattgaaaaaatccttgaatgaatgatggaatctctcatctgacaaagcctaaaataagtgcttgtcagacgaacggttatcgcgtcctgccatggctgaatatgcaaagaatgtgtatattggaattgcggatgctggtgcggaacattgttttgaaaccctattgcatggtcaggcttcttcggttggcaattatcccattccgcaggtgaaacaatatttagggggggggagagaggatataatgcatctcgtggagtatttgtctattcttgttatgatttcccttatttagcattgtatcagcaggatgaggataaattttcattagtgtgggaatggcgaacagatggtgacgaatacgagattcggaacaatgaggtgatttttgaccgcagggtaaaaggtgtccggggactctgtatgagtaaggattttattattacattgcaacgagaccgtagaaaagatgatacggatgaatctacagtgggaagggatgcaagcaaatgccctcatactgttttcttgtatgattatgatggaaatttagtgaagattgttgatttgggtattcccgtaatgcgtatagcttctgaagaacagagtaatacgttgtatgccataggggtgaatccggattttgtcttggtgaaatatgaattataagataattaattgacggctcatggcgtgtaggatatactgattaccagtatcgataaccgaacggatttttaataggaatattttttcatcgtgagtataggtgaataaaagtaacttttgtattcattttttcttttttcttttatattaccttaattccgcaacactattacaaatataactttttaagtacctgagcaacaaaaagttgctcaggaatttgccatgtcagatttttcacctatcttagtgttgcaaatcaaaatatgtatcaaacccgacagacatggcaaaggtagcaattaaatccgagaaactcactccttttggaggaatattttcaataatggagcaatttgactccagactctcatctgtaatcgactcaaccctcggtatgagatgcaggctgtatggttatcaatacagcgaaatcatccgttcgcttatgagcgtttatttttgtggcggctcatgcatcgaggatgtcaccactcatctgatgtaccacctttcgcttcatccgacacttcgcacatgcagtgccgacacgattcttagagccataaaggaactgacccaggataacatttcctacacatccgacactggcaagacctacgacttcaacacggcagacaagctgaatacactgctcctcaattgcctattgtccacagggcagctgaaagagggcgaggggtatgacgttgacttcgaccaccagttcatagaggctgagaagtttgatgcgaagcctacatacaagaagttccttggttatcgccctggcgtggcggttattggcaacttgattgtcggcattgagaacagcgacggcaacacaaatgtccgtttccaccagaaggacacgctgaagaggttctttgaaaggtttgaacaaaacaagcttattatcaaccgtttcagagctgattgcggctcgtgttctgaagagatagtggaagagattgctaaacactgcaagaccttctatatccgtgctaaccgatgcagttcgctctacaatgacatctttgccctcagaggttggaagaaagtggaattgggcggcattgagtttgagctggcctccattctcatcgagaaatggaaagggaaggcataccgtcttgtgattcaaagacagaagcggatagacggcgaactcgacctgtgggaaggagaatacacctaccgctgcatccttacaaatgactacgagtcttccgagaaagagattgtcgaattctataacctccgtggagggaaggaacgcatcttcgatgatatgaataacggattcggctggaacaggcttccaaaatcctttatgggagaaaacacggtgtttcttctgcttatggcactcatacgcaacttctataaattcatcatggcgaggcttgacgtgaagaggttcggactcaaagcaacaagccgcatcaagacgtttgtctttaagttcatctctgtgccagccaaatgggtcaggacatcaaggaagtatgtgctgaatatctattcatgcaacaatgcttatgccaatgtgttccagaatgactttggataacaccgacaacttatagtcgtgattttgcgtattgcctcaagtcgcatggtggggtaaggggcatttatatgtctttatggtgacattcgatgcactgtgccccctttttactaacgatgcagattcttttcgcttctgtatcatattaggcgcgtagttgcggatttgaggtattattgtttaactttggcgctattaagcggatgcctcttcgagtgcatgggtagaaatgaataagcaacagaaaggaaggagtagatgaaacgctataagaagattcttatgatatggatatgtgccattgtagtggtggcagtgtctgtgatagtagcattatatgataatgccaaccagggacaagacgtggctaaggaggttgctgtagaaactctgcggaaggttgcggaacgggtcgtgaatcgggaatttgatgggctggggatgttctatgcatctgggtctgatggtggtaagaagcataccaaaaggaaagcgatatcagaagatggtgaatttgaagtgataatagattcattgaaagaggcacaaggactattcccgttggatgtcgtagggtttaaagccgatatgttgaattattatggaaaatttccattggaagagatttgtcttgagtggaaagctgagatgaatgataggtatggcggagccatgtgtgctctttttctgaaggttaatccgatgggaaagggcattgtgcaagaatcatctactggagatgaaactataattgcttcacagaatgatttaggcacttactatttggacgatatgtacacaatgaggttgacagcttatatgctgcctgatttttggcactgtgtggattgggcagaccatgtgctgcagatactatcctgcattttgtgcattctgctattgggactggcgatttatgtagggggtcaacagtatagaaagagaaaaacggctgatacgttgacaaagagcacttatcggttcgggaagtatatatttgattccgtcaaccatacactgacttatgaaggtgaaaaagtatcttgtacgccacaagccgcgaagttattacttggttttgccaagtcgtccgaacttttcctgacgaacgatgaaatagcggaaatttgcggttggccattgagtgatttgaatttaggcagccgccgcagaaaagcaataagcttattgggtaaactctttgaggcggacgattccgttcagattcttcttctgccggaaaggaaggggtatcaaattgttatctccaagtagatgaaatgttaacccatattggtgtgtcgggtgtgaactttttttcacgccccaactttgggcgttttccaaataaagactggcaaaagccaaaataatccttttatctttgcttgtgtaacaaaaaacaaaaacactatgaaaagcaaggtgaagttattaggagctttggcaattagtgccatttcggttttaagctatgttcaaattagtcattcggaaaagctggatgatttgctattggaaaatatagaggcattggctgctggtgagagtggggatgatagcaaatgttttgggagtggttcaatagtttgtcctttaacaaatcaaggagtagctcatgtgcaaatttattatagcctgcctcattagcctatccgcactgtccttttcctcttgtacgcagaaaaaagtagcaacttctgttgcctacatggattttccgcaaacaatcgagctgaaagcgagggtgcagccattggacaccgctttgttccgttatccgttccgcgttcgggtgcagggtgataaggctgtggtaatggatttgcatggcacagactacttttgccatgttttccactatccgggtttccgctattttgcttcgttcggcaagcggggcgaggctcccgaagagatgctttctgctgaaaatatccgatggcatggtcaatctctgtggggacttgatgctggtaagtccgtattaaccaagtatgattttacttcgtcgggttgctcaatcgttcctcagaaagtgataaatatggatgctgacatgcttcgcgttttagactttgtgatggttgacgactttaccttcattgttccggacggatctggcagtagccgcttttgctgggtaaactatcaagggaaattattgcgcagaaccggtcaaataccgtcagccaatgcggaggctttacagaatgcccgtcctgcattggctcaggcatggcgtagcttcatcgactataatccccgaaatggagtgctggcagcagttacccagttgggcgaagtacttgaagtctttaatttgaaagatagtacgcatgtggtacgcattggtccgcacggtgaaccggagtttaagatttctcagggttatggtattcctacgggtatcatgggatttagcgatgtccaagtggcagacagtgctatctatgcggtttttcatgggcgctcttttaaggaaattgcgcaaaatgtacagcaaggtgtctatttgccggatggaggacggtatatctatgtttttagtctgaccggcgaacctctctgcaggtatgtgttagatcattatgtttatggcatatcggtagatgaacaaaaaggaataatcttggcaacggatgtgaataaagatgatccgataatagagtatagtatgaaataaagtaaactataatatggatggagaggaacggacggttcacgtttggttggtgcatctcgtaccgtccgttccataacccaccaagaaaggaggtcgaggcaaagatagtaatttgaattgaaaacagagtgtgttttctgccatttcgataggtatggcaagaaaagagttctccaagatttttatatcttgattctggtacgcaagcattatgcttgtggtaaatgataaaaaagaataatcttatactaataaaattgaagaatagtatgaagaaaatgattaagatagcttttgttgcagcatttgtagcgattgcaggatatggtgtttatacaaatcagaaatcggagacattgtctgatttaacattggctaatgtggaagcattggctggtggtgaaagtggagggtattattgctgcagtccatatagttacgagtgttatcgcattgtaggtggtggtattgtgcatggactgagacttcctttaccttgttaatagaataaaaacaagttcgattagagaaatatattttcctataatttctcttctaaatctactagttagatactgattttatagtatatattcttttgaaattagaactatagtagaggatttgtctggaatctaatcccatgtcattcatgatgctacaatacaataagtgtgctttgagcctttttgggggtctctaacttagttggggatatatacaaaatcttgaagaataattatactttagttaaatgatggcatggggttgaaaattcagacactaatatattaaaaataaactatatgaataaaatgaatagattcttttggggagtattgtacatcgtgtttttaagtgcttgcaataataaaccacctcaaacaattggggaattatttcctgaaacgttttccttgaatcaaagaaaagaatgcctaatcagtgaagattccttaggtcgtgtagaaggtattgcatgtgacgaggaaaatctggttgtttttgatacacgttccaatcaatgttttacattgttcgatcaacagtcgggtagacagattggtcgttttggaaatatagggcagggtcctttggaaataatgtttggtagtagtggctatttagaaaaaaagtgtctagtgacatataatgaccaaagtagaatagtgatgaaatatagccttgattctttgcggagtggtgtggttgatggtgctcctacacgtctgacgaagcataaaatatcgaatgctctaatatcgaggcttattactattaatgattctatttttgtagtaggaggaatgtatgaagcgcgttatcagcatttaatatttgatgcaaacaatcgtgtgttagattatggtatagatgtttataatgctgctgatagtagtttcaatgctataactagatatctttccaatcaaggatgtatggcaaagcatccgtataaaaatgagtttgcctattctgttaatttttcgtctaacttggatttctttgaaatagttgataataaaattaaacttaaaaaaacgatgcgtttagggaatcctatatgtgaatctgtagtagaggatggtgggcaattgtttagtacacgtctaaccaaagaaagtattcatggttttattgaagtgtgcccaacacctaagtatctgtatgctttatattcggctgggaaaatatatgaagttcaaagaaaatcgaaaactgtatttgtctttgattgggatggtaatcccataaaagaacttctacttgatatggatgtgtttcatattgcagttaatgaaaaagataaaaagatgtttgctgttgtaaaaaatgaagagggtgggtttaatattatatgttatgtattataaatctttcaatggtgtatgaactgaaaaaataaatttccatagagatgaaaaaagggtttgtatttacaatgtatattatggtattactgattctgttctcctcttgtcagaacaaaacaaagaatcatgttatacaattagtgagagagtgggaaggaaaagaaatacaattccctcctaattctgtgtttactattcaagggaaagacactataaagcattcaggagataactgtgattacaaaatagtaacttatattgattctataggttgcacgagctgtaaattgcagttgcaaaattggaaagattttatacttaagatggattctctaaaccatgataaagtatcattccttttttacttttatcctaaagataagtctgaactacgttttatatttcaacgtgacagttttgagtatccgatttgtttggatgagaatgatagttttaataagctaaatcattttccttcagatatgacttttcaaacttttctattgaatcggaataataaagtacttgctatcggtaatcctattcataatcctaaaataagagagttgtatgttaagataattcgaggtgagagtatagcaatagagaatgaaagtaaggatattaaaacagaagttgccacggacaaagtttccatcttgttaggtgtttttgattggcagaaagaacaaaaggcaatttttactttgaagaatatcggagataacccattggttatacaagatgttgctacttcttgtggttgtactaccgtagcttattcaaaggaaccggcattaccgggtaaggaaatagatttggaagtggtttataaagctgaacatccggagcactttgacaagacgataacggtatattgcaatgcagaaacttctccgttggtattgaagattagcggggatgcaaaataactgattgatgggatgaaggagcggctgcaattgaaaaaatggttgaatggaataacaaacgtattattctgtctgtgcctgcttgttgtgatactgatagtattgcaggtgtttgtggtgacctccttcaagataccgtcggactcgatggaaccgtcgttgctggcgggtgattgtattctggtggataaatgttcgggtggagcacgcctattcaatgtgcttgatgccgtggagaaaaaggaggtgaggatgcaccgtatgtccggatggagaaattttcagcggaatgatgtactagtgttcaattttccttatccgggcaggtgggacaacattgcgctggacgtgatgttgtattacgtgaagcgctgtatcgccatgccgggggatacgttggagataaggaatacgcattatcgtgtgtccggatttgatggtatcgcaggaaatgtgcaggcgcaggaggaattaggtaaattgatatcttcgggcatgacggaggaacggggccttgttcttaagagctttcccgatggtggctgtaatgggtggactatcagcgagtttgggcctctttatataccggccaaaggcagcgtggtaggaatgaatccggaaacacggttgctgtatcggaacgtgatagagtgggaacagaaaaagaaactgacattgcatggagattcggttctgctgggggacagtgtgatacacaattaccgcttctgtgagaactattattttgtttcgggtgacaagatggtgaattcaaaagattcccgctactggggattactgccggaaccatttatagtgggaagggcatggctggtatggaagtccgtcagcccgaatactggaaaaatgagatggaaacgtatctttaaaagaatagactaagatgaaagttctgtttaaattgctctggatattattgattgccgggatattggaggcttgcaatgcttccggcagattggagtacgcactggagtgtgctgcaaccaacaaaggcgaactggaaaaggtactggaacattataaagatgagcctgaaaaatataaagccgcttgtttcttgatagaaaatatgccttatcactatgcccttgaaggtgaagaactggattctttgaaaacagtgctggcttcggcagatgcttatggggtgatgctgaaggatactgccgtaccggattgggattattataccccttccggattgcagagaaaaccggatgtactgaatataagggctgaattcttgataaataacattgatttggcttttgatggttggaaaaagcgtccgtggaatgcttccctttcttttgcagatttctgtgaatggctgcttccctatcgtatcggaaatgagactccggacaactggcggcagatataccatgaccgttattcctttttgctggacgaggtttatacgggtagcgatgtggtggaggcgattagcgtagtttgggagtatttgcagaaggaagatccttaccggtttacgtgggtctttaactatccgcatttgggaggagagtacttgctgcataatcgcatcggcaagtgtcaggatgcttgtgattttatgatttatgtgatgcgggccattggcgtcccggtagcctatgatttctatactttcaatgcggaaacacggaaagggcatgtgtggaatgtggtgagggatgtaacgggtgtctgccttccttttactttcccttcccggaagccggaacggggaagtttctatattgacagtcggcggccgagcgtggtttaccgccggtgttttggcagacaatgggacatgggtggtgattttatgcggaaccagtccgtaccggctgcttttaaggatgtgtttgcaagaaaagtgtcggataattattttgattcgaatctggaactgccggtagaagggatggacgggaattatgtttatgtggggttgttcagtgcttatgggtggcggggaatagattttactaaggtagaaagtggaaaagcgcttttcaggaatttggcttcgaggcaggtttatatattgttggcattcgcaaacgggcagtatcgccctattggaaatcctttttattttgatggcaaggatatacatccttatgttgcagatacctccaagtgctattctgctgaattgtatcggaaataccctctttcggaacgtatcaggaactatatgggagggataaaagacgggcattttgaggcggcttgtgataaggattttaaaaatgcggagttgttgtgtactgtgaaagatacgcccggtatcaattataatcacgttattcttgagaaaccggtaaggggtcgctatgcccgtttttgttcttcggcagagggatatgcggaagttgccgaaatgcatttttataaaggagaggaagaaattgtccctatagacagttggggagatgctccggctacagtgggtacttttgcccatcaggtctatgataatgagccgttgtcgtatttcatttcatcaaaacccggtgcaagtgtaacggtggattttggaaaggttgttactatagacaattttatgtatatgccccgtaacgatgataactttgtcaggataggggattgttatgaactcttctattggggagagggctgttggaactcattggggaagaaaatggcagaaaaaccttttctgccatatgacgggataccatcgggagctttgctctatttgcatgacagtacccgtggagaagaagaactgatatttcatatggaagatggtaagcaggtatttgtatcggattgtaaggattgattggattgtctttcagattggaatagaaaaaaatggaatagtgatatgaaacattggtgtgtatgggtatggtttacagcaggtctgtttatggcttgttcttcggaaaatcagtggttggacacagctttgaatcttgccggtgataaccgtgcggagttgcaaaaggtactggaccgttacaaggaagaggacggtgacaaatatcgtgctgcttgttttctgatagagaatatgccttttcatggtgcttacgagggaaaggccttggagaattacaggaagtatttcagtgaatacgtttcatttccttattccaggcatgtgcaagagttgattgattccttgaaaagagcagatggagaattttctataaatcaattgacttataagagggacattatgacggtggattccgcttttttggtcaatcatatagaatgggcattcaaagtctggcgggagcaaccttggggaaagcatgttgattttgatactttctgcgaatatatattgccttatagaataggggatgagccgctttctctctggcgcaaagaaatttatgagtgctatagcccgattttggatgaattcaggaagacagatgaggctgataatcctaaggttgccgcccagttgttgatggatacgttgcggaaagcgaactaccggaatacggctctttttccggtggggcctcatttgggaccggatgtactgaaatggcatacgggcagttgccgagagtttacggatgccatgatatatgtgttgcgggcattgggcattccgtgcggagtagatagggtgatggtattaggagacaacaatgcctctcatttctggaattttgttttggataaggaaggaaagacatacattgcaaatcttccttatgaagaagtatggagcaaagcggaagaatatagcatttcgaggggaaaaatgtaccgggcaacctatagtattgataaggaggcggtacggaaactggggaaatattccgatgtttacccggcattccgacgtccgttcttccgcgatgtcactgcactttataccggtagcaggaattggactgtagctcttccggattctttgctttccggacagtttcgtgagggggatatggtgtatttgtgccttgccaacagactacaatggcaacctataggatatactttctttaaaaagcgggaggctcgttttgaggatgtgggaggcggggcggtctttacgctggctgcctggaacggaaaggaatacgctgcagtatcttctccttttcttctggagcgtgaaaccggaaagatacggttcattgttccggaagctgaaaagcaggaattggtcttgtataggaagtgccatcttactttgagtgttcttttcaatgaccggatgattgggggagtagtggaaggaagcgaccgggcagactttgggcggaaggatactctacttttgataaaggaggctccgtatcggctatatactgtggcccggttgaagtctgataaaccgtatcggtatatgcgctataagggtgctgacggatgtttctgtaatatctcggaactggctttttatgagaatacggaagataccatacctctatatggggaaatcataggtactccgggaagttttgaagacaatacacatgaatatttgaacgcatttgacggtaatccggatacttcatttgattatatacatccggatggaggatggaccgggatggactttggaagtccccatcgtgtggagaaggtggtgtatactcctcgtaatgaggtgaattttatttataaaggtaatttgtatgaattgttttattggggtggaggaaaatggaattctgtcgggcggcaaatggctgtgtcagattctattgtctattcagggtttcaaggtgctttattttatctgaagaatcacacagccggtaaagatgaacggatttttgaatataaagacgggaaacaaatcttttggtgaattatagaatactattgaatatttgatagatagaatgaataatgtacgtaatctattgactggaagtttggtctacattgcttgtatagttttattgtctttggcatgtaacgtttcttccggacttcctgtagctgatgttatagggcaatggctctatttcgataaaagtgcattggtagttgcaggatgtctgttgatggctggattgatgatggaaaaaaggtattttctttttataccggtttcgtgggtattggtaatgctggggggcattgaggctgtttggggattgaggcagctttatggttatgctgtgtccaaccattccttgtatgtattgacaggttctttcttcaatccggggccttattccggctatttggccatgatacttccggtctgtctgcatcaatggctgaccaagaggggggagattctctgctctgaccggaatgacgggaaaggatggaaaaaggtgatggataaagttggagctatggttgccggtggcgtgatgctgcttatcttttgtgtgcttccggcaggaatgagccgttcggcatggttggcggcaggagtttcctgtctgtgtgtatatgcttggcatatggattggacggataagttcagattattatggcagcagcaaaggcagcgtgtggtgatggtagtggtcggtggattctgtgtcttgctattggcgggctatttactgtttgtcttgaaacccgattctgcacgtggccgtcttttcatgtggaagataacttgtcgtgccattgcagaaaagccgttgaccggatatgggattcataatttcgcagcagcctatggaaatgcacaggaaacttattttgcagcaggtgattatgaaccgtgggaggaacgtgtggcgggaagtccggaatatgcattcaatgaatatctgcaggttgcggtcgaactgggtattcctttggctgtatgtctattggttgtggtcgtgctgtgtttgtataggggagtccgtaaaggacgttatggtatctgtggggccattctttccttgatgatattttctttttcctcctatccgctacaacttccggtatttatcgttacatttggaggattgcttgtggcgtgcttgtccggtgccgaccgttggcaatggttggggctggctgtatcagtaggcatcattggcggttttcgcctgaagaatgacttgcaagtggagcaggcctgtcgggagtggatgaatgcgcgggtgctgtataatgcaggtgcgtatcaatcggcagagaaagagtacgggcgcctttatcctctgttgagggaccgggcatctttcttgttcgaatatgggcatggattgcacaagcagcagcagttcagtaaatccaaccgtattttgaaagaagctttacagcgtagttgtgaccccatgatactgaatgtgataggcaaaaactatcagcagatgggtgattgcttgtcagcggaagactggtttatccgttccacccatcgtttgccgggacgtatttatccctattatctgcttgcgaagctttatgcggaaccaagcttcaggcaaccggacaagtttgaaaaaatgaagtggatggtattgatgaaagagccgaaagtgcattctacggcaatacgacagatgagggaggaaataaaaaagattcagcttatttttgtccatattaaaaaagatgaataaaaacgtaaagcgttaataatgagcgaactaattactaaagtgctatgaaaaaagtgtccacatgcaaatatcggttcgtttttttgaaacgattaattttatcaatttataattgagtatgaatatgaagacacagaactatcgatacctgctatgcatggccgttgccctgcttgccgcctgctccgatgccggaaagggaaaagagtccgaggaaggggtggcaaccgtcctgccaagtgaaagcaatgaagtgaccgtgaaagtcctgaagcgggcgacctttgagcatgaactggtgagcaacggaaaagtaaccgccggtgccatggcggatttgcgttttgagactaccggtgtagtggcacacatctacgtgaagaacggtgacccggtgcgcaaagggcagaaacttgccgaactggataagttccgcctgaagaacaagaccgcgcaggccaaggatgccttggaaaaagcggaacttgagttgcaggatgtattgatagggcaaggctatccggtgggggatgcctccaaagtacctgctgacatcatgaagctggcccgcgtgaggagcggttacgaccagagcctcgcccagtatgagcttgccgcgtatgaagaggaacacgccacgctggttgcgccttttgacggggtagtggcgaacctgttctccaaaccgttcaacgaggcaagtacctcggaagccttctgctccattatcggcactcaaggtatggaggtggacttcacggtgctggaaagcgaactgccgttgataaagagtggcgacaaggtgattgttaccccttattcggatgccggctttaggcaggaggggcgcatcacccaaatcaatcctctggtggatgacaaggggatggttaaggtgaaggctgccgtcaatggcaagggacggctgttcagtgggatgaacgtgagggtgaacgtgcaccgctctctgggcggacagcttgtaatcccgaagagtgccgtggtgttgcgttcgggcaagcaggtggtgtttaccctgaaagacggaaaggcgcagtggaactatgtgcagaccggtctggagaatgcggaaagctatagtatggccgacgatgccctgaaagaaggcgatacggtcattgtgacgggaaatgtgaatctggcacatgaagcatcggtgaaggtggttgatagataatgagtgataagtggtaattcaaaattcatagttcaattgataaagtttttgatacagcggcctattgccgtactgatggcatttacagcatgcttcattgtcgggctggtgacttacttcaccttgccggtatccttgctgcccgatattgccatcccggaaattacagtgcaggtgtcggcgcagaatacctcggcgcgtgaattagagaatacggtggtgaaacctctgcggcagcagctcatccaggtggcgaaactgaaggacatggacagcgagacgcgcgatggtgcaggcatcatccgcctgggcttcgacttcggtacgaataccgaccttgccttcatagaagtgaacgagaagattgacgccgccatgaactatctgcccaaggatgccgaacgcccgaaggtgataaaggcaagtgcgacggacattcctgtcttctacctcaatctgaccctaaaaaacgacagtgcatacggcaaggtggacgaacgcgcgtttcttgatttgtgcgagtttgccgaaaatgtcataaagcgtcgcatcgagcagttggcggaagtggcaatggtggatgtcacgggtttggtcgaacgccagttacagattgtgcccgacccggataagcttgctgtgttggggctctccattgaagacatagaaaacgtgctggcgcaaaacaacgtggagccgggcagcatgactgtgcgcgacggctactacgaatacaacattaagttctccaccctgctgcggacagaggaggacgtgaagggcatcctgctgcgaaaggaaggacgtatcatccgcttgggagacttctgccgggtagagattgttcctgccaaggagaaaggtgtctccatgagcaatggcaagcgtgccgttacccttgccgtcatcaagcaggcggacgagaatatggaagacatgaagcttgccatcaacagcacgatggactacttcaagaaagtatatcccgacattgattttagcatcagccgtaaccagacggagttgctggactataccatctccaatcttcagcaaaatttgtcgttgggtttcctgttcatctgcattgtggcggtactcttcttgggggatgtcaagtcgccgttcatcatcggcctgagcatggtggtgtccattgtaatctgtttcttgttcttctatctgttcaggatgtcgctcaatataatttctctgtccggattgattctggcgttgggtatgatgattgacagcagcatcattgtcacggaaaatatttcgcagtaccgcgaacggggttattcgttgaggcgggcttgcgtggcgggtacgggtgaggtggtgacgccgatgctgagctcatccctgaccacggttgccgtgtttgtgccgctgatatttatgagcggcattgcgggagcgcttttctacgaccaggcattctctgttacggtggggctgctggtttcctacttcacgggtatcatgctgctgccggtcctctatatgctggtctaccggacggggttgcgcggcaggtcgtggttctcccgcatccgcatcaacaatccgttgaaggaacatacgctggaccgtttttatgatgcgggcatcgactgggtattttcccacaagacggtaagtatcatattctgtgtggtttctattcctctttgtgtctttctgttctattccatagccaaggagcgtatgccgcagatagaccagaatgaactgatagtccacgtggaatggaacgaaaatatacatgtggacgagaaccggcatcgtgtgaatgtgctgttcggacagttgttggacaagactgtggaacagacggctgccataggccagcaggactatctgctgaaccgtgagcaggctctctcttcttcggaggcagaattgtatttcaagacttcctcgcctgacgggattgctcccttgcagaagcaggcgggcgagtggttgacacgggaatatccgttggcgacagtctccttttctccacccgaaaccgtgttcgagaagcttttcgtgaccggggaggccgatgtggtggcgggactttatgcccgcaataaggagaaggcgccggcggcggaagaattgcgcggactggaacaacagtttgcggagcttacggggacagcgcccgtaggtatcgctttcgagaaccagcttgacataagcatcctgcaggaaaagctgttgctctatgacgtttcgtatgacgagctttaccgtacgctgcggacggcattcaaggagaacagcgtagctatgctccattcctaccagcaatacctgcctatcagcattgtgggcgaggagcggacagtgaacgaggtgctgctgcagacattgatacagacccgtccggacagtaagggcgaagtggagtatattccgcttcgggagctggtaaaggtgcgtccggctgaggacttgaaaacgattacggcaggacgcaacggtgaatatataccgttccgtttctatgaagtggacgatgctccggagttgatggaaaaggtgaagcgggaggcagatgccacgggtgactgggatacggccttctccggcagtttcttctccaaccgccagatgctggacgagttggtggtgattcttttcatctctgtcctgctgatgtatttcattcttgccgcccagttcgaaagcttcgtgcagccgctcatcgtgctgctggaaattccgatagatgtggcgtttgccctgcttctgttgtggatatgcgggcataccttgaacctgatgtctgccatcggactgatagtgacgtgcggtatcatcatcaacgactccatcctaaagctggatgccattaatgaattacggagggctggtatgccgttgctcgaggccatccacgaggcggggcgcagaaggctccggcccatcatcatgacatcgctcaccaccattttcgccatggttccgctgctgttctcgttcgacatgggctcggagctgcagaagccgctttccatagcgatgattggggcgatgttcgtggggacactggtcagtctgttcatcatcccgttgatatattggtttatttatagaaaagaaagagcatgaagaaattaagtcttatacttttgttcagtctgggagccctttccgcttttgcccaacagcggataacgctcgatttgcagcagaccattgccctggcgaatgacagttcgctggaagccttccgcaccaagaacatgtatctggccggttattgggaataccgcacctataaggcaaaccgccttcccagcctgacgctgaacatgactccggcacagtacaaccgtgatatcaccaagcgttacgactccgaacaggaccttgacatctatcgcagccagcaatccttctatgcatacggcaatcttgccgtcagacagaatttcgacttgacgggcggtacgttctatctggatacggagctgggctatatgcggagcttcggtggaaacaagtatacccagttcaccagtgttccggttcgtttgggctactcgcagagtctggtcggttacaatcctttccgttgggaacgcaggattgagccgctgaagtacgaaaaggtgaagaaggagtatatttacaatgcagagcgagtatccgagcaggccactacctatttctttgcgcttgccatggcacaggcggaatatgacttggccaaggacaatgccgtctccaccgataccctctaccgcatcggcatgcagcgcttgaaaatagccgccatcagccgtgccgacctgctgacgctgaaactcgacgtggtgaatgcccgcaatactttgcagaatgccgccagtgccttgaagcgcgccatgttttcgttggcatctttcctgaatatggagaagaacacggatatcagggtgtcgcttccgggacgtccgagggcgctgaccataccggttgatgaggctttgctggccgctcaagccaacaatccggaatttctggggcttcgtcaggaagtgctggaagccgagcagacagtagacaagacgaagaaggaatcgcgcttcaacgccagcatcaacgccagcgtcggcttcaaccaggtggcagagaaattcggtgaagcatacaggcatcccatgcagcaggagatggtgtcggtcagtgtctccattccactggtggactggggcgtgaggaaaggcaaatacaacatggcgaggaacaatctgaacgtggtgaagacttctgcccggcagagtgaaatcagcattgaggaggaggttatcatgaccgtcagtgacttcaacgtccagcaagccctcgtcgccagtgccgaagaggccctcgaccttgccatcctggcgtataacgaaacccgccagcgcttcattatcggcaaggcagacatcaacagcctgaccctctcgctgaaccgccagcaggaagcgcaacgcaattacatctccgccttgcaggactactggctgaattattacaagatacggaaactgacgttgcacgactttgccagcggattttcgctgtcggaaaaatttgattataataactgatgaaacgagtttcttccttcaccgtcatagtggcgtttgtctgccttgctttggtaggggtggcgttgataccgctgctccccgtcaagctgaatccgtcacgcagcctgcccggcttcacggtgggtttcagcatgcctggcacttcgtcgcgggtggtggagatggaagtgaccagcaagctggaatccatgctggcgcgtatccgcggagtgaagcggctgaactccacctcgggcaacggctacggcaacattactgtggagctggacaagcatgccgatgtcgaggcagtccgcttcgaagcttccaccatcatccggcagacgtggccccaattgcccgaaggtgtcagctatcccaccattcacatgaaagtgcccgacgagaacgcctcacgccctttcatgtccttcacactgaatgccccttccactccgatattgattcagcagtatgccgaggagcatatcaagccgcggctggcaaatattccgggtatctataaggtggaactcagcggtgccacgcccatggagtggagactggaatatgacagtgaacagttgcgcttgctgggtgtgaccctatcggacatcagcgaggcagtacagcggcattaccggaaggaatttctgggtacgcacaatgtggatacaggtaacggtagccgggaatggatacgcctggcactggtgccggagagcaactcccttggttttaatcctgctgccatcaccgtgacggctaccgacgggaaactgctccgcttggacgaactggtgtcggctgtccgtatggaggaggagccgcaaagctattaccgcatcaatgggctgaattccgtctatctatccattactgcggaagaaactgccaaccagttgcaactgaaccgtgccgtgatggacgagatggaagctgttcggcaggtacttcctgttggatatgaagtgcataccagctatgatgcgaccgagtacatacgggaagaactggacaagatttacttccgtaccggcttgacggtactcatcctgcttgtattcgtatggctcattactcgtaagttgaaatatctttttctgatagttaccagcctggctgtaaatatagcggtggcacttatcttctactacctcttcggacttgagatgcagctttattcgctggcgggtatcactgtctcgctgaatctggtgatagacagtaccattgtcatgaccgaccacattctgcaccggcgtaatctcaaggccttcctgtcggtgttggcggcaaccctcactacgatgggtgcgcttgttatcattttcttccttgacgagaggatacggctcaacctgcaggactttgcagcggtagtgatcatcaatctggctgtttccttgatggtggcattgttctttgttccgtcgatgattgagaagataggactggtgaggcggattacggggaagaaaaggcgtcttgtcttgccggggctgacgcaaacattcaaaacaaggttgggacggattttcagacgtttccccgtttatttctcctgctgctactctgctctcatccgttttctgtgccgttggcgctgggctgtatgcctgctgttgctgttgggtttcggtctgcctgtttttctgttgcccgacaaactggaaggagggggaaaatgggaagctgcttacaataaggtattcggttcggatacctataaggagtcggtgaaacccgttgtggacaaggcgctgggcggcagcttgcggcttttcatacagaaggtgtacgaaggcagttacttcacccgtaatgaggaggtggtgctctatgccaacgccaaccttcccaatggcagcaccctcgagcagatgaacactttgatgaaacgtatggagacctacctcagccggttcaaggaaatcaggcagtttcatacttccatctacagcccccggcgtgccagtatgcagatttatttcaagaaggaagcccggaacagcggttttccctatacactgaaagccaatatgataagcaaggcactggaactgggaggcggcagctggggcatctacggattgcaggaccaggggttcagtaatgacgtccgcgagagtgccggctcctaccgcatcaggatgtacggctacaactacgacgaactctatgagtgggcggagaagctgaaggccaagctgctgacgcaccggcgtatcaaggaagtgctcatcaattcggagttctcctggtggaaggatgactatcaggaattctacttcaacctgaacaaggagcgcatggcgcaagagggcatcgacgcgcaagtgcttttctctgcggtgcgccccatcttcggcaagaatctggagattggctcggtagcggccgagcagggaacggagaaaatcaagctctcttcccgccagtctgccgaatatgacatctgggcgatgcagttctttccctatggagtaggaaacggcaagcattacaagctttccgaactgactactgtggaaaagggacagatgccgcaggagattgccaaagaaaaccagcagtaccgcctctgcctgcaatacgaatatatcggctccaatgagatgggcaacaagatacagaaacgtgacctggaggagttcaacaaactgttgccgatgggttatacagccgagtcggacagcaacagttggtcatggggcgagaaggacaaccgccaatacctgcttctgctggtggtgatagccatcatcttctttacgaccagcgttctgttcaactccctgaagcagccgcttgccatcatctttgtgattccggtttcttatatcggggtatttcttactttctattggttccggctgaacttcgaccagggcggttttgcctcgttcgtcctgctgtgcggcatcacggtgaatgccagcatctatatcctgaacgagtacaacagcatccgacgtcgtttcccccgtctttccgctcttcgtgcctacgtcaaggcgtggaatgcgaaggtcgttcctattttcctcacggtagtttctaccattctgggatttatccctttcatgataggtgaggacaaggaggctttctggtttccattggcggcgggtaccattggcggactggtgatgtccgtcatcggtatcttctttttcctgccggtttttgtgctgaaacagcgtgattttcttaggaaatgattacttttgctcgattttgttacctgaatggatacttgaattttaaatatggaaagtgcggagtactctttggatgagttattatgtcagtctcttctgttgtttcgtcagtatcggttttatgatgctccagaatgtggagaaaaggcattccggatattggaggaagcccatgtatggatggggcgtacgcaagagtgtgtggatatggcgaaatgggggtgcgtgatagagtgtcttgcgcagaaatactacatagaagatgatacggatgcgattctggaagaaattgatgctgccttggttgcgcattggaagaggatagagaaaatccatgcagaagtcaccaccgtttatttatggctggggtactatttcctgctacgtttcagaaaccgggaatcccgttcccattcccgttgtaaacagataatgtccagcttgttgtgtgctttggtcgaaatcttccgtaaggtggagaaggggggagccccgacagaagtcttgtcacatctttcggtagatgtttggggagagaccgtctgctggatggagcaggtacatgattcccgtctttgcgagaagcagtcgtcagctttgctggcacaactctataacctgaaaagtgtggagttggaaaaaggtccgggaaagcaggatgctttgctccagcagattctggagttttattgcttttaagggaaaattatctctgcttagttttatcatttctgcttccacacttccacccacttcctgcatccctttattcatcggcattacaagtgctgtggaagcaactcaaaaaggtggaagcaacttttgcttccacagcggaaatacgccgaaaagtaagttaatatcttgtttgttagtgtattaatagaatgtacagcattttgcaaatatcttgtttacacgatatgcgtttcgtgtaaacacggtattaacttcgtaacaacgggcatgaggcaccttgttgacggtcgttagtcgagtggttgacggccgttggcagagcgcatcacggccgataggcgctgataactccgtacagaaaatggaaaggaagcctatgtaaggggaaacaagctctgagctatttgttttgtttgccacatttatcttgtttttgtacattattgaagcggttttttgtatctttgaagggaggggctgtaaaaagcttgttctcatccaaagtttaattatatatacatgaattatgaagcgatgtatagtgctgttcataacattctgctgtacagttatttttaatgcacaggcaaatggcattgtgactgatggagaaaaaggattgccgttggctggtgtgaatatttatctccaaaaggattctgtgggcataggagttatacgtaatgataatctggtaaagaacatgttcatatgaaaaaactgctatatcttgggcttttgtccgtttgcgtactgttaggttcttgcgtagagaagaacgtatccaatgtttttgataaggtagaggggtatatggatgtatgtcctgacagtgcattgctgctgttggagcaaatccctcattcggaggagcttcgtgggaagcagcgggcggactatgcactgctgctgacgcaagcgcgtgataagaactatttagacagcttgcagtcggactcgttgataaaaattgcggtagattattataagaatggggaggataaggtgaaagcggggaaggcattgttttattatggtaaggtgatgcatttgcaagataatgatacattggctatacaagcttatttgagcgctttggctaaattggagaagacggaagaatataagttgcagggatttgtacatgaatatatcggtgttttgaatacggacagaaagctatataaagatgctctcgacaattatcaaagttcagcgtattgttttcaaaaggctgttgatactttaggagttatatatgtttatcgggatattgctcgtatttattatgtagaacagaaatatgacagtgtttataattacattaatcgtgctttgtccttgtgtgagaaaaagaaaggatgtatcagttttgaacgggtaatcccttctttattacaagtaaaagggattgccaaaagaaatgaaggggatttgggagatgcaatagccctgttgaaaactgcggtagagactgaacaagataggcattctatgcatcactgttcaatgtcattggggaatatttatttaaatcaaaataagttggatgaggcaaaaagatattttactttagctttgaaatcagaaaggcctcgtactctggcaggggcataccactatttgtatctgttggaaaagaggcagaaaaagtatgcaatagctctctatttcaaagagaagtctgattcgttgttgtctgttgacctggatgctaaacaagcatctcaaattttgactttgcaacgtaaatatgaaaaaggaaagcttcttttagaaaagcaacaagttgaacacgaaaagaaaatacagttttattttgggatggtaatagttctatttattatcctattatgtcttgttttgtattttcttttaagaaaaaaatacaaagagatgttccggaaaaatatgcaagtaataaaggagaatgagtgcatgattaaacgatatgtttatgaacttgatatgttgaaacaaaaagcaggtgaaacagcggaaacaaatagagagaaagttggtaaattgaatcaaaagattttgctgttggagagtgagaataaaaaaatacgtgaaaatgtatgtgtaaatggtgtttatctcttggagcaattgaagaaggaaaagttgattgtgaagaatatgaccaaacaagaaaaagaacagctccttgaatacatggatttgatatatggtaatttgatttctcggttaaagaaagattttaaattaacgagtggtaacctgatattgatagctttgcttaaagttggtttcactaccactgagttgatgtttacttttgactgcgagatgaattctatttttacgaaaaaacggagattgagggagaacttaaatttggatactaatgataaattggaagaatttataactctttattagaagaacttcttgctttttgtccactaacttagtagctttttatttagtattttcttgatatatagtatgttatttccttttgtgttgtccacttgtactttccctaagaagtgattaagatggctatctttgttacattcaaaactaaagatactatgaaatcattttttattttgttaagtttatactgcttctttgtggtaaatgtagtgaatggaaagtcagtaacttttccttcgagagtagaaatcatcatggatgaggattttgatttaccggatggtccggggaatggtcaccgttctattcctccagtgactcctattttagcatttttgaatgatgaccactccattgacttggagttctatcaatctataggtgggattgaaattgtaatttctcagaatggggatgttgtttactcttctactgagaatattgactctccaatattgagaaaagtacaattacagaagtaagcattcggtaaaccacgtattttcgtctccaacttccatcattaactttacgtccaaaaagccaagttatgatgacacgagaagaagtggtagagataatgaactactgcaaagagcacaaaatgacttataagtcaagactggaggaactcaatatccctgtatggcggttttatgacagcaaatcccgttatgccgccgagcaatcatctggtaaaacggctcaaggtgagtttatcgagcttccgcacagcggatcttttgttccggttccttcatttgccggaacgagcggacgtaaacagaaaagtataccggccacgccaagcggattgaaagagatagaaatacgtaccccggccggtagtgccatacgtatctgcggtgaactgaacgacaaggaactgtattcaatcatccaggcctgcagccatgttcagccttaatgacagtatgcgctatctgttgtataaccgccctactgatatgcgcaaaagctttcatactctcagcggtatcatcaccgacgccatgggtcaggacccctgcagcggcaatgtgtatattttcataaaccgtgcccgtgaccgcataaagctcctgcattgggagccgggcggcatggtgctgtattccaaacttctggaagccggtaccttaggcaagcctgattctgtcaacgacaatgaggtctgtgcaaatatagaatggcgggaacttgtcatgatagtggagggtatcatggaagcccgcgactcccgtcgcacgagacttgaaaacctgcagaaacttcgaaaatagtgccgttttcttactctgtttgcttttgtatgtcattggattttagtatatttacattgtgaaacaatgagatacagatgcttacggaagaacaggaaaaagccttattggaagagattgataagctccgccaggataaagcggcgcttatcagcagggttgcttcgctggagcagtcgctgtactggctccggaaaaaagtcttcggacggatgagcgaaaaaaatcttccgcttgatcccaaccagttgtttctgttctcaaaagaagaaatgtcctccatggaaatatcccggatggaggatgaagtccgcaagagtgaagaagaaatcaccagaaccataaaagtcaaggagaagccgtcccgcaagcccttggatacatcttctcttccggtagaagttgttgatctttaccccgaaggaacaactgacggggaaggcaggcttaaggatgatttcattgaaatcggaaaggaagagagttcacgcctggagcgtgttccggcaaaagtatatatcctgaagaccgtccgtcacaaagtgataagaaaatccgatatggagaaatatcccgaggaaaggcagattctgattcacccgctacctcttgttccggtcagcaaatgtatggcaggcgcctcggtcctgacggacattatcatcggcaagttcatgtatcatctcccgttctaccgtctgatacagcagtatcgcgaatcaggaatcatcataagcgaatctaccatgtgcggatggtatgaaatggcggtggagaaactcaggcttctgtacaacctgctcaaacagaagatactctccagtgagtatatacaagtggacgagagtgtcattcctgtgatggacaatgagaaacataaggcgaaaaaggggtatgagtggtgcgtacgcgacggcatcacgggggatgtcatgttccattatgaccgtggcagccgttcgggcatggtagcccgtgaactgctgggatgctgccgtggcattgtgcaatgtgacggctatgcagcttacgaacagtttgagcagatgaaaggaattactctggccggctgctgggcacatgtcagaagaaaatacgtggatgctctggaagagaacaggaccctggctacacaggcgattcactacatcggcaagttgtacaagatagagtctgatgccaatgatgcagggctcactactgaagagcgtaaggaaaaacgtatccatgagtcctatccgctgatacttgaatttgaaaagtggctgcaggatgcttatcttagagtacttcctaaaagccgtatgggtaaagccatcgaatatacttacacgctccttccaagactttccagatacgtaaacgacggaagaatcgaaattgatgacaaccgcatagaaaatgccataagacctttggctttgggaagaaagaactatctgttctgcggcaacgacgcatccgcatacagggctgccatcgtgtactcactgattgccacctgcaaatcagcagaagtagaccctagaatctggatggaagatgtcctgagcaaaattccatattatgagagggatgagaagaatatggaagaacttctaccacgtaattgggcaaaatccaatcaaacttgttccgaatagatactattagttccgaatcgactacgaatagcaccgattcggaactaattcacaaaatttgcaacgtggtttaccgaatgcttacttacagaaaggcttagctggtgattttttacttgagataaaaggtttggatggagcttatgcattcggtagatttactattcattaataatggctatatagcactatgaaacaaatctcattttgcatcacttgtatgaatcggcttaaacatttacaagaaactttggagaagaatattcttgataatttcttagtagatgaggtagagtttgttgtgctggattataattcgcaagatggattagaagaatggattgctcgatctatgatgaaatatattgagatgggtattcttgtgtattataggactactgagccggttcattatttgcggagtcatagccggaatatggtatttagattggcggaagggaaaattgtgtgcaatttggatgctgataactatttggggaaaggctttgcagagtttatgctgaaggagtttcaagagaagaagaaaatattttatactagtaacctttgtgtacgtgatgtgtttggaagaatttgtctggaaaaagaagcatttatggcagtcaaaggatataatgaacttctggttggatatggtgtagaggatgctgacttatttaagcgcttgtcttgtattggacttaggagacatgtttttattcaagaaaatttttatggagctttgacacacgaagataatgaacgagttgttgaggaaccactattgaaaaagttgtatgctctttatttggattatatagatccttattctacgcgtatattaatgctgtataaagggaacttttggggaatgggagtgttacaaaataatgttgcaatgaattgtaatcgaaatgatattgagcgtgacagaatagaacaatgcatgagcgataaatatcgttttgttgtgaaagaagagtggaaagagggtgaatggtgtaatgtggatggcggaattttattaaatggaaagtatttatttgtagataatcagaaagggctatgctatcgtgataggtatttttataaggtgactgatgttgatcttatagttactgttgtattattaataacggaagctttaaattactctaaagtaaaaaggactttggataataatgaatgcgttaattctcaggggtttggatgtggaaccgtatttaggaattttgattatgctaatcgaataattttgaaataacatggatttgcattatgttttgcgagaaaataaggcgtggagttgtgtctctattttctattctagaaaagattggactactttattgttggagatagtttcgttttatcagtataatgaaaaaatgtttaactgttttcaagtgaatttttcagaaaaacgtggagagcatattaggataacattctcatcagatgtcgaaaatatgaagatgatacaaacgagaatgaatgtcaaatttctttcttttttggaaaatagaccttcttgtttcccaaaagaatttcctttcggaaaggaaatttggggttattatcctaataatactttggtttggaatcaatatgaaataaggtatccaattactgacttgatgcaagatgagcagattaaagcatgtcttttatctttttttagttctgagtatgaaaaggaaaaatgtttgatggaaaaaagagcatttgaattgttggtgcatatacaacaaaatgtggctgatgctccgagtgggatggggcttgctaaatgggggtgcttggtagagtgtttagtgaagaattctttaattgaagcagatttggatgatttattagcagaaacagatgaattcttgatttctttatgggaagaaactaatcatcctttttccatgtatgaaattcttttatgggtagcagactattttttataccgactttggaataaatgttcaaagtgccatgatcggtctttacatatggtagagcagatagtgctttgttttgaacaacttttttatggaagggaaaattttgaaagaactaatccaatatttctattttctatagatttttggtatgatttaaaatggtggctaatgcatattaataatgtgtttgtggctggaaaagcaaaaaaagtattagaaaaaatttcgtctattcctgagttggaaatattgcaatgttatgattttcctaataatgaaatacgttggttattacgtaactattatttggataaatactgttgtaaattttgctaaatggggatattggttgactttcgattttatagcaagtgaaactatttatattgaatatactatatgaatgctgattatttattgtttaactaaaaaaacatgtattatgaaagttttaaaaaaaatcaaattgaatcaattgagtaaagttgagttagaaaaacgtgaaatggatgccttaaaaggtggcaatgattgcggtgattgcacatgctcatgctatggcggttggtctgcttatagtgcaactcctattgcttcacatattaatacggcgacggcttatgtgccattagctgggcgataacgttttttgtggttgatttgttttaataccaatgtaatgataaagaatctctttctttaagaataagagattctttatcttataaaaggctcaaaatagcaagagtatagaaacgttaatacttgatagtgattatgcgacaatctattatatatgcatcagaaaataagaactgctatctttataatgataagcatagattttcaatgattatacatcctgctttgaagcaaatttgtgaaacagaaaaatgtaattatgtggattcttactatgtgaagaagtatatgtatttgaaaaaacacgattttttttcagatatggattacatagatattagtacagaaataagtgaagctaaagttgaagaagctcttggccatactccacaaattttattcgaagtcacagaatcttgtaatttgaattgtgtttattgtgcattaggaagtgtgtatgaatgggggaaaaataggaatggtaaaaagttggatgttaattctgcacttagtttgttgagatatatttggaaacttaaattgtctaataaggataccgagttggttattagtttttatggtggggaacctttattaaatataaaattcataaagactattgttgactttgtttgtaatctaaatcatgcaggagtcgtgaatgtaagctatagtatgacgacaaatgcagtcttgttagacaaatatatagattatttagctgcaaatagattccatatattagtaagcttagatggtaatgaagaaaataatagctatcgcatttatcagaaaaatggtcgtaattctttttggaaaatagttgaaaatttggactttataaaagaaaaattccctaattttttcgaaacaaatattgatttcaatgcagttttacataatagaaattcagtaaaaagtatttatgaatttttttatgggcgttatcataaaattccgcaggtttcagaaatgaatagaggagggattgtagaggcaaaaaatgatttatttcaaaagatgtttcgtgatatacgtaagcattcggtaaaccacgtattttcgtctccaacttccatcattaactttacgtccaaaaagccaagttatgatgacacgagaagaagtggtagagataatgaactactgcaaagagcacaaaatgacttataagtcaagactggaggaactcaatatccctgtatggcggttttatgacagcaaatcccgttatgccgccgagcaatcatctggtaaaacggctcaaggtgagtttatcgagcttccgcacagcggatcttttgttccggttccttcatttgccggaacgagcggacgtaaacagaaaagtataccggccacgccaagcggattgaaagagatagaaatacgtaccccggccggtagtgccatacgtatctgcggtgaactgaacgacaaggaactgtattcaatcatccaggcctgcagccatgttcagccttaatgacagtatgcgctatctgttgtataaccgccctactgatatgcgcaaaagctttcatactctcagcggtatcatcaccgacgccatgggtcaggacccctgcagcggcaatgtgtatattttcataaaccgtgcccgtgaccgcataaagctcctgcattgggagccgggcggcatggtgctgtattccaaacttctggaagccggtaccttaggcaagcctgattctgtcaacgacaatgaggtctgtgcaaatatagaatggcgggaacttgtcatgatagtggagggtatcatggaagcccgcgactcccgtcgcacgagacttgaaaacctgcagaaacttcgaaaatagtgccgttttcttactctgtttgcttttgtatgtcattggattttagtatatttacattgtgaaacaatgagatacagatgcttacggaagaacaggaaaaagccttattggaagagattgataagctccgccaggataaagcggcgcttatcagcagggttgcttcgctggagcagtcgctgtactggctccggaaaaaagtcttcggacggatgagcgaaaaaaatcttccgcttgatcccaaccagttgtttctgttctcaaaagaagaaatgtcctccatggaaatatcccggatggaggatgaagtccgcaagagtgaagaagaaatcaccagaaccataaaagtcaaggagaagccgtcccgcaagcccttggatacatcttctcttccggtagaagttgttgatctttaccccgaaggaacaactgacggggaaggcaggcttaaggatgatttcattgaaatcggaaaggaagagagttcacgcctggagcgtgttccggcaaaagtatatatcctgaagaccgtccgtcacaaagtgataagaaaatccgatatggagaaatatcccgaggaaaggcagattctgattcacccgctacctcttgttccggtcagcaaatgtatggcaggcgcctcggtcctgacggacattatcatcggcaagttcatgtatcatctcccgttctaccgtctgatacagcagtatcgcgaatcaggaatcatcataagcgaatctaccatgtgcggatggtatgaaatggcggtggagaaactcaggcttctgtacaacctgctcaaacagaagatactctccagtgagtatatacaagtggacgagagtgtcattcctgtgatggacaatgagaaacataaggcgaaaaaggggtatgagtggtgcgtacgcgacggcatcacgggggatgtcatgttccattatgaccgtggcagccgttcgggcatggtagcccgtgaactgctgggatgctgccgtggcattgtgcaatgtgacggctatgcagcttacgaacagtttgagcagatgaaaggaattactctggccggctgctgggcacatgtcagaagaaaatacgtggatgctctggaagagaacaggaccctggctacacaggcgattcactacatcggcaagttgtacaagatagagtctgatgccaatgatgcagggctcactactgaagagcgtaaggaaaaacgtatccatgagtcctatccgctgatacttgaatttgaaaagtggctgcaggatgcttatcttagagtacttcctaaaagccgtatgggtaaagccatcgaatatacttacacgctccttccaagactttccagatacgtaaacgacggaagaatcgaaattgatgacaaccgcatagaaaatgccataagacctttggctttgggaagaaagaactatctgttctgcggcaacgacgcatccgcatacagggctgccatcgtgtactcactgattgccacctgcaaatcagcagaagtagaccctagaatctggatggaagatgtcctgagcaaaattccatattatgagagggatgagaagaatatggaagaacttctaccacgtaattgggcaaaatccaatcaaacttgttccgaatagatactattagttccgaatcgactacgaatagcaccgattcggaactaattcacaaaatttgcaacgtggtttaccgaatgcttactgatatacgagatagtgagaaagaatattataaagaaaaggataatttgttgcttcatgaagatttgttaccttttcatgaattgtctaatttcttaaaatatttttctataaattcgtatgtctctgatatattatctactttgtgcgtagaaaataaatattttccagcaagtacgtgttttcctttttctaaaaaaatatttctgactactcacggtcaactaatgccatgcgaaagaatagactataaatattctttgggagaagttaatgagggcgtattcttgaatatatcccaaatagtacagcaatataatgcttattataaatgtttggaaaaatattgtcggcactgctatctttatagattctgtggattatgtatgttccatttagaaaatttgaaaaaagaaggaactgaaaaaatggtatgtcattattttcataatcaaaaagattttcagcttaaattgtctcgaatattttcttttttagagaaacatccgaatgatttttttaaaatattagaagatataataattgtatcataataatggaaacttctataacaggttggtggtttacaatagagccatatgtgtatattggattaacaagcgaatgtgtgctattgtataatactcttgacggggagtatattgaatctaataaagtggagattatacaattgcttaaaaagttacttgaaagaaataatcaaggtgttgtttatttaacaaatgaagatatccaaaataggattgttgaaagttttgttgatgaggtacgtgaaaaatatatgggggatataatagatattgcattatcaaatgaaaaacctgttcaaatattaccccttttcaattttttggataatgaaaaactggaagtttataaaaggcacaatttttctgttagtagaaatctattggagaatttgtttgaaataactattcatgttaataatgaaactgacatatgtgcttttttgaattttttgaagtctgttccctcaaaaataatttttaatatttatggaaaactaaatgatgttgtgaataatgaaaggttattgtctttcttggataatagttcttctcttaaaaaagtctattgtttatatacggagattccttgttcgcaaacattttttatgaataattttttgtattgtgttttagtcaatttccctattgacataagattgtgggaggatgttttgataacgttaagggaacaaaatttgtcatataagtatatatttaatgttgcttctttgaatgattgtcaggatgctgagcaacttatagaacggttccggataaaagaatatcaaataaagcctatatatgatggtactaatatggctttctttaaagaatatgtttttctttctaaaaaggatattctatctatgccaatatcaataaaaaatatctttgctaaccaagcgattaatacttatgattttggtaagataaatataatgtcgaatggtgatgtgtttgcaaacatgaatttcttgccaatagggaatatatataaagatagtgtatatgatatagtttgtaaggaacttaatgaaggagagtcatggtttcgagttcgtgataaagagccttgtaatagatgtgtttttcaatggctatgtccttctccatctgattatgaaatagctataggtcttacgaatctttgtcatgttatgtaaaagaagccggtagaaagtggaaacatatttattttatactaatatgaaaagaagagttgaagcattgactattgtcttggcaatatgtcttataactatttttgttagatgtcagtcgaatgaaactcctattcagcaacttgtggttgccttgaatggggattctattgagatggtttttgtgaaaggaggtacatttatgatgggatgtacagatgagcagggatgtgactgtgaggataacgagaaaccagcacgtaaggagtcggtatctgatttttatataggaaaatatgaagttactcaaaggctgtggagggcggttatggatactgattccattttgccgtttaatgggggatgcgaagattgcccgatggaaaatgtaagctggaaaaatgcgcagaagtttatcggtagattaaatgctatgaccggtaaaacattccgccttccgactgagatcgagtgggaatatgcggcacgtggtgggcgtagaagcaagcactataaatatagtggcagtaataaggtagacgaggtcgcttggtatatagggaattcctctggtggacaatatggagaagctggagtcccccgtccggtaggcttgaagaaaagcaatgaattgggactgtatgatatgagtggcaatgtttgggaatggtgcggagatttatacactaaagaatacaagcaaggtggtaagtctgtccatccgggatggccttttgagggcacctatcttttctttcgccggatattgcgaggtggaagttggggaggaacggcagaggggtgtcgggtgtcgtatattgattacgacattgagaattatagtgacgagtatggaggcttccgccttgtgatggagttgaattttagtaaataatgtaattaaaaatgcgtaagttatgaaaagaataaatgtagttgtagtattgttcttaatgctgggatggagtggatgtagagaaaatagcgggactgtagatatagtaacagtagatatttcccaaaattatccgaaaaaggaactggtgcttcaggattttatggatgtggaatacattccgttggaaacgaatgatgaattcattacgcagggtgatgtgatggctattgacaataaatatattgtagtgaaaaactggaataatgatggtgacatcttcctttttgacagaaaaactggtaagggagtgaggaagtggaatcgtcgggggcagggcgctgaggagtatacttttattaatggcatagtattagatgaaggtaagaatgagttgtatgtcaacagtactccttcaaaaaagatacttgtttacgatttgtttggcaatttcaaacgtagtttaaactatgtacaaggtgctgaatttatggatgtgttcaattatgatgagaatagtttgatttgctatgatatgtctgtatattacaatgagggaaagttgaaagaaaagccgttttatcatatgataatatcaaagaaagacggaagcgtggtgaaagggattccagttccatttgatattgtcaaagcaccttttgtacaaaaaggggacggtattgcagtagcttctgtacgtccgataataccgtataaaggtgattggttgcttgtggaaacatctactgatacggtgtacaactatgtatcgaaggaaaataaattatgtccgtttttggtgaaaactccttccgagaatcctgaaattcttcttaccataggggcggttacagaacgttattattttatgcaaacgatacaaaaggtattcgattttgacaaaagaagtggattccctactatcggtgtggtgtatgacaagcaagaaaatgcagtattcgatgctattgtgcgtaatggtgactttgctaaactgcaaggtgtagatttggtatcccatccgatgaataatgatgaaatagctgctttccagaccttggcagccaatcaattggtggaaacttatgaaaataatgagctgaaagggagagctaaagaaattgctgcaggattgaatgaggagtcaaatcccgttgtcttattatataaatataagagtgttgactgaattttcataattggtaagagcggttcattaaagatatgaagcagatattcccatattatcgtcagcttgatgctatggattgtggacctacttgcctacgtatgatagccaaatattacggaaagagttattctttgcagactttgcgtgcccgttcttttatttctcgcaatggcgtttccatgttaggcatcagcgatgctgctgagtctattggtttcagaacgtccggagttcgtgtctcttttgaacaattggcggaagatgttcctctgccttgcattttgcattggaatcagagtcattttgtggtttgctatgatgttaagaaaaagaaagggcaatacacgtttaggatagcagaccctgcaactcagttggttacgtataatgaactggaattgaagcgatgctggttagctaccaaatcggacggagaagagaaggggactgcgcttgcactggaacccactcctgacttttataatggtgagggagaaccggaactgaaagaaagagggttgcgttttttcttccgttatctgactccctataggaaagagttgtttcagctgatattgggcatgttggtggtgagcttacttcagcttatcctaccttttcttacgcaagccttggtggatgtgggtatcagtgacggaaatttgagctttattaccttagtgctggttgcgcagattataatctcggtatcacaactatcggtagagtttatccgtagctggatattgttgcatgtgaatacgcgtatatccatctcccttatttcggactttttggcaaagttgatgaagttgccgcttcatttttttgatacgaagatggtgggagacattatacagcgcattggtgaccatgaccgtataaagaattttctgacaggttcttctattagtacgctcttttcctttgtcagttttttcatctttgctattgtacttgcttactacaatttggtggtattgggaatctttcttttaggtaacagcttgtatattgcctggatacttgcttttatgaaatatcgccgtgaattggatatccgtcggtttgcacaagcagccggagagcagagtaaccttgtgcagatggtgaccgctatgcaggaaataaagttgaataactgcgagacacagaagcgctggcagtgggagcgtattcaggtgaaactatttaaaatcagcgtaaaagggttgacgctagggcaggtacagcaagtaggttctgtgtttttcaatcagaccacgaatattataatctcgtttattgcggcaaaggcggtggtggaaggggagatgacactgggtatgatgatgtctctgacttatatcatcggccagctcagtgcgccggtctcttcttttataggatttgcgcagcagtttcaggacgccaagataagtctggaacggctgaatgaggtacatgggaaaccggatgaggagcaggatattgcttccaaattgtccgttttgcctgagagacgggatataaagatggaaaatgtgtgcttcagttacgatggagcggatagagactatgtgctggataatgtctctttagtgattcctgaacataaagtgacagctattgtaggtgcgagcgggagtggaaagactactctggtgaaactgatgcttggtttctattcgcccaataagggggctgtgaaggtgggtgatgcttcgttagagaacataaatccccacttgtggcgtgccaagacgggagccgtgatgcaggacggctttatcttttcggaaaccattgcgcagaatattgctgtgggagaggagcagattgatgtggagcggctgcgccatgccgtggcggtggccaatatccgtgatttcatagactcgcttccattggggtataacaccaaaatcggtatggagggaaacggtatcagtcaggggcagaaacaacgtttgctgatagcgcgtgccgtgtataaaaatccggaatttcttttcttcgacgaagccaccaatgccttggatgcgaataatgaaaaggagattatggaacatctgcatgaattctataaagggaaaaccgtagtggtagtggcgcataggctcagtacggtgaaggatgccgacaagattgtggtgctggataggggatgcattgcggaagaaggtacccatcgggaactgacggagcggaaaggaatgtattatcggctggttaagaatcagctggaattgggtagctaatgaatggaggaagagaagatatataaggatatagaacttcgcagtgaagaagtgcaggaggtgatgaaccacatttctccttgggtggtgaggtgtgggattactgtcttggcagtgattctgttgatggtactggttggttgttggatatttaggtatccggacaccttggcggcagaggtgactctggccacggaggaacctcccgcctttgtgctgtcacatgctactgggaaactcgatacgctttatgtgaagaacgggagttcggtggaggcagatacggatttgggtgtgattggtaatgcggcatgttctgaagatgtacgtctccttaagaaatggatgaaggcatgggaaacgcaggattatgattggcagaaaggagtggagctttttatcggcaggcgctggcagttgggggaactgcaatcggcttttgcagctttcattacttcacttacagaatatgcacgttttatggagttggactattacgctcggaaacttcgttttcaggaaaaacaactgggtggacaacgctcctatcttcggttggcagagcgggagtatgagttgattgataaggatataaagcttgccgaaagtatgtatactcgtgattctattctatatgtgcgtaaggctatgattgctgcggaatttgaggagtctggaagcagatatttgcaaagtttgcgttctaaagaagaggtacgtatgagtttgcttcaggcagaaatgcagttggtgcaacatgaggaaaatatgttggatatacgtaagcaagcatacgatgaggaacagagtcgccggactgatttaaagaatgccatagagcagttagccgcgcaattgagtgcatgggagcactcttatttattgaaaagtccggtcagggggaaggttacttttatgacggtttggagtcgtaaccagaatgtgaaagccggtgaaacggttttcacgattcagccatccgacagttcaagggtgttaggtaaggctctacttcctttgcagggttcgggtaaggtacatgtgggacagcgggtgcatatacgtctgaataattatcccgaccaggagtttggctatgtaaaagggcaggtcgcaagtatctctcctgctccaacggaagagggaatgtatatagtggaaataactttgcctgacggcatgcagaccaactacggcaaacagctacctgtttcgcgtgagttgaaaggtacggcagacattatccttgctgacaagaatgtactggaaaggttgttggctccgttgaggaaagtggtggaatatgaaaaatgaagtacttattccgtcgtcttcccccttgcatccaaataccctcttttaaacatatccacgaacagaaagaatagtgataagagcagtggcccgaagatgacacccatgaatccgaaaagggacaagccgattacaactccgaagacagtgataagcggatgaatgtctgccattttcttctggatgatgaagcgtatcaggttgtcgagctgtgaaatgactgcaccgccatagatggccagcccgatagcttgaacccagttgcctatcaatgccatgtagacagctatcggaaaccataccagcgctgttcctaccattgggatgatgctggcgaagcaggtcaggaaaccggcgaacaagatgttgggagcaccgaagatccagtagcctatcatggctactcctccttgtatgacggcgagtaaggggatgccgatggcattggagcggacaatcatgttgatttcgtggatgacgttttgtgtattgtcatcgttgaacggcagtaggtcgttgacgtactgttccatctttttgccccctatcagcatgaagtagagtacaaagaccagtacgaagatgttgacggcaaaactgctgatacctcccatgatggcttgcccgatgcggggaagaattgaaatgacgtatgccaccgtgtctttccccaagatatagtagccggttttggctttaatgatgttggccgcttcttcgaaaggagctataatggcttgcgggtccagattgatgttttgaagattgaccacagccagccataccaccagcccaagtggaaccagaaagcagagaattgcctctgccgtaatgagggtggcagctatgctgcgcttcattttccgcttgtcggaaagatacatcatctgctttctcaccaggatatagatagtcaaggctcccagcagaccgcccatgaatggggctatttgtctgaaaagaatgattcccagcccgataatgatggctatcagcgaatatttccaatattgctcttttgtgctcatgagattcaatgttttaattaaaaacattgaagtggcagaaaaggtttgttggtaagatgcttaaaagtcagattttatccttcgtccagccagcctgacccctggcgtatgatttccggctccccattggtgcaatccactacggtagagccttccgtaccgccgataccgccgtctattaccaaatcgacaatatcaccgaatttctcgtcaatcagttccgggtctgtgcagtattcaatgtcctcattgtcatcatgcggcaatgtagttgtcatgatgggagcatccagcaggcgggctatttcctgaatgatggaattgtccggcatacggatgccgacctccttacggttacggaatatcttgggcaggcgggtggtgccgttcagaatgaaggtgaaagctccgggcagattacgcttcatcaacttgaaggtgctgttgtccactttggcatattcgctgaccttgctcaagtcgtagcagataatggaaagattgttcttcttggggtcgatatttttaagacggcagatgcgctcgatggcgcgctccttcagtccgtggcagccgatggcatacatggtgtcggtagggtagataaggatacctccgtcattcagtaggtcgatcacctgctgcaggtcggcgggattgttatttttttcataaagtttcagaagcatggcggaaatggatttgagttttatattacatgcaaaaatagataataatcggcttataaacaagcgattcaccttttaagcatctctttctccagtttctttatcttcttccaggcctctttgaatttgggacagagggtgacggctttctcatagtttttcatggccgcctccttcatgtcatgcttcaggcattcgtcacccataaggatgtattcgcgggcatacttcacgagggctttctctttctccaatgctgcttgtttcagtgcacggttttcctctttcagacggttgatgatgttcagcttccggcggatgaggcgctgcacgttgggcttctcgatgtcgtagcgggaatggatggctttgaaaaactcatccaggaaagtgccgaaatcccctttgtcgaaggctttggcggcggcaacgtattgaacgtctgcctgtgcttgcttcaaggcacggtcgatggcggtgcggttgttgaagcgttcggagaagctgacaatctccggacgcacgaatacatcggcacggctgatgggctttttcagctggatgccttccagcgaggtgcagcggctgagggctacgtatgcctgcccaccggcaaacacgccgccggtaaagtcgatgactacccggctgaaggtcagcccttggctcttgtggacggtgatggcccatgccaggcgcacgggatattgtgtaaaggtacccagctcttcctcttcaatctgtttcttttcttcgttgtatttgtagcggatgtttcgccacgactctcgtttgacgtcacattccttgccgtcgtcggtgatgacgtagagggtctcttcaatagggtcgaagccgctgatgacgccgatggtgccgttcacccagcggcggtcgaagtcattcttgatgaagatgatttgtgcgcccggtttcagcaccagctcttgtgaggtggggaggctgctttcgggaaagtctcccatgatttcgccgtagaaggtgaccgggtcaccgggaagttccgccagtttcttgtcgttgatgtagtccacattgtcacggcgggtggcgagggtgatgtacatgtcggcttccgattgctctatttgggtgccatagcgggtgttgagcagctgaagttcggtagagccgacggtattgttgcggatgtggtccagcacatggatgaacttgctgtccgtttgccggtatactttctgcagttcgatggagacaaggtctatctggccgaataccctggcagagaagaaataaggggtagggtagaatcggttcagtatctcccgttcatctcccttgacgacgggttccagctggaacacatcgcccaccaatagtatctgtttgccgccgaagggttcgcgcaggttgcgggaatagacgcgcaggatgcggtctacggcgtcgatgatgtcggcgcgtaccatggaaatctcgtcgatgatgaccagttccagttcttccagcagtttgcggtggggtttggtgtatttgaaaaattcgtggatgcgtccccgttgcagactgaagttcgggtcgtcgggcagcagggggtagaagggcagtttgaagaagctgtgcagggtactgcctccggcattgatggcggctatgccggtaggggcaagcactacatgctttttcttcgtattcgcgcagatatatttcaggaaggtcgatttgcccgtacctgccttgcccgtcaggaatacggactgacgggtatactggatgaggttcaaggcgtcttgaaactctttgttttgtgtatcgggaacgaagctcaaaagatttcagatttatgatggattcccgactatgccgaaatatttcagggcgttggcgatgccgtcttcatcaacagaagtggttgtgtagttactggcagcttttacgtcgtcattggcattgcccatggctacaccgataccggcatggcgcaacatgctgatgtcatttcctccgtcgccgaaggccatggtctcttccagcttgatgccgaagtggcggataatctggtcgataccgttctgcttggtgtttcctttggctgtcacgtcaacgaaggcaggatgccagcggcccatctcgcagtgggggacggcgggcaggatgattgcttcttcctcggcgttgataaaaggagtcagctggaagaaggctttgtcggcatggctgtcggtatagggctttgcttcgatggggtccactttgagttggcggtggaagatttcctccactacttcgccgggctggttcacgcagatgtcgtgctctcccaccaggatgcaggggatgttgcgttcgtggcagaaagctgtcaaggcatccacttccgctgtcggtatggggcttttgtagataacggtgtcttctacaaagcaataggcgccgttcatcgtgatgtagccgtctatcagattccgttcctgcaaggctgacaagttgttgatgatgacgcgcggacgtccggtagaaatgaagatatgtatgcctttggccttggcggcagtcaacgcttcaatagtggaaacgggaatttcgtgggtcttgaagctgaccaaggttccgtcgatgtcaaaaaacagagcttttatcataaggggttcttttatcttgtgcgcgaaattacttaaaaaagcgaagatatttcgtacttttgcgcacaaataaatgataaataacaaatgaagaaacattctttgaaagattggatgatagcggtgcgtccgtggtcattccccgcctcttcgatgccggtggtggtgacgttggcatatctgtattggatgcagcaggacataaactgggtgaacggcatctgggcattgctgaacatcgtcgtgtttcacgctgccgggaatacctggagtgattattttgactacaaacataaggtcgatgcaaaggacacctttggcgccaagaccttgaccgacgggatgtttgctccgcgcgagatatatagcttgtcgatggcattgctggcagttgcccttgttgcgggtgtcggcctgctgtggcgtacggggttgccgttgctgtacatcggtataggcggtgcagcttgctcgttgctttatccaccgctcaagtatcgtgcgttgggcgatgtcgtcatctttttggcgtatgccttgctgccgacgttgggcacctgctatgtggctacgggagtagttgactggaatgtcttgtggatagctctgccggtgggactgattacggtggccattctgcatgccaataatacacgggatatgcgtaccgatgcccgtgcagagattcagacactggccatgaagctgggaggaaaggcgtcgatgtacgtttattgtgccgaagtcctttttccttttggctggatagccggcttgatagctgcgggaactcttcctttatggaccctgctggtgatgccggcactggttcctgccataggcaatgtacgggtggtgtcccgttttcccggaaagggagaaagtgccatagccggtctggatgagatgactgcaaaactccagttgttgttcagtctgctgttcacgttgtcgttcgttgtagccggtctgctgtcatgaagaagctgatttttaccattctgctggctgccgtgctgtggacggtcatgttttcgccttggacggctcctttcgtgaatttctggtggatgatgaccggttctgcgctcacactgtccgtgtttgccaccttgttcaatcccggctggtggcgggaggtgaagtggagcttgccgaatgtcttgctgggacttggcattgctgttgctttgtggggcgttttctggttgggagacaaggtgtcatcttggatgttcgattttgcccgtccgcaggtggactccatttatgggatgaaagagggagagtctccttggctgctggcagcattgctgctgttgctgatagggccggcggaagagattttctggcgcggctatgtgcaacgcacgctttccaaacgctggaatccgaatgcgggttttgtggtggctactttgatttatgcactggtgcatgccggttcctgcaacttcatgctggtcatggcggctctggtggtgggggcggcatggggggcgctttaccgtttctttccgaaccgctttgccgctattatcttgtctcatgcagtgtgggatgtggcggtatttatatttttcccgatatgattattgtttacaaaaataaggcagcggtaatggatcgtataaaaacaaaacaaattgatgcgttgaattataaaaaagcaagcatatgacttacaattttgatgaagtaatagagcgccgtggtaccgactccgtgaaatgggacggtgtgaagagtgtatggggacgcgatgacctcctccccatgtgggtggcggatatggatttccgcacgcccccgtttgtgatggaagccttgcggaagcgtcttgaacatgaagtgctgggctatacgtctgcgtgtgaggaatggtatacttccatttgtagctggctcagtcgtcgccacggttgggacgtcactcgcgagatgctgacttttgtacccggcattgtccgcggtcaagccttcgcattgcaatgcttcaccaatcccggcgaccgggtaatggtgatgactcccgtttatcatcccttcttcctggtgacgcaacgcatgaagcgcgaagtggtttactctccgctcgacctgaaagacggacagtatcagattgactttgagcgtttccgtaaggatatacaaggatgcaaagtattgattctctgcaatccccataacccgggcgggcgtgtatggacggtggacgaattacgccggattgctgatatttgtacggaaagccatacgtttgtcatctccgatgaaattcatgccgacttgactctgccaccttacaaacaccatccttttgctactgtttcgggggctgccgcgcagaattccctcaccttcatggcacccagcaaaacattcaatatgccgggattgggaagttcgtacgccattatcctcaatgaggacatccgccaccgttttcaggagttcatggaagcgggcgagttcagcgaagggcacatgttggcctatatcggtgcggctgctgcctatatgcatggtgaggaatggttggaacagctgctggactatataaagggcaatatcgatttcacggagaactacctgcgcgagcatattccgggcatcggcatgatacgtccgcaggcttcttacctgatttatctggactgccggggattggggctgactcaggaggaactggtgagactatttgtggacaaggcacacctggcactgaatgacggcaccatgttcggtgaaccgggtaagggatttatgcggctgaatatcggctgcccgcgttcggtgttggagcaggcgctgaagcaactggaaactgcggttgcagacaaatgatagaaaaaactatatctcctatattatgaatagattacctttccttggactattgtttgcgttgctgtgccttgttgcctgccggcagatgaatgaggcacatctgttacatctggcagaaaagcaggtgaatatgaatgtggacagcgtgtatgccttgctggtacagatagagaggccatcgcaactttcggatgaggagaggctgttgtatggatggctgaatgcttatgtgcactataagcggcacaactcgatggcggaagattccttgatattgcctgcttccgattattacgtcttccgcaacgacacggcgaagaatctgttttcctatcagttgaaagcctggtactggtattggctgaaagagcacgaacggtgtatagctgccattgacagcggcgtagctttggccaaggcgctgcaggacacgggaagaatggctgatatgctgattgataaggcatactggtatgtgtatgtctggaaagattatgagaaagcgatagaaactttccgtaccgccatagctttggacgcaagagccggaagcttcttctctatgggaattgccatggggctgaacaagaatgattctgcatcctattacatggagcgcagcatagaactggcagtggaggcagaagataccagtaagatagtgcattatttgcgtaactatgcccagatgcaggcttactcttttgatgaaccttccggtgcaatagctactattcgtcgtatggagcagtatgtcatcgacccggtacagttgcgtatgggagatctggtgaaagtggaagtgttcttgaaagaagggctgcttgattcggcggaatactatttgaataaggagaggaaacgtggcgagggccggaaccggtttctgacggaagagaatatggtggcagtatatagggcattgatagattatacacgtcaccgtacgtttgatgtgctggacgtggcgcgctataatgattctgtagccaatgctcttgctgcgctgcagagtaccgtccggcgtaaggatgagtcgaaggagacgctttcgcaagccaacttgattctgacggtggaacggaagcaggcacagttgaatttgttgctggcactgttggtactggtgcttgcaggtggcggtgtgtccctttatgtccgtaaccggcgtaaccggttgattgaagcggaagaacgggcggaaacactgacccggctgttggaagatgcgaccaagaaccagtcgaaggaggaagacggacagtttttccggaaaatactgttgcagcaattaggcatgatacggctggtggctaaacaacctacctcacagaatcaggagctgcttcgccgcatttcgggtattaccagccatgaactgccggtagagagtttgctggtatgggaggacttgtaccctatcatagaccggatgtatgataacttctacacaaagatggacagccgttttggcgatgtgctcattgacaaagaaaagcagctttgctgcctgctctgtgcggacttctcgacgaaggagattagtgtggtgacacaacagagcattcctaccatttaccagcgaaagacgaatatccgcaagaaactggggatgggggagaaggaaggcatcgtagagtttataggcagcatatagaccggaaaaggcataatatagacttttgtgaaattaaagtgttgatatgtagtgatttgtagttttggaatatagactttttattcctcgatatagaccgtttgaggcatgttttacccctacctttgtatcagcgaaatacaaggtgtgaaatattgaaatcaaacgcatgatgaaagaaaaactactgaacaacgttagaaaaagagtgatggtatgggtggccttggcaagtatggcaactctgcttcctgctcagacttaccggctttccggttgtgtgcaggacgagaaccgccaaccggtagaggtggcgaatgtgctgctgaagcaggcaaaagacagtatctatattaccggtatgctgaccgacacacaaggttgtttttcctttgaccagccactgggagaatacttgttgcatattacccttatcggcagcgaagacctctacgttcccgttgtgctgcaaggaaacaaaaacgttggcgaattgacattgaaatcttcttctgccttgctggacgaagtgaccgttacggccgcgcgtcccgttatcaagcgtctggtggatagggtagtgttcgatgcacataataccatagcctctgccggaggcagtgcactcgaccttctgcgtgaagtgcccggtctgcaggttggacaaaacagtattggtattataggtaaagggggtatcaaggtttatatcaacgaccgtgagacgaagctgtcaggagatgaactgatagattacctccgttcctatgacgcctcccagatactgaaggtggaggtgattaccacgcctccgtccaaatacgatgccgccggaaatgcaggcatcatcaatatccgcttgaagtcacgccccaaagattacgtgggtggtacggcttccgcttcctacagcgctggtgaaaaggacaattacggatatggcggggtaagcctgaacctcagcaaggggcgcgtgtcatccttcctcaacgggggtactacgcagggcaactatgagacgcgtgagaagaattaccgctattttccgcagaacacctggaacagccgtgccgactacaccaattacatgaatagcttctaccttcagggaggtgtggacgtatcgttggaacgggactggactgtaggtatgcaggccatctataatcacagtgctcccaaaccgggcaacgccctttcatggacggaagtttacgatgcctctaccgccgtattggattctttgctgtactccaacagtgacaaggataccagttccgaccgcctcaatctgaattttcataccgataaggtctgggatgacaaaggcaagaaaatgacttgggatgtggattacctgcgtgacaaccgggacgaaaatatgggctttctctcgaaaaccctcctgcctgacggtacggagattccgggcacaaacttcgattacaactatctgcaacatcgcaaggtagatgtagtctcctccgctcttgatttcatccttccttttgagaagtacaagataacggcaggtgccaaggtttcctttaccaacactcgcaacggtatcaattacgatacgtcggaccctacgctggtgcaggatgattatttccgttacaaggagcaaatctatgccttatatgctgattatagccgtgaatattccgaacgtttttccatgcagttgggcttgcgtatggagcacacccgcactaccggtatttctgaagcgaaggatacggaggacaagcacgactatacgcgcttgttccctactgtctatctgctttattcgcctacagacgggcatgcgctgaacttcagtttctccaaccgcatctcccgtccgtcgcagaatatggtcaatccttttccgttctatcagaacaagtacacttacgcttgcggtcgtgaagacttgaaacccagttatacttacaatgccgaactgggatatacgttgaagaataacttcaatgtttctgcctattattcttattcggacgatgtcttcttccaggttgtggacttggatgctgaaacgaatgtgacctctttcctctgggagaatttcatgcagacgcatgctttcgggcttaacaattcatacactttccgtaccaaatggctacaaacttacgcccagcatggagtgagctatcgccggaccacctccagcgctgccaccacctctcccgaggagaaagggtgggcttataacgccagcctgcgcaacactttcttcttcaatgaaaagaagactcttctggccacgttgtccggttcctattcttcccgtcagtatcagggcatctatctgatgagccccacttacagcatcagtgcaggtatgctttatcggttgttgaacaataagctcagcctcagcctgaatgtcaacaatttgtttgtcagccattccaaattggaaaccatgtccaacgggttgaagataattgccgacaatcagtttgcctttgccagtttccgtatcggtgtatcctatactttcggtggtgatatacgtagtaagggtcagcggaacagtaacgaggatattcagaggaggctataataagaagtttattgcgtgttggcaattggaagaaaatatttatctttgtgatacaagcgattgtaacaacgattaatataaaactatgatgaaacagaaacttctttaccttttgccactcttcctattgtcgggatgtggacaggctacttacaagaatgcatctctgccggcagaagagcgtgccggacttttgctgaaggaactgacgctcgaagagaaggtgtccttgatgatggacagctccaaaccagtggaacgcctgggcatcaagccctataactggtggaatgaagcgttgcatggagtggcgcgtgccgggctggccacagtgtttccccaaccgattggtatggcggcatccttctcgccggagactgtatacgaggtatttactgccgtatccgatgaggcccgtgccaagaatgcctactatgcatctcagggaagtcgtgaacgctatcaaggattgacgatgtggacgcctacggtgaacatctaccgcgacccccgttggggaaggggtatagagacttatggggaagacccttatctgaccagccgtatgggagtgatggttgtaaaggggttgcagggtacgaacgatggaaaatatgacaagctgcatgcttgtgccaagcactttgccgtacactcaggtccggaatggaaccgccatgagtttaatgcggaaaatatcaagccccgtgatttgtatgaaacttatcttcctcctttcgaagctttggtgaaagaaggaaaagtgaaggaagtgatgtgtgcctacaaccgttttgagggcgatccttgttgcggtagcgaccgcctgctgatgcagattttgcgcgatgagtggggatttgacggtattgtcctttcggactgtggagctattgccgatttttacagagattatggtcataagacgcatcctgatgcagagtccgcttcggcggctgcggtgctgagtgggactgacttggaatgcggttcgagttacgaggccctggtagaagcggtgaagcagggaaagattgatgaaaaagcagtggatgtagcagtcaagcgccttttgacggctcgctttgccttgggtgaaatggacgagccggagaaggtgtcctggaccggcattcctttttctgtggtggcttctgccggacacgactctctggcgctcgacatggctcgcaagtcaatgacactgcttatgaacaaggataataccttgccgttgaagcgtggagggctgactgtagccgtgatgggtccgaacgccaatgattctgtgatgcagtggggaaattataacggtatgcctccgcacacagtcaccattctggacggaattagaaaagccttggggactgatgaccggcttatttatgaacaaggctgcggatgggtggagagagctcagatacagagcgtcttcaaccgttgcaagactgccgacgggaaacccggatttactgcacgctactggaataacgtgactcgtgacggtgagccagtcactactgcccaagtgaccactcctttccatttctgtacatccggtgccacggtttttgctccgggtgtgaaccttaccgacttctcggctacctacaacagcgtattcactcccgaccagtcgggagaggtggtctttgacatctatgcttatggctcagggagattgcggataaatggggaggaagtgagaggattctccaatcagcacggtgggcagaagagtgcttatactttgcaggtacaagcaggaaaaacgtatgacgttgaattggattttgaatatttccgtagcgatgcacagttgaactttgaccttggatttaagaatgaagtggatgtgaggaaatctgtggagcgtgtaaaggatgctgatgtcgtggtctttgtgggaggagtctctccgaacctcgaaggcgaggagatgggtgttgagcttcccggattcagaggaggcgaccgtactgatattgagttgcctgctgtccagcgggaactgattgccgctttgcaccatgccggtaaaaaggtggtgttggtgaactgttcaggttctcctatcggcttggagccggaaaccgggaggtgtggagctatcctgcaggcatggtatcccggtcaggcaggcggtacggctgtagctgaagtcttgttcggtgattacaatccggcaggacgcttgccggtaaccttctaccgtaatgtgtcacagcttcctgattttgaggattataatatgaccggccggacttaccgttacatgacccaggaaccgcttttccccttcggtcatggattgagctatacctctttctgctatggcgctgtggtgcttggttcggataatataaagtccggtgagaaattgagattgaatgtccccgtaaccaataccggcaaatgtgacggtgaagaggttgtgcaggtctatttgaagaaaaacgatgatgtcgaaggaccgagcaaggcattgcgtgctttcaaacgggtacatatcccggcaggaaagacggtcgatgtagagtttgatttgggcgataaagagttggtgtggtggaatccgcaaagcaataccatgtgcgtttccgaaggcagttatgaacttatggtgggcggtagctcgcagactgctggtttgctgcgccggtcttttgtcattcagccttgatacattgctgacaaagtcgaaaaagaaaattccgcttgaaggtaagtcatgaccctcaagcggaatttttgtgtactggggatacatgttcttaataatccttaatacaatatgttaacttccttgcttctctgttcttatctaattttaattgatatatttgtgatatcattatgatatcaattaaatctatagaatatggaaacaaaagagtgtggtttcagtggtttcaagatgaatggctttttggccttgttccttcatttggtagtgcttacggcagtgataatctttgggtttatcatttctgtgcctaccttgatcctttcggtgtgtctgtgtctgatatggtttattatgtttgccggctatatggagctggagccgaacgaggcgcgtgctatggtgttctttggtaaatataaagggacgttcaaggagaccggctttttctgggtaaaccctttccttaataagaagaagctttcgcttcgtgcacgcaacctggatgtggagccgataaaggtgaacgataagattggtaatcctattcttataggactggtattggtgtggaagctgaaggacacctataaagccatgtttgagattgattcacaaacaatggctgcatccgctccgacagcgggtaatgcgaaccaggtcagtcttggcaatgcggtggccaaccgtatgaatgcgttcgagaatttcgtcatgatacagagtgatgccgctcttcgccaggttgccggtcagtatgcctatgatgataatgaggctgatacggaagagttgacacttcgttcgggcggtgaggaaatcaatgaacagctggagcagaaattgaatgaacgcctggccatggcaggtatggaagtggtggaagcccgcatcaactatctggcgtatgcgcccgaaattgccgctgtgatgctgcgtcgccagcaagcatctgccattattacggcacgcgagaagattgtggaaggggcagtctctatggtaaaaatggcgctccataaactttctgaagaagaaattgttgaactggacgaagacaagaaagcggcaatggtcagcaatctgttggtagtgctttgtgcggatgaggctgctcaaccggtagtcaatacgggaacgttgaaccattgataaaggatacggatgaaagagatgggggttataggacgatgggctcttatactgctcttgctgggcaatgtatatgggggctttgcacaagatgcgaatactgcgcgcgcgcagcacatttatgaattgtttgtggcagggcaaggtgacagtatccatgcggcattgaaccgggagttgcagaagaaactagctccggcactcttcaatgattctttccggcaagcagagaaaatgtttggtaaatccatatcaaaaggagaatggaagaccgattctgcccagggaattactatctattattccgatgtggaatttgaacgttataatctccgttttctggtggcttttgatgctgacggggcactgaatacaatccggctggtccctgcacctgctgttagcactgcccaaccggtagcctatgataagacaaaaatggatgaaagggatattacgctgggagccgacggctacaagcttcccggaacgttgactttgcccaagcgggcagtcggtccggatgcatgcagggttccttgtgttattttggtacatggttccggtcctcacgaccgtgacgagacgataggtcccaacaagcctttccgtgaccttgcctggggattggcgaaacgcggcattgctgtcgtccgctatgaaaaacggacaaaggcatatggtgcggcttgcgttcctgccggtcgcgaactcgattatgatactgaggccgtggacgatgccgttgccatagtggagcaggtaagggctttgcccgagctggctcctgacagtgtgtatgtgttggggcacagcctgggaggtacattggctccccgtattgccgggcgttcgaaaggtttggcaggtatcattatccttgccggactggcaagatcgcttgaagatgctcttgaggaacagttttattatacctcttctttgacggattcttcagtcaatgtaaaggttcaacttgatgagctgaaacaacagttggctaatgtcaaaaagcttggtacggaagagtttgatgaaacgatttccttgccattggggcagccccgctcatattggctgtttgccaatgcttacaaaccggtggaagttgccgctaaactaaagctgcctatatttgttcttcaaggggagagagattatcaggtgactatggaagacttcggtttatggcgttccggtttgttgcgctgcaagaatgcatatttcaaatcttatccgaaattgaatcacttgttgcaggaaggcagcggcaaggcgactccgtttgagtatagccatgcttcgcccgtcccagcatatgttatggatgacattgcctccttcgtgcggggcaagcagaatactctttgattggtacttggttatatcaaagtaacttcaatcgtaaatcgtaaattgttaaatagtaaataaatagtggctaaaaaagaaacttcaaccaaaagctttgtcctccgtgtggatgctgcaacgatggatgccattgaaaaatgggcagccgacgagttccgtagtaccaatggacagcttcagtggattatcgctgaagcattgcggaagagtgggcggatgaagaagtccaagaatcctcctccgtctgaagagaaagcagaggaggattcgtaataacagattctaaatcgcagatagtatgattaatcttggtccttattccggcaagaattgccctaatgtccgtttccaacccactgtgcttgaccgtattctggaaggtacggccctgcttatcgtgctcgttacgtggattagcattttaatagttcttttaccatttatcctcctttttcatctttatttgttgttataaatctgccattacctactaatggttactctttctcttcttttcgcaatttttaggtattgttctcctttttaactacctctacctttgctcccaacaaaaattaagataaaagatgagaaaattaactggcttattcgttttatgttttttgctttctgccaatgctttgcaggctgctgaacctgaaaaagttacttctgcagcagagagtacggaaatttcaacagacaaagagaaaaaggaaaaagtagcgaatgatggcgacaactacaagaaattccgtttcggtggatacggagaaatggttgcaagttttaaggattatggtattaaccgtttctatggtgcgcctgaaggcaatccagacaaacataggaatacaatttctataccccgtttcgtgttggctctggattacaagttcaattccaaatggatactcggtgctgaaatcgagtttgaatccggtggtacgggtactgcttatgaacttgagaatacggaaaacggtgagtatgaaacggaggtggaaaagggtggcgaagtggctatcgagcaattccacattacccgtttaattgttccacaattcaacatacgtgccggtcacgtcattgtcccggtaggattgaccaacgcccatcatgaaccaatcaatttctttggaacttatcggccggaaggagagacaaccatccttccttctacgtggcatgaaaacggactcgagttttttggttcttttggaaaaggatatgccagctttgattatcaagccatgatagtggccggtctgaatgccaatggttttgaccgtaacacctggatagcaagtggcaaacaaggcatctttgaagaagacaactttacttcaccgggctatgtggctcgtctggactacaagggggttccggggttgcgtataggcgcttcgttttattactgcgctgatgccggttccaattctgacaaagcggatacttattcgtctaccggtaaggttccggtaagaatctacacggcagatgcccaataccgtaataaatatgtgattgcccgtgccaatatggtatacggaaatttgggcaattcagcgaagcttagtgaggcaaataccaaattatcgaataaatctccttacagccgtataacccccattgcaaagaatgtagtcagttatgcagccgaggccggtttgaatatcagcgctttcttcaaaggaaacaagaaagttccggttatctacccctttgcacgttatgaatattacaatccgcaagaaaagggagaggctagccagataatggagaaacgttgtcaagtaagcatgtggactgctggattgaattggtatgccttgcctaatctggtggtaaaggctgattacaccacccgccaaatcggaacaaacaaggttttcggaactggtaagtataatagtgaaaatgagttttcgatcggtattgcctatatcggttggtttgtcaagaagtagatgaatagtaatcaattaattttatacaaatgaagaaaaatttcttttatgcgacagctttggtattagggctggcatttacggctactgcttgtagcgatgatgatgacaacagtacagttaatcctgctgacattgagtataattcggagaatgcagcaagttggcacaactacatgagaaatgtggcggctttgttgaagacagatgccaccaatctttatgattcttggaatacgagttataagggtggggcaagttttgcaacttccttcaaagctcataatggtgcctataacttttcaagtgcctggaactgtatagagcaggttatcgacggttgtgttgaaatctccaatgaggtaggtgagacgaagattggtgatccatataataaatatatggcaaacaatgttacagaggccctctatgctgttgagtcatggtatagctggcattcccgtgatgattataccaataatatttactcaatccgcaatgcctattacggctctttggacggtaaggtgagcgacaagtcaatttcaaaattggtggctggagccaatgcggagttggatacgaaagtgtcggcagctatcactacggcagcatcggctattcaggctattccccaacctttccgtaataatatcaacagtcaggaaacggtagctgctatcaaggcttgtgaagaactggaaagtgcattggataaggagttgaaaccttatatcagggacaatagcaccattaacagcaatgaagcacttgacccgattgttgaaaattatgtcaatgttgtggttttgcctacctataaggatttgaaggagaagaatagtacgctgtatgacgctgtggtggctcttgccaacaatccctctaacagtgcttttgagacggcatgcaatgcttggataacagcccgtgaaccttgggaggaaagtgaggcgttcctatttgggccggtggatgagctggggcttgacccgaatatggatagttggcctttggaccagaacgccattgtccagattctgaattcccagaaatggggcgatttggaatggagcgagggtgatgatgatgcaaaagttgaatctgcccaaaatgtacgcggattccatactttagaattcctgcttttcaaggatggcaagcctcgtacagttaaataagaattatttataaacaatactcaagaagtaaaggggggatttggagaatcctgcctttacttctttggcatgtttggatatgccattattaaaaagtagataaagatgatgaatcatttaatgagatattcatgtcttctcctttgtttgtcggcaggtttgactgcttgtgatgatgatgggattgacgtgttggatatagagattcctgaaggatacgctctgtctgccggaacgtccacaatcttcatgaattcatccaaggcctatgattcaccggcagattgggtgtcgggtgtttacaacagtcgctttaatgatggtgacgggctttacgatgatgtgcgtacgagtagcaatggcatgggaggggggcttggcccggtctatgcggggtattcttgtggcagttgtcatcgtaatgccggccgtaccaaaccgacgctgtggagtgaaggcggatcgggtagttacgggttttcctcgatgctggtttatataagccgcaagaatggtgcgttttttcaggattatggccgtgttctccatgaccaggccatttatggagtgaaaccggagggaaagctttctgtggagtatacttatgagacttttacctttcccgacggagagaagtatgaactttgcagaccggcttattccatatccgaatggtatgctgacagtataaagcctgaagatatgttctgtacggtgcgtatcccgttgagacatgtcggtatggggcaaatgatggctttggaacctacggagattgaagcgcttgctgcaaaaagtaattatccggagtatggtataagtggccgttgcaattacattaccgaacgtggtgtgagaagcttggggctgtcgggaaataaggctcaacatgcggatttgactgttgaacttggtttttcaagtgatatgggtgttaccaatagccgctatccggaagagatatgcgaggggcaggcccaggtgaatcaaggcagcatgatggggctttcttatgcccagttggatgtttctacagaagatatggaagatgttgacttgtatatgcagagtcttggtgttcctgcacggcgtaatgtgaatgacccgcaggtgataaggggagaacagaatttctataaagccaagtgccatctttgccatgtcaccacgttgcataccaagcctcggggctccgtgctgttgaacggtacccgtttgccatggttgggaagtcagacaattcacccctattcggattttttgctgcatgatatgggctccgaaattatgggagtcggtctgaatgataactatgtaagtgggttggcgcgtggcaatgaatggcgcactactccgctttggggtatcgggcttcaggaaaaggtaaacggacatacctacttcttgcacgatggccgtgcccgcaatcttgttgaagccataatgtggcatgggggagagggagaagcatcgaaaaatctctttaagaacatgagcaaggatgaccgtgatgccctgattgcatttttaaattcactttagaactaataagctttatataaaaagtaattatgaagaaatttttatatgtcgccatgctggctgttttgcctttgaccgctatggcgcaacatgaggaagatacggagaatggtgtagtgtcattggccggaagagaaggttttaccattggaacaaagaaaggtgactttgttttcaagccttatctgttggtacaaacgagtgctaatttcaattggtatgatgatgaaggcttggataaggcttataaccaagataatattgccaattcgggtttttccattccttatgccgtacttggctttactggcaaggcttttggaaaagtagctttcaatctgtccatcaatgctgctgcaagtggaggagcgctgttgcagcaggcgtggttcgatgtacagctgaaaaaacaatttgcgattcgtgtcggaaagttcaagactccattctcgcatgcctatctgacaactcttggcgaaacactgcttccccagttgccggtttctctgacgtcttctgtaattttgccttattcgttgaatgccgtgacgcctaatatcggtacgggatttgacctgggtgttgaagttcacggtctggtggcagataagttgggttatgaagtcggcttgttcaatggaaccggagcttccgtgaatacagcttcaaagacaatgagtgatgactggcatatcccttcattgctgtatgccggacgtctgacttatatgcccaagggggtgatgccttccacacaaggtaatcctaaccgtttgaacgaggacaagatattattcggtctttcgggttctatcaatgtggagagtgaaaatgagagtaccaatgatacccgtgtggggttggaatttgccatgttgaagaacaagctctatctggcggctgaagcttattatatgaatgtaggtttcaccaaacggcaaaagataaatgaatcgtataactttttaggcggttatgtgcaaggtggttactttgtcgctccccgcctacagcttgccgcacgctacgatatcttcaatcgtaacggtacggatgacgacggtttcctgaatatgcctgctgtaggtatgaactactttttcagaggatgcaacttgaaattgcaggcaatgtatcagtatgtagcccgttggggacacgacacgcagctcgaccgtgataatgataatttaggtctggccactcactctgccacggtgatgcttcaatatacattctaaatgaagtcaggaaaggattcgtctatgaaaaaatacattcttttcttttttctgcccgtgcttcttataggcctgcatgcatgcgatgaggggagaatttatgagaatgccgttgtggccacgggtgaaggacgcacagtgaagatgacaggccggattagtggtgtggataagtggtcgggcgactatagtgtggtagtggcaggatttgatgatgaaagcgattatgccattgtttcaaaggttgttccggcatccgaatcggataatgatgaaatccagttgacaatgtccggcataacggatgaggtgacaactgtcgagctatgtgtaatcaataagttgaggaagcgcattgtcagtttggtggcaatggaatgtactgaaatcgctgataccatactcatggatgcaggaacagttgatgcaagtatgtacaatgccattcaacaaaaaatattcaatgccacttgtacggcttgccatggtcttagcaccactccgggtggtggcttgaatctgctgggaggacatagccatgctgatctggtcaaccgggcttcaacgacagtagacggtaaaatgagggttatgcccggcaatgcgtcagaaagtgtcttgcatctcatattgggtacggacatcagctcggattggcgtatagaccattctcagatgataatctcatctgatatgcagtctttgattggcaactggattgactatggcgcacagccgtaataatgatgggccttactggtaataccggtacttttttggacaacaacgactaattgatatttaatatgaacaataaacaacaacaaactaatcaatcggagaaaaccttaaccgaaatctttaaatatgaggtagaagcgggtgtttcggaatatcatgtaatgattcatgccaccagaccggaagcgacttatgaagaacagctgaatgcggtggtcgacacttactgccaactgcgtgaaagtgaactacaaggtgctgttgccatctttaaacgttactttctaagtgacgccgccaatcaggcagatatgctgctggcgctttcggcagaatattcggattgtgcgctctccgtggtagagcagccgccgctgaacggtacaaagattgcactgtgggtctatctgcagaaaggtgtggaaacacaggtgcttcataacggattgttcgaagtgaagcatggcgcctaccgtcacctttggggaggcggctctttcaaccgtgccgccaattcggaataccagacccgtttgctgttgaatgactatgtgatgcagctgatggaacagggctgcaagctggctgataactgcatacgtacctggttctttgtacagaacgtggatgtgaattatgccggagtggtgaaggcgcgtaatgaggtgtttgttacccaggacttgacggagaagactcattatatttccagtaccggtatcggtggccgtcatgccgacccaaaagtgacggttcagatggatacttatgctgtagatggtttgaaatctgaacaaattcactacctttacgcaccgacacatttgaatcccacatacgaatacggtgtgagtttcgagcgaggtacgtatgtggattatggcgaccgtcgccaggtgtttatttcgggtactgcgagcatcaataataaaggtgaggtggtatgtcccggagacattcgcaagcagacggaacgtatgtgggagaatgtggaggctttgttgaaagaggctggctgtacgtttgatgatttaggacagatgattgtttatctgcgggatgttgcagactataccgtggtcaaaggaatgtatgacgagcgttttccggatactccgagagtgtttgtatatgctcccgtatgtcgtccgggttggctgatagagatggaatgtatgggagtcaagtctttagaaaacaaggagtttgctccatattgattttttacttttaattgatagctcttaattgaaaaagtttctcatagctgtttatggttgtttgctgctcttacttgctgcaactacgtttgtagagcagacatacagtacggattttgtagaaaagcatgtttatcatacgatttggttctgttgtttgtggggagcccttgctgcgatgactgttgttgtgcttgtaagacagcggttgtggcggcgtctcccgacgttgttgttgcatggctccttcctcgtgattttggcgggagccatgactacgtttctttgtggccgaaaaggatatgtgcatcttactgtcggcagtgaggtgaactgctttttggaacaagacggcaggcaggttgtagagttaccgttcaccttacgtctggacagtttccggattgagtactatccgggtacggatgctcctgcagattatatcagctatattcacggtgagacgcccgtctccatgaaccgtattctttcacggcaggggttccgcttttatcagtcttcctttgatgaggatatgcaggggagctggctgacagtgaattatgacccgtgggggataggggttacctatagtggatacctcttgttaggtgtctccatgctctggatgctggtcagccggggtggagagttccgcaggctgctgaggcatccgttgttgaagaagggaggaatgtttgttctattgttgctgtgtctgggaagtggggtacatgcgcagaagagaagccttccggcactggcacgcaagcaggcggatagtctcgcccgtaagcaggtgatttataatgaccgtgtggttcctttcaatacccttgcgcgcgattttgtactgaaactgacgggaaaaccgtcttatggaggcatgacgccggagcaggtgattggtggatggcttctgcgtccggaagtttggcagaatgagccgatgatttatatcaaaaacgaggcactccgtcgcctgcttcatttggagacaccctatgcatgtctggctgatttgttcgacggtgagaagtatcgcttgcagaagttctggaaggggaagcaagaccatcatcagaaaatgacttctctggaaaaggccattgtagaggcggatgaaaaggtgggactgattttgatgctccaaaatggtacattgattcgtcctttgccggaagacgggagtgtggagcctgtttccgatactaaaatacaagccgaattgctgtataaccgtattcctttcagcaaattgctgttcatgttcaaccttacggtggggatgctggctttcttccgtctgctgtatcgcggcctgcgccgttcgtcggcattgtcagactcttccggtaggattgtagcgctctctttctcttcgcgtttggcagatacttttttcccgttttctctttatgcggcgtttctctttcagctcttcgggtatggtctgaggtggtacatcggcgggcgtatcccgttgggtaatggatacgaaacgatgcagttcatggcattgtgtgcgctgttcctggcttgtctgtttcggcggcgcttcccgtttatggtgcctttcggttttttgctgtccggttttgccttactggtgtcctatttgggacagatgaatccccaaatcactcccttgatgcccgtgctcgtttctccgtggctcagtacgcatgtgtcgttgataatgatgtcttatgctttgtttgcctttatgatgctgaacggcatactggcattgtgtcttcgccgttcagcccggatgttgatgctgctcagccgattgctgctttatcccgccgttttctttttgggagccggcatttttctgggtgcggtttgggccaatgcttcttgggggcgttattgggcttgggacccgaaggaagtatgggcgctgattacctttatggtttatggagcggcgttccatgcgcgcagcctgcgcattttccgcagtccgttattcttccatatctatatggttgccgcctttctgacagtcctgatgacctatttcggggtgaactacatccttggaggaatgcacagctatgccaatgcctgatttgtgggtggttctacctatttatgatgactgacttgttttattatacctaatttaagtgattgcgtactgtctgccgatgccttatctttgcaacatcagatttgaatgaattagttagtcataattacgtaaccacttttatgaagataaaaggatccccgcttcccgatgtgatatcgtgaagcggggatttgtgtatggcgtgacggatactgtgggtaaggttggataaggatacttgtggggcataaagagtcataggatggggagggatgacataggggatgagctttgtcttcaggcacaagataaaccttaatcaataggcagagggcttttcccgtatggaggagcatacttttgcaagggattcatccggtttttccctataggccgcagcgggtagggaaacggttgccggaagaatcttatagagagtccttgatgtcgctcaattctaccagcttgttgacaatagcgtagatggtgagccctgccggagaatgtatctgcaatttgcgtgcaatgttacggcgatgggtaatgacagtatggatggagaggtagagtttgtcggcgatggctttgttggtcatgcccttcacaacgcaggtgatgatttccttttcgcgctggctcagggtttcttgttcgctgtctttttcctcttcctcctcggtgtgtagcaagtggtttattttggaggtgatgacatctatgtcatcgcacatggcgaagttctcgtcatattccttcaatatgttgttgtcgatgacggagcataccatagcaatgtacttgatgccggattttccgtgttctgccttgaaggcgggcaggtcgaaccagccaccgaaagtggggttgatgatgataatgtctgccggatgcatgtgaatgtagttctgcagcgattccggagaagaaacctcaatagggtgtgcattcaagttgggaatacgcttcaaaacagccgtcaggccactccggatgatgaccgaagtttctgcaatgacaatcttcaaagaagtattattgttcatttttcagtttcctttctatttgcgctacggcgggaacaaacatataatcttctacctggcagtgggtggcaaggtcttgttcgcagttgaatatatcgaacaagaccgcattcaggagattgttgttctccttttccgggtagtatttgatgatgatgttcttcagctctttcagtttggtatctatctgattatgtttgctggcaaaagtggcgatgttgtattcgtccgataggttgccttggagtaattgctctacataggtgaatacggcctggttttcatattccatgtggcggcgtacttccttggcatattcatcgaagaacttcaggatgaggtaggctacatcgtttgtactggaacaatcgatggcttcgatgagtttgcggcggatggccggcaggttgaagtcgaggaaatatgtgtgggcacgcttcagataatccataagggcgggaatggaaaaatcactttcattgccgctgtaagagtattgttcttcgctgataaagttggctacggcgaggaatgtagggcaatcgacgccttgtgcttcgcagacgtccttcacgctcttgtctccgaatcctaatgacagtccgaagcggctcatcaccattaataaggagtaattgtcacagatgaggtcgctcatcttgtccgtggagcggtacttatgttgctcattcattgtatgttattgtttttaattctctgattcgtgcgcaaagtaacggcttttatccgagaactgcaatcactattagtaggtattttgcttgtcgggagacggttggagactggtgtttgccgaataaactaaaagctttagttttatttaacgagagaaattagtttttgaactaaataatttagttatttgcagaaaacaaagaatgttatgaaaggattgactgcaaaagaagaagaaatcatgggctttttctgggaaaagggacccttgtttgtgaaggaaatgctggcattctatgaagagccgaaaccacatttcaatactttgtccaccattgtgagaggattggaggataagggattcctgagccatcatacgtacggcaacacgtatcagtattatgcggtggtcagcgaggaggattttcgcaagcggacactgaagaacgttatcagcaaatatttcaataattcctatctcagcgcagtgtcgtctctggtgaaggaagaggatatatccctggaagaactgaagcagttgatacaagacgtggaaaagggaagggactgagattgttgagactctaataactctggcttatgaaaaacatcggattggtttgtttgctgctggtaagtatttgctgcggattgcaggcaaagaaaatcgtaaaggtaccctatttcatggcatgcaatacgcgtagcattgaagtggagcaagtgacgcttggaaaagatacgacctggctggcggtgaggctttatggcatgcagggcgatagggtcaggattgattcgacagctgtgttgcgggcatccggaaaggattacggatatttgggaaataccggttttgccagggatgaatggacgcatattcccgcttccggtgaaatgactgctgttttgaagtttagtccgcttccgatggatactgagagctttgattttgtagagacaccggacagtgatgaaggatgggtaatttatggtatacagctcaacggagagaaacctcgggtggatattcccgaacgtttgcggaataagaaaccggatgaggttttgccattgcccggaccggaattgaatatgggaaagactgtcataaaggggcagatattggggtataaaccggagtatggagtgacgttacgctactatgactcgccttggttcttcatgtatttcaccggtaaggacttgaagatagcggaggatggcacgttccgttatgagacagaggtgctgttgccgagcggtgctacgctgtggatatcccgttcgaaaatagaattgtttctcgttccgggtggagaactggatgtcacaatcaatctgcctgaaatattctattcgcaaagccgtcttttaagccggaaaagggatggcgtaacggacaactgtgtttggtttgaaggagactatgccggtctgaataccgagttgctgcggttcggtgaaatgaaaagcttatcgggagctgatgatttttatgcagatatttgtgggatgactccgcaggcatataaaaagtatctgttcaggcattatgaagatatgcaaaagaaacttgtaaaaaacaaggatatgagccaggcttgccgtacttatatccgggcaaatctggatatgaatctgttcagccttatctataattacaagagtaaccttagttatgccccgatgctttcgggcaggaagggggtgaaaagggcggacatgacggtggacagtacctcatacttcaaggaaatactgcaactggatattctgcatacccccgaacagaaatattacaattattatacggactttgtgaagaccgctaccggaaatttccgggataagtttgtgcaagaccctctttggccggacatgcttcttgccgggcgtgcttcccgtaatctgagcaagtacatgcctttgactgaggaagagcgtcggacggtggacagcatcgcttctcccgacctcaggcaattgttcctgatgagaaacgggaggattgaagccgaactgaaatcagagttggaagctactaagggaaagaccggatataagattgttgaggtggaaaaggaggtagcggcagacagtttgttgcaggtcattactcgtccttatcgtggcaagatggtactggtggatatgtggaacacctggtgtggtccttgtatgcgggccatgaaaagcctgaaaccgttgaaagaggagctgaaagaggtggtttatctatatattgtcgacgaaacatctcctgaaggaaaatggaaagtaatgataccggatatacccggtattcactgtcgcattagcaatgagcaaagtacggcattggcaaagctgtacgaatatccgggtatcccgacctatttcgtcgtgaaccgtgaaggagatatttcctacaaagcaaccggatttcccggagtggagatgctacggaatgaactgaccaagtaactgtaaatagtaaatcgtaaatccctaaatagtaaataattccatgggtctgttttttgtttatatactcaaatcttctgtttgcctggcgatattctatttgttttatcgcttgttgctggcacgcgagacgtttcatcgtttcaaccgtttttcattgttgggcattttgctgttgtcctgcctattgcctttggtagaggtaagtgtgaagcaggagacggaagtgcaccagacgatgctgacattggagcagttgctgatgatggcagatgcagtgaatgccactgaggccggagcaagggctgaaacggcaacagtcacctggatacaagtggcgctgcttgtctatctggcaggaatcgttttctttgccttccgcaacgtatattcgttggtacggttactgatgttgctgaaatcgggtaaaaaagaggatattggcagctacttaccgggcaggaaagagcgcgttactttgattgtacacaactgtgacatcgctccgttcagttggatgggatatattgtcatttcacggaaagacttggaggagaacggacgggaaatccttatccacgagcttgcccatatccataaccgccattcctgggacttgctggtggctgatgtctgcattttctttcagtggttcaatccggcatcatggctcctgaagcaggaattgcagaatatccatgagtttgaagcggatgaaacggtgataaaggagggtgtggatgcaaaacagtatcaactattattaataaaaaaagctgtcggcacaaggctctactctatggccaacagctttaatcacagtaaacttaaaaaacgtatcactatgatgttaaaagaaaaatcaagcccgtgggcacgtttgaagtatctttatgtacttccggtagctgccattgcagtgacagcttttgcccgtcccgaagtctccgataaagtggagaagatttcaagcgtcaaagttaacgatttggctgcaattgtagaaacaaaagtggcggaaagtgcaggtgacactacgaagcctgccgatgtgaagtatgtaccggcggaagtccgcaagcggttgaagggaactctggtcttcgaggtggcagaggagatgccggaatttcccggcggcggaatgagtgctttcatggattatatcaagacgaatatgcgttatccggcatctgccaaagagaacggtacgcagggacgggtcactgtccagtttgtggtggatgaagatggaagcatcaaggactccaaggtgctccgttctgtggataaggatatggatgccgaggcgctgcgattgataaacactatgccgaagtggaagccggggagacagaaggggcagccggtggctgtgaaatttacggtgccggtgatgttcaggctggacgacgacaaacttgaaaaaacttcttctgccaatggtattacagttgaaggatatgcaggtaatgggaaagagccattgtatattgtggatggaaaagaggtgacgccatctgtcatgagtgcattgaatcctgataagatagaacgtgtaacggttttgaaagataaatctgccacggatttatatggagaagagggacagaatggcgttgttctgataaccctgaaacaaggaactccgggtatggttatccgccggggtaatgaggtggcagagaatgctaaagtacagcataagagtagtcttgatttaataaagactgtctatattgatggagaaaaggttgacttgggtactaaaactatcgatgatttaatacctgccgagaatattgagggtattgaggtgaagaaagaggcaggtggaaaaggtgagatttacatcactactaaaaaaactaaagctgtagaaaagaccattgccaaaggcaatatgaaagtggaaggcaaagtggtggatgagcagggtgagcctgttatcggtgcggctgttctgatagaaggtaccactacgggaagcgttaccgatgtcaatggcaattttgtcctttctgtaccttctaaggatgctgtattggttgtttcgtatataggtatggctaccggcaaagtgaaggtgcagcccaagcttacgattacgctgaaaagtgaatagtctctaacaattatgataaggaaaattctctctttgtttctgattctggtagctgtgggggcagggctttgctctgcccagacagccggtaagaaatattatttggtgggcgggcttttcttcgaaggcatgccgcctggtgtgggttcggacaacgtggcggctttcataatacatgaggacggcgcgagacacgaggttacggaactccgcttgcgcaagggcattgtgctgtctgaggaggtgagagaatatgctactcctgccgacgaggtgcctggtgcggaagctttcttgatgagttaccgtggaggaacggggaagaagttgccgataggcggtgccgtacagactttgaagaaggaagaatggataggaaaggcttttccggaattcaaagtgaaagacatagaaggacaggagtggagcaaggccgatgtgacgggacgtcctatggtcttgaacttctggtataccggctgtggtccttgtatccgtgaaatgccggagctgaacaaatggatagaagtctatcctgatgtaacctatcttgctacgacttttgacagtgctgcacaaataaagaaaattgtagagagccgtcctttcctctttacccagatagccgatgacttgtttttcttcgagacctttcatgtgagtggtatgccggtcactatactggtggataagaaaggcattatccgtcatatagaacaaggtactggaactgcgaaacttcggtatatgcaggataagttgcagaaacttgtcagcgaataattctttcctgatgaataggggataaggatttcagaggatttcttttgccctttcacagattatcatacctttgcgaatataaatctaaggaaggcaaggttatgataaaacatctttttttaatatggggactgcttgcggcactcactgctgagccggttctggcttgtacatctgccgtcgtttctggaaaggttactcctgacggccgtccgttgctatggaaaaaccgtgatacggactatctgcgaaatcatgttgcttatataaaaggggagaagtataacttcattgccgatgtgaatagtgctaactttcctgccttgaaagaggcatggatgggtacaaactccgttggttttgccttgatgaacacccaatcctacaatctggtggaagtgaaagatggggaagaacggggggcagccaacgggaggattatctaccgtgccttggaggtttgtgccacggtggaggatttctgccatttcctcgataccatttccaagcccagcttgatagaggccaattttggcgtaatcgacgctcaaggcgctgccgccatgtttgaggtggattattataaatatacgatgtatgatgccaataatcccaaagatgctccttacggctacattgcccgtaccaacttctcttttgccggtgaagcaaatcggggggcaggttatgtacgctatatggaggcagacagggtactgatgagggcttctgcaacgggagggatcacaccgcagggtatattcaatgatctttcacgttcgtttcgcaatggcatgcttgatattgatttgaagaacgggaaatttaatcgcccgcaaggttccggttggtttgtcgaccaggattttattccccgtaacagtacttcttgttccattgtggtgcagggcgtaaaaccgggtgagaaggtggaacttactacgatgtggacaatgctgggatatcctcctacgggtattgccgtgccgctttgggtgaaggatgcggatagacttctgcctccgatggtatgttgggacaaggcgtgtgccgccgctccgctcagtgattggtcactccggctttccaacaatgtcttttgttataatcaggggatgggaaccaatcgttatctgaattgggaaaaactgtacaatatggagaataatggctatatgcagcagcttgttacggtagaggcagaggtgtttcgccgtacatgcctattgttggacagctggagacagcaaggaagcattgattctcaagaaatgcagaagctttatcaagatgtggaagcacttgtccgaaaggcttatacgcctttgatggaacaatgacagtattccagtatttccccttcctgctccgggtggaaccagtggatttcctcgtctcgtttgaaccaggtcatttgcttacgggaatagatgcgtgagttctgctttatcttttcgatggcaaagggtaatgtccattcaccatccaggtacttgaatatttctttgtagcctactgtatttagggaatttagacttttatgcgggtagaccatgcgcgcttcttccactaaaccctcttccaccatttggtccacccggcagttgatgcgttcataaagctcttcccggttacgtgttaatcctattttgatgatacggaaggggcgttctttcttttgttgagtgcggaaggaagtgtaggcctttcccgtcatgtagcagatttccaaagcatggactacgcgtttgggattcttcaaatctactattttgtaatattccggatccaacagcttaagttccgcacaaagtctttccagaccttctgtttcgtatttgtgcagcatgagctggcgtgtatcggcatctacggtcggaatgtcgtcaattcctttacagactgcatctacatacatcattgagcctccggtcagcagtacggtgttatgctttgtaaacaggtcttccagcagcttcatcacttccgcttcgtattgggcggcactgtaatagtctgtcagcttcagggtaccgacgaagtgatgctgtacccgttgcagttgctccggtgtaggggcagccgtgcctatctttaaatctgcatagagttgtctcgaatcggccgagacgatacaagtatggaaatgttctgccaatcggaggctgagctctgttttgcctactccggtgggaccgataagtacgattagggtgtgcatgcgggtaaaaaaataggcacggattacgcggattacacggaatattcaataacaaccgtgtgtttccgtgtaatccgtgcctaaaagaaatctgtatggtatgtctgtttaatatttctcttcttcaaaggagtttccggcttcgtccaaaccgccgaaaccctctttgtcgaaatcttccatatcgaagtcctggtcgccgtaaaagttttcgtccaaatcaagggaaccgccagcagctgccatctcttcaaaatcaatggtctgcttgggagcttcacctgctttcttggtgcatttggctcctttcatttcctttccggtaatgatttcagaaagctcgatgaagaagcagcgctcagtcatataatcgaatacatagagaagtttctgcttctcgtcttcaaccagttcgctcagctgggtctctttcatcacccaactgtccatttccggattgtcatccatttcttccagcgtaatttctttctctttctcccagtcatcatcgcaaatgaagaaagacgtcatttggtcgttagtgtaacctgccgactttagaatcgcttcatggaagtcataaaaggtagcttccgggtctatctgtatttctctgacaaaatcgtccacctcatcagagatgattgtaaatctgtagatcatgatgatttataatttatgatttctgactttgtgtaaatcatacgtttttcattttcctgcggggataatgccgcgggctgattcacgtataaagtttacaatatagcttatttccggtgtcatttccatttcatcctcgattttcttcaaggcatccgtattgttcagaccgccttgatagataatacgataggcatcatggattttctcaatggtctcgttggagaagccacggcggcgtaaccctaccacattgattcccgcatagcagatgggctcgcgtccggcaatgatgtacggcgggatgtccttgctgaaacggcagccgccttgtatcattccataaccgcccacatggcagaattggtgcatcagtacattggcactgatgatggaataatcgtcgatgacaatttcacccgccatttttgtagagttgccaatgatacagctgttgcctatcagagcatcgtgggccacgtgtacactttccatcaggagattgttgttgccgacgatggttttgcctttggcagctgtaccgcggttgacagttacgttttcacgtatgatattgttgtctccgatttcagcagtgctttcctcccctctgaactttaaatcttggggaatggcaccgataacggctcccgggaaaatggtgtttccattgccgatgcgtgcaccgtacagaatgttgacatttgccataatcttgttgttatcaccgattaccacattcttgtcaatgaaaacaaaaggagcaatctctacgttttccccgattttggcttcgggatgaatatacgctaagggacttatcatattatttacgatttagctatttacgatttacgattgagaatacttgcgatttactgtatatacgattttatccgaatgtgataattctcacgagtaatttgaatcgtaaatcgtaaatagtctaatcgtaaattttattatttgttcttaactatttgcgccataaactctgcttcgcagacaactttttcgcctacaaacacatagcctttcatggtagagatgccgcggcgtatgggggccatcagctctacacggaagatgagggtatctccaggtaccactttctggcggaatttcacaccgtcaatcttcatgaagtaggtggagtaacgttccggttcatccactgaattcagtacaagcaaacctcccgtctgtgccattgcctctatctgcaacacaccgggcattacgggttcctgcgggaagtgtccctgaaagaaaggttcgttggaagttacgttcttgacacctacaatgtagttggcacctatttctatgactttgtccaccaattgcatcgggtaacggtgaggcagaagttcgcggatgcggtttacatccataatcggttcgcggttgcagtcgtaggtaggggcttgtatttcgtgcaaacggatttccttgcgcatctggcgggcgaacttattgttgatagtgtgtcccgggcgggtagcgatgatacggcccttgatgggcttgcctatcaaggccaggtcaccgatgacatcaagtaacttgtggcgggcgcattcattgggccacaccaaaggtttgtggttgatatatcccaattgtttggcgtccatatgaggaacacccatcacgtcggccagcttgtcatagttctcctgggacatttcgcgttcgtaaataacaatcgcattgtcaaggtcgccgcccttgataagaccggcttgcagcaacggctcaatttcgcgtacaaacacgaaagtacggcttgcggcgatttcatccttgaacttcgtcatgtcctccagcgttgcaaactggttggggaggatgttggaatcgtatgataccaatacattcaagctgaagttctcgtccggcaacacgatgatggaagagccggttgtttcgtcacggaattcaattttggacttgatgatatagaaatcttttacggcattttgttctacagtgcctacgcgctctatttcgttgacataatattgggcgcttccgtccagaatgggaaattccggtccgtttacctgtatcaagcagttatcgatacccaatgcatagagggctgccataccatgctccactgtgctcacctttactccgtttttggagattacagttccacgggtagtttcggatacgttgtctgcaacggcatcgaaggtaggctgtccttccaagtcgatacgttggattttgtatccatggttatccggagcaggattgaaagtaacggttaggtcaagtcccgtatgaagaccttttccactaagcgaaaagctatcttttagagtcttttgttttaacattggttacttatttaatagttgtttaagttcattcaattctttgcggagctggcgcagttccacttgcatttccggcaaacttctttgtgcgatggatgccttgaaatattgtttcagctccataggaggggtaccgataagctggctaccgtcctttatgctactgggaacaccagactgtgcgccaaggttcactttgttgccaatatgaatatgacctgcaatgcctacctgcccgccgaacatgcaccattctcctatcttggtagaacctgctacacctacttgcgccgccattacggtgtgggagcctatttcatcattgtgtgccacctgaatcaaattatccagtttcacaccgctatgtacgatggtggctcccatagtagcacggtccacacacgtgttggcaccgatttccacatggtcttccaggatagtgatacctatttgcggtattttttcatagccctcggaagtgggggcgaagccgaaaccgtctgcaccgataacgcaaccggagtgcaggatgcagtggtttcctacccggcaatcgtggtagatggtggagttagcgtaaataatacagtcattgcccactttggcaccgctgccaatcgtgacgtgcggatgaatgaccgtattgtctcccacctctgcgtattcgccaatgcaggcaaaaggcgcaatgtaaacatccttgccaattttagctgtctcggcaacaaaggccagagagtcaattcccacccgctttggcttgctttgctcataaagatttagcaatttagcaagactttcatacgcattgtccactttaatcagggtggctttcacttcttgttccggaacaaagtccttgtttaccagaacaatgcttgattgggtttcgtatatgtagggggtatatttggggttggatagaaaggagatggctcccggtattccctcttcgattttcgcaaaggtgtgaacggtagcattctcgtctccaacaatttctccttggataaatgttgcaatttgtttagcagagaactccatgtcttattcttgttagatggtttcaaaacgcaaataacggactttttttttatatttccttgtcctgaggtgaatattttatacttatctatgcaaacgttggtagcataagtagtacttttttactttcttggacagaagagagatattgagcatatccgatgcttcggcaatattcttgatgctgccgtcgttgtagaggatgtcaatactgtcatctgcctcgtcgtacatattcttctcgatgctgggggtagagatgaaatatctcgcttcggagagagggatgttcagttgttcactgatttgcaaagttagttcttttttccgttcctcactaataggttcggtagaaatctcgactttgaagatgtttcggttaatcatgccggcgctcagggtggacaaaaccttgtccgaatggcggctccataccttgagggcagtccagatgtcattatcgtccaactgaatgaaattctccaaacattcgggattgttgtagaatgcctcccggctgatgtcgttgtatagaaagaatttcaaggcgggtgaggcaaagaggtctatgccgcggcttgccagttccttggcgcggagcagggtgctaatcagcattttctcgtaggcaacggaggttttgtgcagatagacttgccagtacatcaggcggcgggcggtgaggaagttctcaatagaatagatgcctttggactctactaccaggtggtcatcctttacatccagcatcttgataatgcgggcggagccaatgttgccttcggtcactccggtatagaagctgtcgcggcgcaggtagtccaggcggtccatatccagttgcccgcttaccagttggtgcaggaagcgcttggggtattcatccttgaaaatttgaatggcgagtgtcaactgtccgttcatttccttgttgatacgttccatcagcatcaaggagatgtcttcgtgggagacgccctgcacgatggtattttccagtacgtgggagaaggggccgtggccgatgtcgtgcatcaggatagcggcttccacagcttcggcttcgctgtcgaagataaagtttcctttggtggcaagttgctggatggcctcactcatcaggtagaaggctcccaaagagtgttggaaccgtgtatgctgcgcaccgggatatacgacagaggacaaccccagttgcttgatacggtttagacgttgcaaaagaggatgtcgtacaacatcgtacaacaacccctttggtatgttgatgaacccgaagacagggtcgttgataatctttctttcgaacattaagcgttagtcgttaatcacttttttcaactcttccgccatctgtgcctgcacttcttgggctgcttttcggctggcggcggcgaagttctctgtcttgtccacgtagatgatgccacggctggagttgacaatcaggccgcaagtcttgttcatgccatacttgcagacttcttccagggagccgccttgtgcgcctacgccgggaaccaataggaagtgttcgggaacaatcttgcggatatcttcgaaggcgcggccttgtgtggcgcctactacgtacatcatctgttcgtcactggcccactcctgggatttgcggagcactttttcgaagaggcgttcgccgttggtgtcttccgtcagctggaagtcgtgcgagcctttgttgctggtcaacgcaagcaggattacccatttgccttcgtacgtaaggaacggggtcacactgtcttcgcccatgtagggagctacggttacggaatctatatccagctcttcgaagaaggtacgggcatacatggcagaggtgttcccgatgtcaccgcgtttggcgtcggcgatgatgaattggtcgggatagttctgcttgatgtagtttacggttttctcgaaagctatccagcctttcacgcccatgctctcataaaatgccagattgggcttgtaggcgatgcagaggtcggcagtagcgtcgatgatggctttgttgaaagcgaatataggatcttcctctttcagaagatgttcgggtattttcttgatgtcggtgtcaagacctacgcaaaggaatgacttcttgcgcttgatgttctcgaataattgctgtttgttcatattattttttagttacgggttacttatcactgccttacagttcgctctctttcagtctttctgcattttccgccacaatcaggtggtcgatgcagtcttggatgtctccgtccatgaaggcggcgagattgtagatggtgtagttgatgcggtggtccgtgatgcgtccttgcggatagttgtaggtgcgtatcttggcggagcggtcgccagtactgaccatcgtcttacgcttggaggcgatgtcgtcgatgtacttctggtgttccttgtcgtagatgaaggtacgcaagcgcgagagggcgcgttccttgttcttgggctggtcgcgcgtctcggtacattcgatgaggatttcttcgactatgcctgtgttgggattcttccagttgtagcgcaggcgcacgccggattccaccttgttcacgttctgaccgccggcaccaccgcttcggaaggtgtcccacttgatttcaccttcgttgataactacgtcgaactcttcggcttcgggaagcacggctacgctggcagctgaggtgtgtacccgtccttgcgtttctgtggccggtacgcgctgcacgcggtgcacgcccgattcatatttcagtgtgccgtatacattgtcgcccgtcacggagcagacaatttccttgaaaccgccggctgcaccttcgttggcgctggatatctccattctccatcccttggattcgcagtacttggtgtacatgcggaagaggtcgccggcaaagattgccgcttcgtcaccacccgtgccgccacgaatttcgaggatggcattacggccatcctgcgggtcggcggggacgagcagcagctttatctgctcttccagttccggttggcgggtttggcaggcatccagctcttcgcgtgccatttcccgtatttcctggtctgtttcgttggcgataatttctttggcttcttctatgccgcccagtacttgcatgtactctttgcgggcattcatcaggtcgcccagttctttatattctttggtgagcttgacgtaacgcttctggtccgcaatcactgccgggtctgtaatcaaggtcgacacttcttcgaagcgggcgacaagcccttccagcttttcgagtatggtattgttgtctgccatatatttaatacttgaactctccgaattcgctcttgataatcagttctttcttgtcgctttcttccacgcggcctacaatctgtgcatcgatgttgaaactcttcgaaatagcaatcacctcttctgcatgttcgggagagaggtacacttccaggcgatgccccatattgaacaccttgtacatttcgctccagtccgtatcgctctgctccttgacggtcttgaacaacggtggaacggggaagagattgtctttgatgacacggcagttgtctcccacaaagtgcagtaccttggtttgtgcgccgcccgagcagtgtaccataccgtggatttggggacggagcgcatcgagcagcttcttaactaccggtgcgtaggtgcgggtgggggaaagtaccagctttcctgcatccagcggactgtcttcgacactgtctgtcagttttagcttgccactgtataccagctcttcgggtacagccttgtcatagctttcagggtatttctctgccaggtatttggagaatacatcgtggcgtgcgctggtcagtccgttactgcccataccgccattgtattctttctcataagtagcctttccgtaagatgccagacctacaatcacatcgcccggacggatattggcattgtctataacatctgagcgcttcatgcggcaggtcactgtcgagtctacgataatggtacgtacaaggtcgcccacatcggctgtttcgccaccggtggcataaacgcctactcccatttcgcggagttcggcaagcagttcatccgtaccgttgatgatggctgagattacttcgccggggatgagcagtttattacgtccgatggtagaggataccagaatgttgtctaccgcacccacacaaagcaggtcgtcgatgttcataatcagtgcatcttgtgcaatgcctttccacacacccaggtcgccggtttccttccagtacatataggcaagactggacttggtgcctgctccatcggcatgcataatgttgcaatactccgggtcaccgcccaaaatgtcggggataattttgcagaaagcctgcgggaaaatacctttgtcgatattcttgatggcgttgtgcacatcttcctttgatgcgctgacgcctcgcatcatgtatcgttgattactcatgagataataggtttgttcaattgaatgtgcaaagatacatctaatcttctacaacacaaagcgaggcacaaagtttctcgcctttgtgcctcgctatagagttgtgtatttatcagaattgtacctggggagcttgttccgctccttctgccgcttcgaaataagctcgtttctcaaaaccgaagagaccggcaaggatattcttggggaaacggcgaatggctgtattgaagttcttggctgcattgttgaagttggtacgtgctacgttgatacggttttccgtaccttccagctgtgcctgcagttccaggaaattctggtttgccttcaagtcgggatagttctccgtgatggcaagcaatttaccgagggcggaagtcaccgcaccttgtgctttctgatattcagccagcttttccggagtaaggtctgccgcatccactttgatttgagtggctttgctgcgggcttctactacaccttccagtgtttccttctcgtgcgtggcatatcctttcacggtattcaccaagttcggaatcaggtcggcacggcgttggtattgggtttctacgttcgaccattgtccgctgacattttcgtccatggttacgagtccgttatagccggttacaccccaaatggcgagaagagctataacaacgataatgataatggttgatttcttcatacttttcatttttaggcctcacctccgattcctctccgatagagagaggggaggaggggaaggcagttattaatcatttaattatattctatgtaaacgttttattttcttccagtatcctcgaaggtgtgtcaaaacggttgatggcacacagatgacacatcctcggcgttagaaccgggaaccggctccaccgccacctcccataccgcctccgaagctaccaccgctgaagcctcctccgccacttccgccgaagagacctccaccaccgaagatgaccggaccacctccgcctcctccccggtaattttcatcgtatgactgctggcggcgcactactttatgtccgcaattgcggcaggtgtaggtcacatcttccgttttcactccattgcggcgtgagatgagtatgctgctgctacgttgcaatttatgttgtccgcagttggggcatttgttggcagcgcgttgggcaaggatgcctataatagatgccactgcgaggaaaccgataagccccagtaggatacctcctacggagaggtcatcctcctcttccgtgtcattcaccatagtgccgtcaagacgtgaacagactgcctttacacccgctaccattccagcatcccaattaccgtctttcagatagggaatcatgtatttggtctgtatacgtttgcagatggcatcaggaaggtccccttctaaaccgtatcccgtataaaactggatgcagcgttggtcggttaccagcagaatgaccaaaccgttgtttttttcttttttccctactccccattcattgagcagctggtgtgagaaataaaaacagtcttcttgtccgatggacgggacaacggcaactaccgtttcaatgccagtttgctgctccaatgcatagagcatacggtctatattgtcacatgcctccgtggataggattccggctgggttgcacacatagcgtgtcttgtcctgaaggtgtactttaggaatattcttagtggtgtagacttcttgtgcctgcaaggataagagcaggcataagaagaatgttatggaaataaatcgtctcatactaccaatatttgttgcggcgaagataggtaaaatcacatcaatgtatgtattttcctacgaatttctttacatgttcggtgtattcctgcggataatccttgtaagacatagcatgcgtggcaccgggcacaatccataattctttgggttcgggcttggcttcgtagaggggatagaccatccacgtcggcacaaaggtgtcggcatcgccgtggatgaagagcatcggcaaagtacatttctttacttgctccaaagcagaggcttccaggaagtcccatccgtactcttgccggcagagccagtttgctgtatgcagaagagggaaggcgggcaggttgaactgtgctttcagttctccgcgaaactcgtcccatacgcttgtgtagccgcagtcttctacgaaacacttgatgaaaggctgttggtattgaccatgctccacttcgccggataccatcatggtggtggcggctcccatggagataccgtgcactaccatctctgtgctgcgggatgctacgctgtctgtatggcggcgcccgaagagttcgtcggcggtttcggtccattgcagtacgtcaagccggtctttccagcccatctgtgcatggtttccctcgctcatcccgtgcccgtagaggtcgggcagcaagatgttgaagtccatctccttgttgtacagatagcctatcatcagcatgcgcacggcattatctgtatatccgtgtacgatgactgctgtttttggggtggggtgggtggcggcaacgtagagtgcgtgtagcgtctctccatggtcgttctcaatgtagaagtccttcaatgctcctacggtcaccaaactgtctacccacggttgcagttcgggatattgctcgaacatgaagttgtaggattcggcaatgttgcgactgcgtgtgataaggccttcgggtttcagagcatgccccagcatatagtaccctccgcacagtactacggtgcagagggcagccagaccgagaatcgaatattttatggttttcttcattatttattccaaatttcccatgcagcaaaggcttgcagcagtaacatttccagaccgttcttagtgacggctccttgtgcctggcctttcttcatgaaaagggtttcgtttggattatataacaaatcatagagcaaatggttgggagtcagtagttcgtaaggaatattgggacagaaatccactttgggatacatgcctactggggtacagttgacaatcactgtgtactcttgcatgatttccggtgtcagttcttcgtatgtgaggtatttatcctctttcttggcgcgtgatacgaaggtactttttatacccaggttctccagcccgcgatatacggctttcgatgcaccgccggtacccaaaatcagggctttcttgtgttgtggttgcaaaagtggttctatggattgtgtaaatcctatgatgtcggagttgtagccaaccagtttcactttgcctttggaaaggcggataatcttaatgacattgacggcgcctatcttggctgtgtctttgtccagttcgtccaggtaggggatgacttgctccttgtaagggatagtcacattcagtccacagaggttgggattttcctcgataacttccatgaaatcctcgatacgtggaatttcgaaatttacatattctgcatcaatattttctgccttgaatttctcattgaaatatccgatagaaaaggaatgtttcaacgggtaacctattaaaccgtatttctgcataatattttagttattgattgaactatattcgtttgtttatggagtacattattggtcggaagtagttgaggaggtgattaccggttctttgatgataacaaaacctccgaattgcaatccgttatcttttccgttcaaacagaactttctgtcgaatacgggtttattttttgatttccagatcagtttgctagagaaggtgatgacgtcttgagtaccatcgttccagtctattatcactttttcgttatcgaatgtatcgtcgccattgaattctccaaaagtgagaaagtatttgccagtttcaaatttcattgtttgcagaccgttgaagtgtgcaaggtaagctttggtttggcttattggaacgtccttttcatatatttttccattatagattgccttgattccttgcttggcaatgttgccgggagtttcaggattcaacaaatcattaccttgagcatcttgtactgcgatatgcagttcgataggagcaaaatcccatatcatatcatcacttcccgaatcatcgcaagctgtgaaaccggcaacgcaaaggagggaaataaataataaatagagggtgtgtgtagctttcataaggtctcttttttatataagtttcttctttttatttagttgccacataaagtgtacatatcccgaaagtcagccgcttgaagtgcacttcgctgaagcctgccttgcggattacctcctgcatcacttctccctgcgggaaggcgcgaatactttccggtagataggtgtaggcgctgttgtctttcgaaatacatttaccgagcagggggatgacaactttggagtagatagtgaacaactgtttcatcgggaagcggtctggtgtggagagctccagtatgacgagatgtccgccggtctttagtacgcggcacatctcggacagtcccttgtccagcccttcgaagttgcggatgccgaacgctacggtcacggcgtcgaagctttcgtcggcaaacgagagggaggtgcagtcctcccggacaaatgaaatcttgtccgagaggtgcgcctgctttactttttcacgtcccacgttcatcatgccttccgagatgtcggtgccaatcaggctatcgggttgcaattcgcggcatgcaaggatggcgaaatcgcccgtgccggtagctacgtccataatacgccgggggcggaaaggacgtaggtacttgattgctttcctacgccagctgcggtcgatgcccatggatagggtgtgattcagcttgtcgtaggcaggagcgatgttgtcgaacatttcttccacttgttcgctcttcttgccgtcattaccgtagggcttgatgtgttcttggggatagtccatttactttaaatattcggttacattcttttcaatgcgttcggcgatgttgccggtatcttcttttacgaacttctcgccggtgatgtgttcgtacagttcgatgtaacgttcgctgattgaagtaacgatttcgtcggtcatttccggtacctgctgtccttccttgccttggaaaccgttgtccatcagccattcgcgtacaaactccttggagagttgcttttgcggttcgccgttggcaaaacgttcttcgtagccttcggagtagaagtagcggctggagtcgggcgtatggatttcgtccatcaggtaaatcttgccgtcgtgcttgccgaattcgtatttggtgtctaccagaatcaatccgcgttccgctgcaatctcggtaccgcgtttgaagagggccatggtgtattgctccaatacggcatattcttcgggtgtggcaagaccttgtgccaggatttcttctttggagatgtcggcatcgtgttcgccaatctcggctttagtggtcggggtgatgatgggttcagggaatttctggttttccttcatcccttcgggcaacttcacgccgcagatttcacgtacaccgctcttgtaggcacgccatgcgctgccacagaggtaaccgcgtacaatcatttctacggggaatccttcacacatcacacctaccgtcaccatcggatcgggtgtagccattttccagttggggcagatgtcggttgtggcatccaggaattttgctgcaatctggttcaacatttgtcctttgaagggaatacctttcggcaatactacgtcaaaggctgagatgcggtcggtagctaccatgaccaacttttcaccattgatgttgtacacatcacgaacttttccgtggtacacgcttttctgtccgggaaagttaaattcagttgctgttaatgctttcatctttgtaatatttacgattttgagaatttactgtttctgttcaatcttactatcggcttgttcggctttgcgtcgttcacgctccgctttcgcttccttgtcgaacttctcgtaggcctccacaatctgagttaccaacttatggcgtacgatgtctttcttgttcagctccacgaaactgatgccttttacgcctttcagaatcttcagtgcctgcaccagaccggaagtctgggaagaaggcaagtcaatctgcgtcatgtctcccgtgacaatcatcttggtgttcatgcccatgcgggtgaggaacatcttgatttgctgggtggtcgtgttctgcgcttcatccagaatgacgacggcatcgttcagtgtgcgtccgcgcataaaggcgaggggggcaatctggatgatgttcagctccatatactctttcagcttggcggcaggtatcatgtcctgcagggcgtcatagagtggttgcagatacgggtctatcttgtccttcatgtcgccgggcaggaaaccgagcttttctccggcttctacggcagggcggctgaggatgattttctttatctccttattctttagtgcccgcacggcaagcgcgatggctgtataggtctttcctgaaccggcgggaccgatggcaaacagcatgtcattcttggcaaatgcctctaccagcttcagctggttctcgctgcgcgggataatcggctttccggttacgctgaatacaatgacattgcccgatttttccgcttgcggggcattgcctttgatgatgtctataatgacctcttctttcaaagagttgtattcggcacagtatttctccagcttggtgatgttctcctcgaatgcacacatttcctcctcatcacccaatactttgatgacattaccgcgggcaacgatgcgaagcttgggatacaaggcctttatcagctgcatgttggcgttgtttacgccataaaatattaccgggtcaatatcttcaagaacaatcagtttttctatcattgatatgttttaaagttcaattcgttcttttagtgaaacgttctgcaaatgtagtgaaacgtttggatacttaaacagttccattgggtattttttttgcagtggcttcgggtagattgtcggtaattgttgcacgacgatgccgtttcctttttttgagcatccgatacgttgtcggttcagcgtctgttccttcatgttgaagataatattggggtcgaagtgctgcccgttgacgcgtgtctcgaagtgcagatgctcagtagaggcgcgtccggtgcgtccggtcagtgcgatgggctgtccggctttgactgtgtcgccacaatgtacaaggtttttgaagttgtggctgtatatcgtttccagtccgaagtcatggcgtacgacgacgacattgccgtaggcgctataagacttggacatccgtactacgccgttgaaggcactccgtatggtgtctttggcgtaggtcttgatgtctatgccactgtggcgtccccgcccccgtccgtaaggggagatgacttttcctccaggcaggggaaaggagtattccgtgtccggaatgtcctccaaaggtagctctatcagttctctttgcgaaaacagtcccggagtggcaacgcggatatggttggtttccatggtggaaaagaccgttttcttcccttgtgccgtggcaccaagggctataagcaggagagggacaagaatacggattctcatttattcaaaatattgtatagtcccactggtagaggaagcatatttctccaacagttccaatatcatttcggctgcttctttcagaccttcctgcccgttgtagccgttgacaatggcaaggatatggcgggtttcaagtttcatcttggtgcgttcgtggtcgctggtcggggtaccgataccgcctatacggtcgcggtagacgggcagcccttctatgttcagcatgccgcggcctataccctcgaacaattcctcggcacgtcctatgcccagctcaaggtcggtcccttgtatctcgtcggcatcaaatccgccgatagagtggcccgtacgtagggagacaaggttgataaggtctaccaacgtatctatctgatagagttccaatccgcgcagcagtcgccgtctcagtgcttcggccgagggacggtagcggctggggtccttgccgcaacgtttgtaggcttcgcgggtggcggcaatgacgggttggtacttgatgctgtccgtggtttcacgggctcttagctcttgggtgaaagttgcgatttcttgccacaacccttcgcaatatggggtatttgtcacttcggcaaatacggctgcaccgcggaattcggggcaattctgcttgatttctttagaaagtgtgatatgatacattaatgcaatccgtttgaatgggttaacatgattcccgacaatatccttccggatttgatacccatccggcgtgccgagaaaaactcttcatattgggtaaaagtacatatattggctgtctccacttgtgcggaaggtactccgaagtccagtagttgcagtcggttggcagcccataggtcgatatggtatttgtgggtggcgggtttccattcggagatgtaatccatctggaaaccgttcttgcggaatgcttcatagacttcgtagcctacctcgaaggcggaaagggagatgccggggccgatgcaggctatcacttctttgccctctgtgccatagcgggcacgcatcttgtcgagtgtgtggccgaggatgtaattcacagtgccgcgccatccggcatgaacagcggctatcacggcattcttccggtcgtagagcaggatgggaatgcagtctgccgtagagatgcagatgcagcagcccggttcacgggttatcagtgcatcaatgccctgcaacatggagtggcgttcttctgctgttgcatgcagataagttccgtcaatgacaagtgcctttgtcccgtgggtctgaaacgggatgaccagttcttgggggcgttggggcagggaagaacatactatttcctggttgcggcgtacagcttcggcttcgtctcccgtgtaaggtgtacagttgagggaggcatagttaccttggctgcatccaccgtggcgggtggttacaaaacaagaaatgccgggatatgaggcaagcagctcatatcccaacattttcctatcttctgtaagaggaatcattttttatcttcctcccaatcttcttcgtattcaaagtcctcgaggtcctctatgtcctcgtcgtcgttgacgtattcatagctgaggtcctcgtcctcaccctcttctttcaattcttcctgcaggtggctgaggtctttggcgcgatgggcaatgctgtccactttgccttctatcttattactttccttgttcagctcttcccaaaggatgtctttcagcgtagagatgcccatgccggagacagcagagatgaatatatgcggaatcccttcgggcagtgtcggctctatctcgtccatcagttcctggtcgagcatgtcgcatttggtgacggcaagcactctctgtttgtccagcatttcggggttgaaagtgcgaagctcgttcaacaggatttcgtattccttacggatgtcgtcactgtcggcaggcaccatgaacagcaacaatgagttgcgctcgatgtggcgcaggaaacgcaatcctaagcctttgccggcactggctccttcgatgatgccgggaatgtccgccatcacaaacgatttgctgtcgcgataggacacgatgcccagattgggttccagcgttgtaaacggataattggcgattttgggcttcgccgcagaaacggatgccagtaaagtggattttcctgcattggggaaacctaccagaccgacgtctgccagcagcttcagttccatgattaccgtcaactcctgcatcggttcgcccggttgtgcaaagcggggagcctggcgtgtggcggttttgaagtgccagttacccagacctccgcgtccgcctttcagcaagatgacttcttgttcgtgctcggtgacgtcgcagatatattcacccgtttcggcgttgtacaccaccgtgccgcagggcacttcaatcaccttgtccgctccgtcttttccgaaactgcggtttttggaaccggattctccgtgacctgccaggatgtggcgatcgtacttcagatggagtagcgtccagtagttgcggttaccccgcaggatgacatggcctcctcgtcctccgtcacctccgtcggggcctccgttgggtatgtatttctcacgccgcatatgcgtagaacctcgtccgccctttccggagcggcaatatatttttacgtagtcaacaaaattcgattcagccatattctgttttattgttatttcactgcgtcaatagccttgcaaacatcggcaaagatttcttccaatacgccgaagccctggatgtgttggtatttgccgtcctgcttgtaccagtcaatcagcggagctgtctgtgagtggtaaaccaccagacgcttcttgattgtctcttcattgtcgtctgcacgtcctgattcttgtccgcgcttgatgaggcgcttcatcagttcttcttcgggcacgtcgaggtcgagcatcacgctgacttcctgtccgcgttcggcgagcatcttctttaatgcttcagcctgggcgattgttctggggaagccgtcgaaaatcacgcctttgctatccttgaagctgtcgaatacgcttgccagaatatcaatcatcaactcatcggggatcaactggccctggtcgatataacctttagcagtcttgcccagttctgtaccgtttttcatttcagcacggagcacgtctccggtagagatgtggttgatgccatacttttctacaatcttttcactttgtgttcccttacctgaaccgggagcaccaaaaattacaatgttcaacatttgcttagttattatttaatgatttactatattatgtctgtatcagtctactacagtataaatgtcgggatagttgcgcccgaagccgtcataatccaacccgtagcccacgatgaagtcgttcggaatattcatggccacatattctatgtttaaatcaactttcagcttatcaggtttcaccagtagggaggcaatatgaatctccctgggaccgcgagtgccgagggtgtccagtaagcgttgcatggtgagtcccgtatctactatgtcctctacaatgaccactgtacggtctgtgaggtcttcattgatgcctattacttccttaattaccccggtagaggatactccttgataagatgccaatttgacaaacgaaatttcgcagggaatcgtgattcgtttcagcaaatcggcggtaaacatgaacgaaccgttcagtacgctgaggaatagaggattctttcctgccaggtcgcggttgatttcgttcgctacacgggttacttctttcagtatgtcctgctccttgatggagactgtgaacatcttgtcttttatttgtatggtatccatagatgggatgtttttagaaagttgccgcaaaaatacgatatttgttcgaaagtgaaaagttttgttctggtatattctcaaagggctataaattaatcggtttcgtcacttagtgctttaaaagaacgggattaaagaacgtaaaaaaagaacgaacttaaagaaccgccttatgaatgcacagtttttcatcaacgagatcggatgcaaattcaaccttagaaaacccaagtccgaaaagccgacgaacgtttattttgtagcacgcgtcaggaacaagcagataaaactttctactggagtaagggtatatccggaccagtggaacgtcaagaaacaggaggcttatatcagttgccggttaactgagctggataacgagaacaataccatcgtcaatgaaaagattggcaaactgaaactttatttttcggaatacaagcagtacctttgcgaccaccctgaggagatagaacgcagggccatcattttacttaaacaatatatctataaggatactatgaagaaaaaaacggagaaaccagctaccttcatcatgaaacagatcgtagaggagaaggatatcgtggatagttccaaaatccagtaccgatccaatatcaacaagttcaaacggtttctggacgagaactccatacccgacatttgggaaagtatgaacctggatacattcaccaaataccagcaacacttgattgaagagggtaaggaggacaataaggaaggtaagaaagcttctaccataaagaatattatcaaaggtacattctttggggtgcttagagaggtttccaaacgacttgacattcctttcaagtgggaagagagtaatcttgaaagctttgaccttgtgaaagacaaatccaacaaggaactggcgcgtaataaggaagtagcactgacagaagagcagattaaacaactctatgagtaccaaccgagcggtaccgagaatcaaatcaaaaagaaaacggagataaaggacttgttcgtacttcagtgtctagttggtcagcgtatcagtgacatgtataagttcttcaacggtgataacgagagggatgaggagaacggtacaatatctatcgtccagcagaaaaccggtgccagggctatcattcctctagtgccattagcagaagaaatcatagacaagtataccggtgcagaaatcaaatattataaggagagacgttccgcattgaatggtgagttaaaagtcatagcccaggaagcaggccttaacgaacttgtgacctatgaggagaacggcaccaaatataccaagcccctctatgaactgcttcacacccattctgcacggcacacattttctactatcatgtgtcgcaagggcattccaagagaggatataattattgcgacaggccatgaagatacccagatgttggataagatatacgcccacctaaccgccaaggacaagtccaggaaggtgacgaatgctttcaaaaagaagctaggtgacggcattttcgatatgggagtccagccagaaccggatgaaaatgaacagaagtcagttccgaccgctccagtcaagcccaagcagaaggcagacgtattcaaccacgtctttgccggtgatctgctgctgaaactctccaggctgaagaataaaggtatagacatcacaaaactccccgacactgaggaagccgtgaaaatactcaaggacgtcggcaggatagatgagatagacaaggataaatacaaggacaatacacgattgcgtgacaaggtagccaggattgcctccgtcgtatggttcatcgcattcaaacggaatgacgcggtactgatacagatgttccagaacaatatcacggagctgggccttaggaacatctttctcaacggggagattatgagggaggtcaggctcgaatccctgatgaacggtgatgaaaaggtcctgaaattcgtggagatactaaacctcaggaatgcagaggagctggaggagtataggaaacggaacaggggtgagtgaatgtaacttgtgcatgaccgttggaatcgtcatgccagggtggaaagacattggcactcaatccgttcgagtggttctttaaggaaacaatattccttcctggaattcagtcatttacctgtattgaaaaaaatcctccaaaaactttgttttccaaatgacattccttacttttgcgcccccttatccggggagggaggcaaccggacaaggggtatgatggcacgcctccgcaatgtcaacccttaaacataaagaaactatgaaaaaaaacgagactgaaaatcagggaaatgggatcatggacaagatggaacagatcctgaaaaagatagaggatgaaagaaccgtatcacttgaggaacttaagtcagccggattcatactggctgctaataagagttttggaagggtgataaacaaaacccacctgaaggaactgaaatgcagcctgaaaaagtacggctgtatagaacccgtctccatattctttggagcggaatattttgaagcttatcctgaacgtgaactgactgacctcaacgacggagataaaaaatataccaaggactctcccgaagttcccgaggttatctttgttgcggacggactttacaggatacaggcacatctcgaacttctttcagaggatgaaacctataaacaccccctgaagttcagacacgtggagagtggccttcctatagacgactggatacgtataagaaataccaacaaccgtaactgggactcgaaggactactcacgttacatagctgcccagacaggttatgaaaagagcaatctcaccaccgccgtcaagtggcaggaggaactgaagctgggtgagaaatacgcgtacaccatccttaacctttccgacacctataagaaaaaaatgctgtcggagtatatagaagcccccgacaagggactccccatggttctgaaaggtgtggaggagaacatagaccgtggcgagcgtatccttcatgccttcagggtgtgctggtgtagctaacacttgaaaagagacccgggtagcatttgaaacgtgtaccacccgataggttttgcaaagttaattaaatttgtttatttatcatatcttgtgtttctttcattctgtacgattttcccgtcatgttcagtagaatcgccttgtgcgttagcctgtctaccattgctgtaactagtactttgtctgcaataatctcgtcccatctgttgaatgcgagatttgttgtaatgacggttgttttcttgtcagttctgagtgacagatggttgaacaacatctccgctcccgccttgtcacaagaaacgtatccgaactcgtcgcagatgaccatgtcgtatcgttcgaacttgttctcgagtgcccttagtgtcattgcgttccggcattcccttatctgcgtaagcagtctgggcacggaagtgaacagtacggagtatcccgcgttacaggccgcaatccccaaggctgtagccagatgggtctttccggtaccgggattcccgtatagtataaggttgcgcccttccttgatgaaatcaagtgtctcaaggtttggcaaggccttccgcgcttctggcggaagcgcgtccgtgtctatttcgttgaggtatcgcaactgtgggaacgcggcatttttgatgcgatgccgacgctggttctccgagcggttttctttttcctgacgcaggagttcggccgtgaacatccacaggttccatcgttcatcaagtccttgctgtataagcaggtcgatgtcgcgtcgtaccagagggagtttgaggtcgaaggcatacgcacgtatccgttcgcgtatggagtcttgattttcgttttgttccattgctatgcaatttttatgttgttagacggtaactttgtttacaggttgttgtgtggcgccacatccgatcatcgccgaaagtgtgtccaatgtctgtgaggccgattcttcaatggcggtctgttgtggatcggacggggtcagggtggctgcgtcttgacggacgtttgcggttccattgccgtcactggccagcatctcggcgctcaattgttcggaagacaggcgtttgagtccccgggaggacagacggtctgccgcagccagtatgtcggcataagtgcgctggttgtcacgggtaaacacgagcagttcgacaaacgatctgggagaatccgtaaaatgtttgcgaaacagtgccgccacgtccgggtgtacctgtcgcatggccgtggatcgtcccaacgccgcaggcttgcgaaggaacgtgcccagatagtgcatcaggtcgatacaccagtcaccgagacgccgggagcgtacatacgtggctaccttgtcgcgaccgtcaagcacgacaatacgctcggaatacatctttatgggtacctcccgaccgacaagccggtcaggcacagagtaatgcacaccatcgacggtaatggtggaatacttcccgacacgggcatgccgctgctcaaagcagcccatgtcaccgtggtcaagcggccgcaaagccgcaatatcggcctgtacgcgctccttcttctcttgcgcagacatgttggaagcctccccgttgagcctgtcacagaccttgtcaagatgacactgcgcctgctccagcgaaccgaaacggacatcataggcgaaagcccgccggcggatatgttccaccgaacgctccaccttacctttctcccatcccgaacgcggattacagaaatgaggggtgaaacaatagtggagttccatgcggcgcagggcatcggtatgttcgcgctcctgtccaaggaacttcttgacggccacccgcatgttatcgtaggccattacttgcggcgtgccccccaaagcacggaagcagttgcggtgtgcttccatcagggccaacgtgtcctcgcgggagaacaggtatgcccgccgcaggttgctatggttcatcgtgaacacggccatgtgcagcttcgtcttgacaccggcaatccaaagtgtcagcacgccccagtcaaactcgcaccggaaccccggttcatactcctggcggatgaacgccgccggggacttggctggagcggacaccgccacttccaatgcacggacatactggcataccgtcgaataggcaatctctatgccttgatcgcgcaaccggcgccacatgtcaatcttgcgcatctgctgcttgcgcaatccggccgcggcattagaccggttgcgggccatgaagccgtctatcgcctccatcacctgctggttcatcactctgcggacacgtttgctgctgtcatagcgcaccggctgctgcaggtacgtgtccattgcttccgcatcggggttgtcaccgaccgcttgttcgaaagcccggagatacttgcgtacagtcttgcggctcatgccgttacgacgggcgatctcacggatgctcaatccgtcacgcctataggcgagaattatggaatctctttcttccatgtggtacatattatgaacgccattggtttttatgaatataccaattttgttcggttaaacatacccatgggtggggcactttttaaatgttgttccgggtcccttttcaagtgttagctacaatacacttcttgcagcaatagtatttctccgtcacttccgaacacatggcgtcatcttccagaatatccgtcccgcactcatcacagcagacacaatcgttttcatggtgatattcctgttttgattctatccatacaaaatcatccaggttttcagaatccacccggatttcccttccgttccggtaacagagccttgtatcatcacaatagtattggtggtaatcgtcccactctccatcatcttcatcatcatcggtatcaccacaaaggttcaggtctgtggtatcaagagtatatgaaaaattacagttctcgtagttataggctttattccgactgtaactataccatttgaaagaatcctgataggaaagcgtgtcttcttcatccaggtcacagtctatctcgaacatcttgtcagacaaagaattaccttctgtatcaacgaatgcgttcgcctcatggcaggatgcaccgactattttataaccgtctatatgcttctcctgaataagtttgtcaatcagtaaccgtttcaacacgtcatcaccacctgaggagtattgcctttcaagcagcctccatttcttgccgtcctggtctgtaacatcggtaaaaagaatggctctggctacaataagtccggttttgtccgttatataagcagctttggcttttactgaatcacgatagaatgcagtacggtctctatccaccatgcaggaatcgaagttacctttgcagtggctgcttttatagattctccaaaatccatcgttgacatgcagttctatatcaggagtataaccataggtataagtacaccattgctgggtgaaaacatctcctgcaatccagtttactacacagggagaaataagtttccctatccctgtttcaagtataagctccctcatgaactttccggccctcatcttgaagactcggttacgttcaatgttgacatagcggaccgaacttttatccagatcctcacacaggcctttggcttcgtcagtcctatatttggaagagtagtatgtcctgcctatcagttccacttcataaggcagcttttcatcatcctctcctgatttcaagacggcttcaaccactttcttctgcagggcagccatatcatatatatgtagcagggtatagtcgtcatgttccctgcaatatctgagcaatgcaggatttttcaggtggctcagcagtatcttgttctttcttgccaccgtgtcattgtctctcttctcaagtccgaaacgggccttgaattcttcataaccataaaaattatagtataacatagtcgtttgattttttaattgtcggtaaataaaaaaggagggatacttccttttgatcggaaatatccctccccggaatattatctcggtatgtctcaaccgtttcagatgaatggtatcgtctcgtcttccagaactcccgattccactatcttcttacaaatctcatgcgaagctttgttcctcaggtcatatctgtaaccttcacttcccataatcttaatcacttcaaccatacttctgaacaaagtctgttgtagggtcctgtggaatgtggtaactgccgaagcgaaccttttctcattccacccatagtcgttcagggcatgttcaagttcttttgcagccttgaattccctgctgttttccagttcatgtctttccataatattcattattgttcatatattattcctattgcaatgatttagaataagcacctttcttacattcatctatacgtgactgacattcctccgttacttcctttagaatctcagcacatcttttatcagaacagccttgcagcaatctgtctatgtatgtcataatatcattcacttccatatcatatatctgtcaaagggttcaacaaaaaagggagaaggaccatatttgttatatttaatttagatctttctcccttgtgagttaatttcttttcaagtctaactcaaaaaacatccatagttctcagcatcctcaccgtttaaagcttttttgatacccacagcgaagtcggtacagttctgatttcgctccaggaatttgtcaatataggattgtttggcggcgtcattgagtagctgcatcaaatcccaacaagtaatattatccctgccacgtaacccgaaattagggttttctatatagcctttcgtagctgcgtttacattggaatcacccaggattaccttcggcagttctctgagttgtgaagcgggtaaagcttggtacaatctcagtctgcctataatctggcagaactgttcttgtgaaatctttgttcttcccaggttttcaagaagtctcaaattttgctccggtttgaaatcctggaatagtctgagtgctgaactataaatatctgcatcactcattacttccagtcgtccggtcaagccatcgttggtcagcatcagatttgaacacacacgaaccctccacccgataaagatcttgaatttctcgggtgattttcgggcgtataagttttcctcgttcaggcttcttacacctccgatacataaatgtacttcctcgccgttcatcattctgctcatggaacggatatgaaaacagaaagccattctctggtagtagatggtctcgtcctccggtttaagttcctccttccttttggtcaatgcactcggcactctgcccaggattttatgtgatactctgatttctgtgtttccaaagttctctccggtaaaatacattcttgcggcatcttctacctggtggataaatttctggtggctgattgttagctggttgtctccgaagctgggtacaatacagttcctttcaagttcttcaagtgtaatgcccgaagtgttactctcaataaaattaggatgctctttctgttcttcttcagatacgattacagcatcttcgatattaactgcatccatcattcttgttaccattccgattgttcttggaatgacagtaagttcattagtcattgtttccatactcttgttattttttagtcggttaataaaatgcggtgaaaaaacaaaaagccaagaggtgtcatttctttgcttttatgaatatacctcttagcttctttattcctttgagtattgaagttgctacctccaataccgttattatcacgtccgctttcttgtcataatccattcacagacgtactatcagttttcagtcgcagcattaacggccttgacttcacccgtggcaatcttcttttttccgaatttgccaccatacttttctgcaagctctattactactgaacctgccacgataatctcggccacataagctgcgaccttcaatcctttaattaaatttcccatgtctcttagttttaaattgttagttattatgtttctattctctatttttctcatatataaggctttgaggggaaatcaaggaagggggagaagaaaaaaatagaccggtctttcgactggttgtgacagttgaaccgttgtaaacagctcctcgcatttacttggcctgtcatgcggcatacattctttcgtggggaactttatgtcttgtccacatactggaattgctacgcatcatcgaatcgccatcttatccatcgtctgaaaataagagtgacccggtaattgtttttatcattaatgcttgaagccgtacgcactcttcattacagtgctgaataatactccaagctattttatcatatataagagtttgagggctttggaaatggagagaaaaaataataccctgccaagttcaaaaaatggcaggataaaatgtctttggataaaaaagaatccctatctttgtggtgttctacttaaagcatataagtacgaaaaaagagaaatttagttcttaaattcttgattttcagtatgtaaatcaaacatacgatttttattccactccatgcatcatcttctgtaatttctttgaaagcaggaagaggataagcgatgccgtggcagacatgacgacgaacaccatgaagaaatcgtacattgtctcgatgcgataacccagcagcgtctttacctttccggcttcggggtagagcccgctcagcgtgcctgcaaacttattggcagtggcggtggagaggtaccatatccccatcatcagcgaggcgaagcggatgggcgtgagcttgttcaccatggagagtccgatgggcgagaggcagatttcgcccatggtatggatgaagtagagccccgtcagccaaatgagactcaccttgatgcccggctgaacatctttcaccccaaagcagatgacgagatagcccagtgaaagcagtagcaggccgatggcttgcttggtgggcgaggcgggctccatgccccgtttgcccagggcgccccatacgcccggcatgatggcggcaagtatcaccacaaagaaggggttgaaggactgaatccaggaggcgggcatttcccaccccaggatgacgcggtcggtctgctcggaggcgaaaagcgtgagcgaggcgcctgcctgctcgtaggccgcccagaagaaaatgacgaagaaggcgatgatgtagatgacgaagatgcggtcgcgctccgtcttggtgagtgagccttccagcaggatgctgacgggaaacacgatgcaggcggtgaagatgccgatgcttatccaatcgctcccgaaacaccagtagaagaaaccggcaagcgcgatggcaagcagggcgagcagcaggtagttgcgcatgggccgtccgttggcgtgggcactcttccgggcggtgttgtctgcctggggccgctccttgcgggcgtcggggataatgccgaggggcttgccatcggggccgatgaggtacttgtttttctgggtttcgaagaggacgaccgtcagcacggtgacgatggcggcaatgaggaagccccatcggaagtcgtgagggttgcccgtctcgccaaaatagccgcagaccagcggggcgaggaaggaacccacgttgacacccatatagaagatggtgtaggcggaatccagccgtttgtcacccggctcgtagagctgccccaccagggaggagacggtgggcttgaagcagccgttgcccaatatcaggaaagtcagtccgccgtacatcagccaatgcgaaagctcacgcgcctccagcatcgaggcactggcaaacatcaggaactggccgactgccatcatcatggccccccagaagacggaacggcggatgccccagtatttgtcggcgatgtagccgccgattaagggtgtcaggtacaccagtccggtgtagctgccgtagatggaggcggcgtgctccttgtcgaaaaggagtgcctgggtgaggaacagaatgaagatggcacgcatgccgtagtagctgaaacgctctgccgtgctggtggcgaagataaggtaaagacctttcgggtgtcgggatgtactcattgaatatgcttttattgttttggcttttattatatgttgagggtacaaaattagtcattattttgcgtaagttaatgggtataattagaaacttgccgacaagcctgcgggaacttgccgacaagcttgtgcaaacttatccgtaagcctacgcaaacttaaaacagaatttctgtttctgtaaataaagcttttgtttatagaaatagagcttttgtttctaagaataaaggctttgttctaagaatcctttgcattgaagacaacttttccttacggagcagatattttttcccggggggcaaagcaacttgataaaaaacgtcttctctttgtacagttgaaatcaaagccctatctttgctctacgattttaagataatcctattatgaagatatttcctactacaagcatcaagcaactggatgcagataccatagagaatgaaccgattgcctccatcgacttgatggaacgtgcctcacgcgcattggcccgtgccattgccgagcgttgggagccggacacgccgctcaccgtttttgccggaccggggaacaacggtggcgatgcgcttgccctggcgcgactgctggccgggaagggctaccggctcgaggtgtatctcttcaatacgaaagggacgctttcgccggactgcgagacgaacaaggagcggctggccgacgtgccgggtgtggacttccacgaagtgaccacccagtttgtacctcccgtgctgacggcagaccatgtggtgatagacggtctcttcggcagcggtttgaacaaggctctgagcggcggttttgcagccgtagtgaagtacatcaacgcttcgcccgccacggtggtgtccatcgatatcccatcgggactgatgggtgaggacaatacctacaacgtacatacgaatatcgtccgtgcccatctgacgctgagcctgcaattgccgaaactggcatttctctttgccgagaacgagccgtatgtgggcgaatggcagttactggacatcggactcagcgaggatgtcatccatgacatggaaacggacttctgcctgctggagcatgaagatgtgtctgccctgctgaagccgcgcagccggtttgcccataaggggaacttcggccgtgcactgctgatagccggttcgcagggaatggcgggagcttcggtgctggctgcgcgtgcttgtctgcgttcgggggtggggctgctgacggtgcatgtgccgttctgcaacaacttcattgtgcagacttccgtgcccgaagccatgacggagctggacatcagcgacacctgctttgccgccgctactgatacggacgattaccaggccgtggcgataggtccgggactgggaaaggcggcagagaccgaggcggctctgctggagcagatagagatatgccagactccgatggtggtggatgctgatgccctgaacttgctgggcgagaagcgtaactatatagggcgtctgcccaaagggagtattctgactccgcaccccaaggaactggagcgtcttgtaggcaaatgccagaattcgtacgaacgcctgatgaaggctcgcgagctggcgaagagcgccggagtgcatatcatcttgaaaggcgcttattctgccattgtcactcctgccgggaaatgttttttcaaccctaccggcaatccgggtatggcaacgggaggcagcggtgatgtgctgacgggagtggtgcttgccttgcttgcccaaggctatgagccggagaaggctgcctgcctggccacgtatgtgcacggactggcgggagatgttgcctgcaagaagcagggggcagtggggatgacggtgggggatatagttgcctgcctgccgctagcgtggaagatgctggaagaataaggagagaagtgtaatttggatggcttgtcatgtcaacagaaataagatattttgaaaacagaaaagattggcggaagtggctggctgacaattttgatactgccgatggagtctggtttgtgtttcctactaaatcttcaagcgagaaaagtattgtatataatgacgctgttgaagaggccctttgtttcgggtggattgacagcacgataaagtcacttgacaaagaacataaaattcagcgtttcacgcccaggaatcctaaaagtacctattcgcaagccaacaaagaaaggttgaaatggttgctggagcataaaatgatacatcttgaatttgaggataaaatacgaactgtcttgtcggttccttttgtttttccaaatgatataatcgacagattgaaagaggatgaaagaatatggaagaattatcagagtttctctgacccctataaacgtatccgaatcgcatacattgaagcggcgaggaaacgaccggaagaatttgaaaggcgattaaataactttatctgtaaaacgaaagagaacaaaataataatagggtttggcgggattgaaaaatactattaacgctaattcttttccgcttatttctctcttgtcgtaatgtggaagcatccttgcttcaactcgtacttgatgtagcatttatcggctttccgcaggtcacggagcacttccgaaagaaccagttttaaggtatctgcgctgacatcctgcaaaggacgtccatcctcgtcttctattttctgaaagcgcttccaactgacatcgaatgtcgttccgtaaaaatgtgccgagtttggagaagcattgccgttacggcggcgcaggcgttttacgtcgtcttgggtgcgaagtacggaagtcacaattatcttgtttggattcagtcctttggcggtcagtgaatcaaggaagttgtgtccgatggtatccagtaggctggcggcgcccggaatgagaaaagggatggaatgcgtcagtgaatccacggcatagagctcgttcgtcgtgataggttgcagttgctccttcatcttttctgcttcctcgcgggaggaaagcacacgtatgccgatggcttgggctacattgagatgtttctcattcaagtctccgaacgagcgcttgtagctgacaacaccccgaatgttgcgcggttcgttcaacttgagcgacatgtctttcttcttgcagccggcaaaggtgaatgttgcggcagctgcgacaattatcagtataggtaggattctggaagaatatctcatcttataaatgtactatgtctgtgaaaaatctgcgttaatctgtgtaatctgtggtgaaaaccttgcaaagataattcaaaccttcttaagtttgcactatctgtgctgaaaaagcgaatataggctgcaccttaacataactttttcatgcgagcatgaaagttctgtattcggtttgcactatctttgcacacaaaaaagaccgtgcaacgatattttatatacctggcttatgatggcaccgcttatcacggctggcaaatccagccgaatggagtgagtgtgcaggagtgtttgatgaaggcgctgagtaccttgctgcgtcgtgaggtggaagtcgtgggagcggggcgtaccgatgccggggtgcatgcctcactgatggtagctcactttgacagtgattctcctctggacactgtttttatgacggataagctgaatcgtctgcttcctcccgatatttccgtataccgcttgcgggccgtgaagtccgatgcacatgcccgctttgatgctacggcgcgtatgtataaatattatgtcactaccgccaagtctcctttcaaccgccaatatcgctgccgtctgttccaaacgccggactttgagcggatgaatgaggctgcccaaaccttgtttgactatacggactttaccagcttcagcaaactccatacggatgtcaaaaccaataattgcaagattatgcatgccgcctggacccgggtagacgatgtgacttgggtattcaccatccaggccgaccggttcctgcggaacatggtacgtgccattgtcggcactctgctcgaagtgggtcgcggaaaactttctgttgaaggtttccgacgcgtcgtcgaacagaaggaccgttgccaggcaggaacttccgttcccggaaatgcattgtttctggtggacgtagcctatccggaaactacttttttagaataaaagagggatgtactacaaaaacgtaggcccctccctttaatttttaattgactctatgtggttattacttgctttcctctctgctgccttattgggattttacgatgtcttcaagaagaagtcgcttcgtgacaatgccgtactgccggtgcttttcctgaacacgctgttctcgagcctgatatttcttcctttcattctggtatctgcctttgcgccgtcggtgttgggaggtacgatgtttgatgttcccgtggtggggtgggaggtgcataagttcattattgtcaagtcgtttatcgtgctctcttcctggatattcggttatttcgggatgaagcatctgccgctgaccatcgtgggaccgattaatgcgacgcgtcccgtaatggtgcttgtaggtgccatggttgtgtttggcgaacgcttgaacctttatcaatggattggcgtgctgcttgccatagtgtccttcttcatgctgagccgttcgggcaagaaagagggaatcgacttcaagcataacaaatggattcttttcatcgtgctggctgccgttgccggagctgtcagcgggctgtatgacaaatatctgatgaagcagctcaacccgatgctggtgcagtcgtggtataatgtctaccaagtctttatcatgtgccccatcatcctgctgttgtggtatcccaagcgaaaagaaagtaccccgtttcgttgggactggaccattatctgtatctccattttcctttgtgcggcagactttgtctatttttatgccctgagctatgaggactccatgatttccatcgtttcgatggtgcgtcgtggaagcgttgttgtttccttccttttcggtgcgcttttcttccgtgaaaagaatttaaaaagcaaggctgtcgacctcattttggtgttgattggaatgttcttcctatatttggggagtaaataaacaagagatatatggcagaagacctatatataaatgctggtagcaagacagagaaatatcgcgctttgcttcctcaactgaaaaatctgctggcaggtgaagatgacttgatagccaatctggcgaatgtttcggcggcgctgaaagagactttccatttcttttgggtaggcttctatttggtgaagggtgaagaattggtgttaggacctttccagggaccgatagcttgtacgcgcatcaggaaaggccgcggtgtttgcggcgcggcatgggatagagccgagacgttggttgtgcccgatgtggatgcatttcccggacatatagcctgcagctcgctgtcgcgttcggagatcgtggttccgctgaagcgtgaggacggtgaagtgtggggagtattggatattgacagtgacgatttgggcggttttgatgaaacagatgcccgtttccttgaagaaatgattaaaatgttatgataagaaaactgagtgcttttttgattttggctttcatcggatgggggtatttgcaggcccaggaagccaagacgtgttttaagaatatgccggattctatatgtccgttgcttagcgccgtgaaccgtgcggattttatagactttctggaaagtaagatgaaagctgaggtgaccaacagctttggtggtaaatcggaaatgacggagctttctccagactatatacatgtgaagatgacgccccagagttcatggcagatgaagctcttgcctattaacgacagtacgaaggtgatttgtgtggttgctacggtttgtgctccggcttgcgacagccatgtcaagttctatacgacagactggaaggagctggttgcttcgtcctacctgccggcattgcccgttctggatgattttatcgctgaggcctcggatacagtggatgtctatgagtatcaggatgcccgtcgccaggccgacatgctgctgatgaaagcggacctttctgcgaaggacgccacgttggcattcacttttaccacgaccgattacatgggtaaagaagcggcggagaaactgaaaccgtttgtccgccgtcctattgtttatacttggaatcaagggaagttcgagaaatcctctacttcactttgattctgtcgaatccctctccatagactccgatgactgcactttgtgatacaaaggcattggggtctatgtcttttatgagccggaaaatgatggtggactcccgcttcttggccagcacgaacagcatttttatctcttttcccgtatagaagcccgaggcgttgatgactgttgcacctctgtggggatatacctggatgtgcttggctatctcctcatatttatcgctgataataaagaattgtacggactggcgggcactgttcaccacttggtcgagcacgaagctgcatatgtatagagtaacgtagccatacaccaccttttcccaatcttttagaacaaagtaactggacgagatgatgataaggtcacatatcaacatgactctgcccagcgtgatgtcacggtatttgttgattacggcggcaatgatgtccgtgccgccagtactgccgttgttggaaaaggcgatgccgatgccgctaccgcagaaggaggcaccgatgacacaagccatgaaaggctggtcgtgcaggaggacaacaccctcggtcagtttctggataatggaaaggaaaaaggtcagggtgaatacggcaaagattgtctttacgctgaacttccatcccaacacacgtagggcaagcaatagaagcagaaaattgatggcgaagtacgtatattggacgggaaatccagtggcaaaatatacgatggatgcaatgcccggtacgccaccggtagtaatatcgttgggaagcaggaagactgtccagccgataccatataagaccatacccagggcaatcatcagataatcccgcagttcgcgcatggtgttctgtcgggagggaatatttactattgttttcattataattttatgtggttgtgaaaatgcggggacaaagatactgcttatttgggatataatgttgaaaaaaaaatgcagatttttgcaaccaaacttcatctttctgcgtctaataaataaaaagaggagattatgaatatgaaaatgaatttttccatggacgagattcgtcttaaagtagaagagtatataaagaaaggtggtcgggcagccggtcgtccagtactgacggcttattatgtgatgactgcagactctactccggagagtgaaaggacaaatatcatgattgctttggtggccattgtatttcctaccagtatagaagaccttttgggacaagtctttatggtagggaagggatttgccgcagtttatgcttataagaaagtgaagaaatacatcactccacagataaaagacaaggttgaagctaaattggatgagtggttccatgagaatgtgacggaggtggtggagccactttatctggaatgataatgcaccacagattacacagatttgcacagataaaaatccttgagataataaatctgtgtaatctgtggtggtccctttaccgtttcttgctcaagaagcgtctggccagatatttccgtaccggttcatcatagaatttcaggcatagataggctaacaatatattccatgcataaacgcataaggcaacctgccaagtctgctccaacgtgaagagctggttcttgatgagccatgcatagaacaagtacataaatggataatgtatcacataggctggataggatatatctcccaggaacttgcatatctgggtcgattttttatccgttgtggtaccggaagctcctaaccagacgagaaccggaaaagcgatgattacacagaacgcttcataaatgccatttgtacaaaccggcgccgtaccttccagatagggcactgagaacaaggtaatcaatgcaatggtgcatatccagaaagcgcctttcaccttaatgggcttgaagttgcgcgataaaagcatacccatggagaaagggaaaagcatcctcaataatcctccgataaagtttattccgtccagtgtccaacctactcccatattgccatatccggagacatcgaagatggcgaatgatgccaatgctattcccagcaatattgtcagtacggtcagtgctttgtttgacaatcgtcggatgaacaaggcataaaggatgttgcctatatactcaaagaacaatgaccagcaaggaccattcaagggaaacatttcgccattaccacggacttcatagcctgctcccggcattgcgggaataaagaatatggagcagagaagggacagcataatcattgatagggcaatatgtgttccgtcccattgtatgcatccttgaatgcagaaggtgatggcgcccaaaacagcgcccataattaccatcggatgaagacgtatcagacgtctcttgaaaaaactcttcattgtgaggttcctgccccaacggtcgtcataagcatacccgataacgaatcccgatagtataaagaagaaatctacagctaaatagccgtggttgaaggtttcgataatgctaccaccggcaaaagcatagccttcgaatatatgataccatataaccatcaaggctgctacgccacggagcccgtcgagaaggtcataatgtgctttggtgtctgaaaaggcagaagatgaaatgtgcgacatctgttttttttctgttgtttggttaatgttttcggatctcaaagatacgccatgcgaagcgaagttcttttgcttaaaagcaaaaaagaacggcaatcttctatttttttgcgcgtacccggctgagagtatagatggaaatacccaggaaggctgccacatattttagcttcacccgatttatcagtctggggtaacggcggttaaattgttcataccgctctttgggaggcagttggagcctttccacaaacatatgactgagctctttgtttacgttctgatgcagtattctgccccagttggctatatcaatatatgtttcgtagagagcatttaacttgtctatgtggatgacgtagattttgcagtccgaaagagtttcaatgctttctactgacggctgctgatagtacagtgaatccattccgaaggttacatcaccttcctggctgaaccaagtggtggtatcttgtccgtcgtgatgaaatacggaacgggtgaccccttcctcaatgaaataaaccaaacggtctgtcactcctgcttgtactatataagttcctttagggtagtgtcttacctgcatattcatcagcaatgcctgaagagcttcttcggaaaccggataaatctgcctgattttatgaatgatgttgttcattggaggggagctttttattcgtttacaaacttacataattttattaactaaaactgaactttgatatacaaatgtgtgcgttgctttataagcgtttatggtatagtgggatttttcttgtaaaagagatgtttgttctttgaatattgtatctttgtagaaaacggtagcctatgaataaaatattggtaacattattggctctaatcggaggcaactgcatttcattcgcacagatggagactggaagagtttccgatacagctgaggatacattgagaatagaaaatgaaattgtcgctgttgataccggattttaccagtcagtagtccgctatgatacggtgcgctataatttgaaaatgcagagtgtttacaaaaaggcttttcaactaaagaatgatgtttttgtggaaaagatgaaagagacgtggttagatgatattctcagaaatatcttatttaaataaccatgaatttgtgctttgcgtcattcggttgacttcctggtttaactcactcggttaaaccacgctaaattcagcaccctctaaaaacaaaaatcagatagaaatcttgcgataactatctgattttcagaagagcggaagacggggctcaaacccgcgaccctcagcttggaaggctctttgataatactattcaattatttgattgttagtctgttaattacttctataaaagtcaatagaacaactattgaccaacattggtaaggtttatacaataccaatagcagcatttagtaatgctaagtttcttgtttctttctcataacaatttctattattttaaaatatcacatttgctccagaaggtagagcctaaaatagcatagttctcttcaacactcttatcaacaaagaatagttcagaataaggatgtccttcatactcaaagttgaactttatagctttacaccttctgagtttattatcactacacttaaccaccttataacccacttccctatatacacctttgaaatgataaagtttcaaaggttctggaagaataggaaaagcatcttcactttccctcatcagcttctcaacagccatttggttagcttgatattcttcttctgttgcaggatactcctctttaaagaagttcaagaaatcaggattaataaggttatgcttcattttgttgtcaagaaggaatgcaaagccaatatcttttatatgaatatacagttctttcttttgaaggcaaatattattcaatatatttttgtgcgtcaatatttccatatttaacagctttctttaagtcctttcttgcttctgattttttttgaagctttagttttgccaatcctctataataataggaattactataagcagtttctccttctgtaatagaaatagctttatccatatcttgaatacatttttcatattctcctaaatgataatatagttcacctcttgtatcccaaatgaaagatactgtattgtccaattcaatagctttattcacaagtggcaatgcctcactgtatttctgtagttttacaaactcataagctctattattatatgacatggctaaaatggttttattggagcatcccttatctatgatagtttcataatctttcatagacatttgtttattacctattatattccaacatcttgctctatgaaacatgactactccatcatattgattatccaaatataaatctaaatttttaatcgcattagaatattccttctgtttaatatgccactcagcagcagtaataaaaaacttgttagcttcaatatctttaatataattaaggcagattcccttttgatgtaataattctccccagttaaataaagttcctttaaaacgagtatttagttctatacatttatcataataataagatgctaatttgtaattaggattatttgtttccaactctgtcatagctttaacatagtactcttcaaaatctttttcagcttctttatatgcttctgttgccattaaaagaggtttagccatttcatcaaaagtcattcctctaaatttaggagtgacttgtgattttatttcaactgtagtaaacagcattattaaagtagtgactactgtcaataatggttgtaagttacatttcaacatattattaatcatgtatttgatatttattaaagtcaataatccatttattctctataaggaattgcacaccaagtactccatgaatctgtattccagtttcatcctgcacttgccttatagcctcagaagcatccaatacagaaaaggtggaagtataatctctcccttcaaaattgaatgtagcttcaatgataggagtttctttgtagtgtccctctattcccattgttctatatgctccttcaagcagtttaaactcactcttgaaatgttcatatacaaaatcaaataaggtgttatgagtagcacccgtatcaatcaaaaaacaaaggttatttgtttttcctgacatcaggataagtggtaaacctgccttttgcagaccaaatgttagtggaaattccatatgattatttgtaattatagtatatatcaatcagtctcattttgggaaatagctggttagtagaatcatatattgcatggtaaagcatttttgctgtaaccatacagttgctatcacattgtatagataagaaatcatttatttgctttggattactaacaccatcatcaataattaaataatctttttgattaatattggtcaagcatattttagacaaccctctacatacagctgcaacaacatattcagattgttggatagtgttacataaactccatttatcatgatataagatactgaaataaaataattcatccacttcttttatctcaatattcccatattcttggaaaagaatattttttttacccatctgttactctttttgtagccatactacaaaaaagaaagtgtggtactttcctgctgagtccaaggtatcaccacaacacctacaatcacaaacaaggaaagcccacacctgatggtatgagcattcactcccttactgctgtgattgttagtcttcaaagtggtgattttaggacttcacaagtaagaagcaaacacttctttatctaatatgtcttgttaaacttctatttcattagcaatcatttgattgtttctgttgcaaagttaagactttccacatataaacaatcatccgaagactacttttaataggttttcagaccatattagtaccataggcatgagcttattctcttatctatcattaaggctcttgaagtggaaaagtaataataaccttcatatccaccagtggcaaatgtaccatttattctattacatatctctgattctcatatcttttcaaaataaaagccccaattccatgcaggaaccgaggcttacaacaataataaacacaatacaaaggctactcacctttatctctctttagccattatacacatgaatatcaatccaatagtgatattcaaaatgccttttatcattatctccatgttataatcagttcaaataccttaatacccaactacagccagctactccagaaggaaaaacaagaaaaggatggaagacatttcatatccaatctttcttccaaactaccttctggagcttgttttccagttctccattcagccaccatagaaaatactccttgctcacttacttcctatataaatataaccaagtaagtgtgaagtgtcgaatttttatttttattcctataaggtacattacaagttttttcgacattacagaatttcctaacataatggataaataagagcaaatactccagaaggaaataggaaatataagattattgtataaaccatgaatattcattttctccatacagagccttatttagtccatctgtcagctgtgtggcattcagtgacctatccaagaagttatctatatagctgcttttattggctccagtgagcaaattatatacattccacatagatatggcactctgattctcaggaagagcaaagttatcatcattgtaatatgccttggctataagccctatctgtgtatcagttatcagcatttgaggaagccttttcttctgttcaactgggagatattgatataatctactcttacccaaaaactgtgcaaactgctgttcagtcatataactatctttatatgcactcatgtagtataggtgtttggatatgttgtactcctgaaatagcctcatcactgaattaaataaatcagcagtactcatcacctttaattctgacttgtaaccatcagttgagacacacatattacagcagactaagttcttgaagccaatgaataccttgaacttttctgcacctttcttgctatatagattctcatgattatatgccctgacaccaccaatagtaagatttaacctattaccttcaatatcttcatggatagtaggaatttcaaaacaaaacatcattctttcatagtaaatggtcttgtctgattcaagtaaatcctttactggtttatgaatagcttcgggtgttctgcctttaatgacatggcttactctgatagttggttcttcaatcttctcattggggaatatctgattggcagcttcccaaaccatttcaataaatgaagggtgactgatagttatctcattatccttgctgaatactggcactacacattcttcccttagatgctgtatagtgacttctttggtgttggcttctataaaagataatcttttgttttcccttctggagctgataatttcagcctctatagtttcaactggtgtttcaatctcaaactttggctgattgaatgtttgcatcaacatattagttctgtgtactggcattaactgcattgcttccataatgtataaaattaggattatagttgataataggtttattgttctcttcttgtaactgcatcttcttttgcatgaaatctgatgtaagttgctgataccattcagggtattggtgataaatggaggtaagttcttcaatggttttagcctgatttatcttctgttttatcatatccaagtttactccattattgcaccaatccagtattatttgcccagtagtgggtgtaatagtaaagtctggtttacccatgaatagacttgttctatcctttgaagcaatggcttgatgcttcatgttaatatcaagaactatggtaaattcgtagtctattccatctctcatgactgcttttaaccccactttctctggaatcatcttaccattcttttcattgagtacataatcctgcttacacctcatggtacaaataacatggcttggagattgtagaatcttctgcatgaaggcattcattcttggtgtaatcttctgccaattagtgaatgaattgccttgtaagttagcatgatactccagaagattatcccaacattgggatatagaatcaatgattatcacctccattttagcatcctcacacacttttacagcttcaatataagtttcaggtgtgaagttgtcttgaaggggtaatacattgtaatttcccaagtgtgcatataaatcagcactcccattttcactatcaataatggcaattttggtccagtcatttgtcagaccataggctaataataaggctgaataggtctttcctgagcctgcacagccttgtagagcaagttttattttagcctgcttctttgatgatactcttaattttaacatgactatattctattaatgattaactatttagaaaaataacaaaggcagtcagactattaatccaactgcccttctggagcatttttattaattcctatagagttgccaatgtagtagctcctccttcccctttctgatgtaacagaaggaatatatctccagtttcagcagagcatacttctgaaatgactggtattgtcagctctccagtctccaccttccttgaacaagctccagtttcaaagccataaacaaagaaacacttgccagtgtgttcatttcttttcacttcaatcttttccacattgtgttgtgctttaaattcagccacactcattgtctttaagaacttcaagtttctttccataattgtaaatttattattgttgtaggggggactatccccaccctgagtgatggggtaggtgattggttggagtgcataacactcatggctccagaagaaaaaaaaaataaaaaaataattttgaatagttttttcaagtcagtaaaaacagttatacattactacttataaacagtagtaatactgttgcttatctttgtaaacatacatacttttaggaacatcttcacttatggctgccatttctaaccaattttcatagtttatatgtcctaaccaagatacacataacatatagtcacgaggataatcttcactttctggattctcaggaacatcttcaagttttttcaaatagcccttatttatgagtgattttcttattttataaaaggtgcttttttttactttaattttttcttcccaaaatttccatgacatagtaaggttgaaagaattattcacagtattacaatataatgcaatgatgaatcctttctcttctgaggttaaatctgtattttctaatacttccttctgaattattctaaaattagtttgtgggtgtggcagaaaatatctttttcttttaagtccttcttgaataaacaactctattctatcgcagaaaccacttttttctaatcttggcataaagttatcttttatataactaaaggattgttttgtaatatctgctatttggagataggttgagtcagttgaatagtttgagttggttgtaaagtataagcctattaaagtatataaatcatttggagaaaacaaactactaattctattgggtactacagtataatttttcatatcttattttcatgagtccatattttatgcgatactataatacctaccttaatcttctgtattatagtatcgcataaaatatagacaattgtaaatccagttttgttaaagataaatatgagaagaaaacaatctctcctttaaggaatatataaagatatgaaaaaatattgacttatacaaattgtttaatagcttattgtattgataatcaggatttaaaaattaaaaaatcttaataaattatgaggatgtaaattaaactgtgtcagcaaggaataaagtattaactttgctaacacagttttttttatgaaagaagaatttgatttcgagagtatcaagaacaaggccattgaacagctgaaagccggcaagcctttgttgggtaaggacggcgcctttgccccactattggaaagtatattgaatgcagccctggaaggagagatggatgcacatttgacagaagaagaacgccagatgggtaaccgtcgtaacggaaagatgcaaaagcaggttcagactcccttgggcgaagtaaccgtttccactccccgtgaccgtaattcgagttttgatccccagtttatcaagaagcgtgagactattctggcagaaggtgttgctgaccgtataattggcttgtatgcaatgggaaacagcacaagggaaatcagtgactggatggaagaaaatcttgggaatcgtgtttcggccgacacaatcagttccatcacagaccgtgtacttccggagataaaagcatggaaatcacggatgcttgattctgtttatcctatagtctggatggatgccattcattacaaagtaacggatgaacgtggctgcgcggtaacccgtgcaatctataatgtactgagcattgacagggagggacacaaggagttacttggaatgtatatatcaaggaatgagggagcaaacttctggctcagcgtgttgacagaccttcagaaccgtggagttgaggatattctcattgcctgtatagacggtctgaaggggtttcctgaagccattcaaagcgtttatcctaatacagccgtacagctttgtgtagtacatcagatacgtaactccatcaagtatgtaggatccaagaatcagaaggagttcttaagggatttgaaatgtgtctatcaggcagtcaataaggaatccgcagaaaatgagctcctcaagctggatgaaaaatggggtgaacagtatcctgtcgttatcagatcctggcaggacaactgggataagctgtccgaatacttccagtatactccggtcatccgtaagcttatctataccacaaataccgttgaggggtatcaccgtcagatccgcaaggtaacaaaaaacaagggcgtgttcccatcggatacagcccttgagaaacttgtttatcttgcataccgcaatatacgtaagaaatggaccatgccactggccaattgggctaccatctcgcaacaactggctataaagtttggaaaccggtttaaattattgtaattttacgctcgtcgggacgggtggtcccgccccttggcgcgggccgttccccgaccgatgagttttctagagataaataatgcgtgacacagtttattttacactacctaaattattctcttctggagcaattctatccttatgttcttttaattgtagaggattttcccctttaataacatattgattccttggtctatcagtcttatacatgcttttaaagaggcttatatactttctgggcattagtaccttgtgcaaatgatatttgactatagggactaatatagcttgtatttcaggggaagataatgtttggtttacagaaaaagactcccttatagcttttttgaaagggtgttcttctgctaaagcccaatacattacagcattattgagatttttaaaggctacatcattgtcagttctaatctcccaaagctggtttaataggctatccaaatcaacatacttatatagcctaccaaatctctcaagaaatattctcttatttcttttactctgcctaatacatgtctttaaagtattatcatttaaactacctattgcatccaatgtattaatttcagtaatagcctcttgtatgtaactatctgcaagttctccttgtatggctttgttttcatcttcaagagccatttgttgctggcttatatcataatttatagagttgtattgggctatgttggcacatttatctaaagcttctttcatcttctcaggtaggaaatatagccctctatataactccattctctcaactaaataatctatattcagataggcaggcacatactcaccatatatgtttctcctaattaaatttataggttcatcattgcttatcctctcttgagctttatcctttatagcctcttttacaatagagaataggtttgcaagtgtatagtctccttggctaatgtcatcagcagcagtaataagccttaaaactttattagcttttcttacaagagaatctggataagttctcatatcttctaccaatgcataatctttagtattataaacaatagtgtcacttagtatcttatactcacctctacatcttccatatatttgtgtcattctatctaaggtcaacatagaatagtctcttctggagtctgatactgttattagatgataattgtctgatatgtctattccagtaaagtagcaacaagtggcaaaattaattctatttggcaatacatcattactatctagtttggctgcataatattctccagcttctttaatagatgcctcactgcatagtattgcacattcctttttcacttcttcttcaagagaagatatgatattttgaatctgtaggatggagttatatgcaatgaatattttctcatttgggtgagatttaatctcatttatcactacttggataatgttattggtatgaagtagtttaatgtttcttttcttttcccattgccatgaaataggaaatagacattccttctttaaaaggggattggtaaactctttcatagtagctgtaaccatgcacctattcttgggagggaacaatagataataatcaatcacatcttccagttgaggtctgtagttactatcagattgaaggacatctatttcatcaatcattagaaagtagtctttataattctcctcttttattaatttcagtaacctacctaaactatctgctactaccaacagcttcttatatccttccttctggagatactctattatctcttggtctgttgtcctttccttttcatcctttatttcacttcctatatataaagtattggggtgctttttacatttggagaaagccagtgcttttgtaggaaggactataattgaatttctatttgcatttatttcaagggtagtagcacctactcccggaatctgtttgtttactatgccatgtggcatcttatcaatgtaaaaagatagattaaagttacattgaacctctttacaccttgagaaattcccatataataatccttcaagactatcaattcttgtatctggtgatatttcttctggttgtccataatctgaatatataatctgaggagtgtcatataagtcaccataagtattatataatttggtagtatctgccatatctcacttagtttaagtttataatataataacaaagtgagcaaatatacaaattactcatttaagcctatatagtttccctttaaagtcttccaataaataaatcttatcaaatttgctatgaataaaaaaactgagcagctgagtatcttcaatatagtaggagctgtttttaaggtttcccgttactaatagtaaccagattgggctattacagttccttatatattgttcgagtttctcttctttttttagaattgcttgtttaataatagaaggagaaaggggagggccaaaactattagaacgaatacttattccttttgaactatatttctgtagtcttatattttccacataaggattagggatatttctatcatatattatatattctttaaatacatttgttactgtttttattacttcacttttttctgataatgaataatttgctgtagggagaatatcacaatttgcaaagaaattaggtatgctggaatctgctaataaattctgttctacacttctaatgattgtttcaaaacagccttcttgttctcttaaagatttatttactattatctgatgttctaatccaataattccttgattagtatttaataaacagtctggtgattctgaaagtctaaatatggacacagattcattaagtaacattataaacttaccaatatgacatatttcagtggtctttttattatttcctttaacttcatcaaggtatttccctatgatagcaaaaagtttcttttcactctcattcatccaatcaattagtttgttatgctccatttcaatatttatgagaagtcaaaaatacaaaagaatctccatagtccaataaactacagagattcttttaagcctatttcaaaccttcacttccaaatacatattgaagaaccttcaagtttgcttcattctcaatcttgaagtctctttcaatgtatatatctgtgactttcatggcttcatcaatgtgattaagtgctgcatgaacagcatatttatcaatacctaccttgttgactgctaaagtagcccatgagtgtcttgctgcatagtactccaaatcatctattttcaaaagttttccaatctctttgagtcctatatttatagccttattgaagttgccagcagttgaataagtatgatagaaattaaatattctattttttgtttggtcttggtatttttccattagtggttgaagaataggggggactataactttcattttggctttatctaaccttctgtctttggttttacttctgtagtaggtgattgcttttccttccagtgtagagcaactgtataagtctattgagttcattcccatcaggcagaaagatataatgaagcaatctttggctaaattatatgggcatttcttctcttttcctgtgttgttgtattgataaggtaattcccatatctttttgatggcttctgctggtatggctctctttcttgtagcctcttgcttaggtatttctaagttatcaaaaggtgaattgggcactaagatgatatttctatcatagtcattatatctttttttgacttcattgtatagatgtctgaggcatccaatatataaagagagcattctgttggaaggtattcgttttccatgtttctttaattcctcaattctttgggctctttttaattgtaggtagttcatgaaatcttttaatagctttttagttatttggtctgtattcaagtgttcttttccaagataagtgatgaaagcattaatagatgtctggtagttggcttttccttttaattgagtagtcttcaaccactcttttgagaactgaatgaaatctatggtagtctttctttcatttttaaccttgatgcactctattatatcatttaagctgtaattagctgtttccaatgggagggaagcacataattcttgatattgcctaacaatattatttgcttccttaataaacttgggattctttattttgaatgccttggtgaggtcttccttccttacatagatagaagtaggcagtcttttgacttctctcttataagtcattctgattttgacattatacgtaccatcactcttttgtttgccttttaatacttcggctttgattgttatcatatctattgtttttgggggaacaacaatagaccaacaattacataatttatagtataatgaaagggggttccaaagaattcatataaaagaaaaggattgataaccttttgattatcaatcctctctaagagcggaagacggggctcaaacccgcgaccctcagcttggaaggctaatgctctatcaactgagctacttccgcaattttttgtgggcaaagatggattcgaaccaccgaaggcgtaagccagcagatttacagtctgccccatttggccactctggtatttgcccttttgcacttaagattctatctcaattctctcattgagtaggtttgtttctcaattgcggtgcaaagatacgactatttttgtaaactccaagcaaaatctatcatttttattgcagtaattgcacattcgtctcctttattacccagcttgccaccggcgcggtcttctgcttgctccatagtattggtagtaattaatccgtaaattactggtacatcgccacttgcgtttaattgggtaattccttgggtagcacccatgcaaacatagtcaaaatgtggagtatctcctctgactacacaaccaattgcaataactgcatcgacttcgctgtattcgataagttggttggcgccgaaagtcagttcaaaactgccgggtactgtttttaccagaatattttcatctttggctccatgtttttttaaggtgtctatggcaccttttaggagagcgccggtaatattataattccactcagatacaacgatgccgaatttcattttttccgcgctgggtacagaactgaaatcgtagtctgaaagattgtgataagctgttgccataaataaggaattaagaattaataattgaaaattaaagggagaggagagataaaagaggcacggactacacggattcacggctattgtgtctttccgtgttttccgtgtaatccgtgcctgagatatttttataataaggtatattacttcttcaatagtttggcttgttcgatatacttatcgatatccattgcctggtatgaacggaagtatttatccttgatagtggtatacgcctggattgcatcgtcatacttaccttgctttaccaggatttctccagcttgcagcaggtagatggggctgagggagttgttgtcggcttcgttggcggctttcagcagcatggaagcggctttgtccagttggccgagctgcgcatagcagttacccatagcacctttcatggcaggagctaccatttggtcgtctccgtcaaagctgtccaatgctttcactgcttcgtcatatttaccgaggtgtgcatagcagagacccatataggcttttgcaagattggctgcttttgtgccgctgtattcgtctgccacttttacaaatccggcaaaaccgatgctatcaccgttcagtgcttgtgcataagcgtctgcttcgaagtattcttgccctttgaataaggcagcttgtgctttttcttcacgggggtctgcataaaggttcttgtacatcactacaccggcaatgatgatgattactgctactacagtgccgatgattgcttttttgttcttaatgaaaaaggcctccgattgtgtcagtgcatcctccacgtttaaggcttcattcgtctttttttgttctgccatttttatataatctttttgttattattcttatttatctatttcgacccgcaaaagtaagttttttatagctatcaacgaaatttagcggcatctttttttgttttgtatcagaaaacaccgaaattatttctacttttcaataagccgggcttcacctctgtattaaaaataagcaggcttattttgtactgctttcggttttgcattatctttgtaaccgaactcatcgttactataatgatactgaaacgtatatctatactcaattataagaacttggagcaggtggagctttcattctcgcccaagttaaactgctttttcggacagaacggcatggggaaaacgaacctgctggatgcggtgtattttttgtctttctgtaaaagtgccggtaatcccattgattcccagaatatctgccatgatgccgacttctttgttattcaagggttttatgaggctgccgatgggactcctgaggaaatctactgtggtatgaagaggcgccagaagaaacagttcaagcgaaacaagaaggagtatacgcgtttgtcggaccatatcggcttcctgcctttggtcatggtctcgcctgccgattcggagttgatagcaggaggcagtgatgaacgccgacgttttatggatgtggttatctcgcagtacgacaaagagtatctggatgctttgatacgatacaataaagctttggtgcagcggaataccttactgaagagtgaacagccggtggaggaagagctctttctggtctgggaggagatgatggcacaagccggtgaagtggtgttccgcaaacgtgaggcctttatccgtgagtttattcctattttccagtctttctattcattcatttcgcaagatagggagaaggtgggattaagctatgactctcatgcccgcgatgcctctttgctggaagtgctgaaggaaagccgtgctcgcgaccagattatgggctattcgttgcgcggtgtgcacaaggacgagctgaatatgcttttgggagatttccccatcaagcgtgaagggtcgcagggacagaacaagacttatctggtagcgttgaagctggcacagtttgatttcctgaaacgtaccgggaccactgttcccttgttgttgttggacgatatctttgacaagctggatgcctcgcgtgtggagcaaatcatcaagttggtggcaggcgacagttttggacagatttttataactgataccaaccgcgaacacctggaccgtattctgcataaagtgggcagtgattataagatgttccgtgtggagcagggaacggttgccgaaatgaaggaggaagaggcatgaagcgcaataatgccgaacagataggtgaacttatccgtcattacctcaggcaggaaagtctggagtctccgctgaatgaacggcggcttatcagtgcgtggcccgaagtgctggggcctaccattgcctcctacacccgtgaactttatataaagaaccaggtgctttatgtgcacctcacttctgctgctttgcgccaggaactgatgatggggcgcgagttgctggtgcgcaacttgaatcgtcatgtgggggcccaggtcataacgaatatcatattcagatgagcatcctcagctcatctattctttcaatcttcagtttcttcaattcccggactgcccggtcataatacatcggagtttccaaatccttgttgtcatgcgcatccagtccgatgatagctgtacagccttcattggcagcgattcgccagaactccgggcaggggtaggtggataagccgtgcgcttcattgtaggctacatagcctatattgtattccaacgggacattcaggcgtgcagcagtacggcagatgtgccagctgatggtagtgcaatggtggtcgaacttcggataggagcgcatgaacaagtccggatgggcaaggcaagagaataatccgctttccataccttcgatggcgctctcttcgtaaaggtcgagcatgtcgcggctgttcgtatgatggccgaagtaggggaacttttcatcggtgtggtaatgatggtttccgaagatgatatagtccagttggtacttcttgatttgttctttcagccaatggatatattgggggaagtattcacattcaagtcctatcctgatgtctatccggtcgtggtatttctcacggagcgtcttgagactcttcacgtagccgggaagctcttcggggagcatccgcatgtcggctacgtagtcggtacggtatttccagggagtatggtctgaaaaaccgagtatccggtaaccgcctttgatggcactgagcacatagtcttcgtcatctccggtggcatgcatgcagcgtgtggtgtgtgtatgataattagttttcattgcgtaatgatttcatccatgcgtatatcaaacggttccgcaggaacttcttctacgagttgaaacgggaagcagatgccggctttgtgggctgatgggatgcggggcagaagccggtcatagtaacctttaccgcgccccaggcggttgccgttacggtcgaatgccacgccgggaaccactatgaagtctatgtctgcatagtcggtaaatagctcgccggttggttcttcgatgccgtatgcgccaggtttcaagtcttcgggtccggtgtacagccgcagttccaggtcgtcacctacaactaccggaagcagtatccgcttttcgcggctccacttccggataaattcgtgtgtgtccacttcgtctttgagagagtggtagagcagtacggttgttgccgccctgaaagcggggtgtgcctcgagggcggcaagtatttcagcagactgacgcgtagcggaagagctgtgtcgggtcttcaacaaagctacctgcctgcgcagttcttttttcctttccatcatcttttttatcctctatgattggtgttgcttccggagctttggggaatgcctcgccacgttccagaatatccaatgctttcttgacggtagcatcgctctggttgatgtagcggatgtattgctcccttcccagtatgttatagataatgttgccgtaaagacttctttccagtagcttgtaggacttgtggataagcaggttgcgccgttttactcccttggagtctgcaaaacgtacaaactgctccacaatactctggtggcgaaggtacttcaacaagtcttcttcattgtcgtattcactcaatttcgcgcggttgcggtcggtatactggaagctgaattgcagaatcagtcccttgttgcttacttctatcaggtaagaagatactccggttgtgtcttgcggaacgaatacgtccggcataatgccaccgccgccgtatacgggtctgcccaaaccggtagagtaacgcaggttttcgtccagtttgatgctgtctttggagaagaactcgccgtgttcgtaacgggtaatccagtccatttcgtatttgctgtccttgccgttctcgtaggggcgctggatgcaacggcccgatggggtgtaataacgggcaatggtcaggcggatggcggaaccgtcactgaagtcgatgggttgctgtacgagtcccttgccgaaggaacggcgtcctacaatggttccgcggtcattgtcctgaatggcgcccgcaaagatttcgctggccgaagcggaactctcgtttaccaataccactagcggcagcttctggcaactgccggtaccgttggcatattcctccatgcggggatatttgcggccgtgggtatatacaatcaacttcccttccggcaggaattcgttcaccatgcgtgtggcggcttccatgtatcctccggtattgtcgcgcaggtcgataatcaggcctttgcacttctcgtggctcagttgggcaatcgcattcagcagctccacgtgtgtggtacgtccgaatttgctgatttgtatatatccgtagtcatcgtcgagcatataggctgcatcaatggtgttttgtgggatgtcaccgcgtgtgatggtgaagtcgagcaactccttttccgtggcacgcttgacgcctaacttcacttggcttcctttcggacctttcaggttgcgcatggccttttcgtttgtcaggcctttgcctgcaaacagactgtcgttgaccattacaatgcggtcgcctgccatcaggcccactttctcggacggtccgccgggaatcacgctgtttacgtgtatcgtgtcttcttgaatggtgaactggatacctataccgctgaagctgccttcaagttcggagtttacctcttccagcttctgtgcggggatgtaggtggagtgggggtcgagttccgccaatatctgtggcatggccttctctaccaaatcggtcatgttgacggtatccacatactggtcatcaataacacgcagcaaggcattcagcttgttggacgagctattgatgattcccagtttattaccggcaaaatgcctggcataaaacgttccgataaggattcccgcgactacgctgattgcgatgatgagcggcataaagcgggaagtattttttgtactcatgatgtttatttactattagactatttacaatttactatttggctgcgcatgcaactttcaactttccattttcaacttttcattatccattgaaataaacactacctcgatgcctgcccgtttcaaaagttcgataccatcttccaggcggtatttctcggagtagactacccgtttgatgcctgcctggataatcagtttggagcattctatgcagggggaggcagtgacgtacatggtggcaccgttactgctgttgtttgaacgggctattttggtaatggcgtttgcttcggcatggagcacgtatggtttggtgacgttattctcatcttcgcatacattctcaaaaccggaaggggtaccgttgtagccgtcagagataatcatcttgtcttttacaatcagtgcaccgacctggcggcgttggcaatacgaattttcggcccaaatgcttgccatacgtatataacgcctatccaatgcttcttgtttgtcttttgtagaatcgtccatcatatttatgctttatcgttgcggggtgaatcccatgactctggttgtcggtccgtctttaaaatagagggtcagtgaattggcatccccttcatacttgtacacgttttgcaatccggagatgaatgccttggccagtgcatcgctttctgtagcccccgtaaccttcacactgatgctgagcgagcctgaagctccgtcggctttccaagtgccgttgacgcttgagttgatgccttgtccgttgacggtggtgcccatcagttctccatccagttcagtaccttcaaaattgagggtgaaggtgcttttctgattatatagcttgtccagactcttcttcatctcttcctcattgttgttccaaaggtttggatagaattgggcattgctgcctttattggtgagtcggctgagcttccatgtcttcccggtgaatattccgataacatcgtcctcgttgtcgcaaccgcttagcagggggagcagcgaaaacatgagcaacatgcaaaagatgttccttataagtctcttcatttctttattccatttctgattaataatgcgtcgattgtaggctcttgtccgcggaagcgtttatagagcgtcatcggatgttccgttccgcctttggaaaggatattctctcggaaggaggcggcagtctccgggttgaagatgcccgtctgcttgaatagcgagaaagcatctgcatccagcacctctgcccatttataactatagtatccggcagaatatcctccggcaaagatatgggagaattgtgtgctcatgcaggtttctgccacagaaggcagaatctgtgctttttcccaagccttcttttcataggctttcacgtcaccttcaaacggggcgttacgtgtgtaccaagccatatcgagcaggccgaagctaacctggcggaggcaggcgtatgccgcgttgaagttggaggaatccacaatgcgctgtaccagttcgtccggtatcagttctccggtttggtaatggcgggcaaacgtatgcaggaattccttttcgatggcaaagttctccatgaattgggaggggagttccacaaagtcccaatacacattggtcccgcttaggcttccgtaggtggaattggcaaacataccatgcaggctgtgtccgaattcgtgcaggaaggtttctacctcgccgaaggtcaacaaagcaggtttgtcctgtgtcggtttggtgaagttcatcacaatggatatgtggggacggctgttctcaccggtcttttcgtcaatccactgttccttgtagctggtcatccaggctcccgagcgcttgcctgctctggggtggaagtcggtatagaacacggcaaggaatttcccgtctttgtcgaagacttcgtaggcatccacatccttatgataaacgggaatatccggattcttcttgaaggtgatgccatacagcctggttgccaggccgaatacgccttgcttcacgttgttcagctcaaagtaagggcggagcagctcatcgtcgatattgaacttccggtctttcagtttatgggaatagtacgcccagtcccacggcatcaggacgaagtcttctccttccgcttggcgtgccagggcttgcacttctgcatattcttgtttggcggtaggcgtgtaagcctccagcagttggtccagcagcttatacacggactcactgttttgtgccatgcgctcctggaggttgtattcggcgaagttgtcatagcctaggagttgggcaatctccatacggacattggccagtttctttacaatttccaggttattgctggcgttgtcatgcgtacacttcgtattgtaggccatatatagctcacggcgcaggtcacggctgtctgcgtaggtcagaaaagggccatagctgggagcctgcagggtgaatacccagccttcgacgcctttttccccggctgtctctgcagcggcttctaccgcgctctcgggtagcccggccagttgtgacttgtcggtgatgacaagcttgtagtcgttcgtttctttcaggttgttttcgctgaactgcagcgtcagcaggctgagctctttgcataaagcccggtatttctccttatcttctcccaggaggttggcaccgttgcgtacaaagccgttataaatgtcttccagcagtttgtgctgttccgggctcaatgtttctttgtcttgctgttcgtaaacagctttgatacgtgcaaacagctcttcgttcaggctgatgttgttttcatgctcgctcatcatcggcatgatttctttggccagttcctgtaggtcatcgtccgtttcggcactgagcagattgccgaatacagtgctgacacggtggagcatctcaccggacttctcgtaggccaacactgtgttggcaaatgtcgggacttccggattgcggatgatggcctctatttccgcattttggcggcggatgccttcgcggatggcgggtatgtaatctccggtcttaatcttgtcgaacgggacagtgctgtgcagcgtggagtatgtttcaaaaaaaggattttgagacgatatagtgttcataaagcaaagcaatattagagttagtataatcttcatcatgtttaaagggtctgataaaaaacgaactagctgcaaaattgcaaaaaaaataggcgacttctgcagaagtcacctattttttattattttctaactgtatattagcagttaactgatgccatgtgagcaatcaagtcaagaaccttgttagaataaccgatttcgttatcataccaagatacaaccttaacgaaagtatcagtcaaagcgataccagccttagcgtcgaagatagaagtgcgagtgtcacccaagaagtcagaagaaacaactgcatcttcagtgtaacccagaacacccttcaattcgccttcagaagcttccttcatggcagcgcagatttcagcgtaagtagcgggcttagccaagttaactgtcaagtcaactacagatacgtccaaagtcggaacacgcatagacataccagtcagtttgccgttcaatgccgggataactttacctacagccttagcagcaccggtagaagacgggataatgttgccggaagcagcacgaccacctctccagtctttcatagaaggaccgtcaactgtcttctgagtagcagttgtagagtgaacagtagtcatcaaaccgtcagtgataccccatttgtcgttcaataccttagcgataggagccaagcagttggtagtacaagaagcgttagatacgaattgagtacccttaacgtaagtcttttcgttaacaccgcaaacgaacatcggagtgtcgtccttagaaggagcagacattacaacatattttgcgccggcttcgatgtgagcttgagctttgtctttgctcaagaacaagccagtagattcaacaacgtattctgcctctacttcgttccatttcaagtcagccgggtttctttctgcagtgatgcggatagcctgaccgttaacgatcagcttgctgttttcaacatcagcttcgatagtaccgtcgaactggccgtgcatagtgtcatacttcagcatgtaagccaagtaatctaccgggcaaaggtcgttgatacctacgatctgaatatcgtttctcttcattgcagcgcggaatacgaaacgtccgatacgtccgaatccattaatacctactttaatcattttgtttaaacttttaagggttttataatgtttaaaaataaactttcgcttactaattgcaattctttctgatttgcggtgcaaaagtaagaaaatgtttttatattcgtaaccaaaatcataattaaataattgaaaagatgggaaaaagttcatttttacaggaatttaaggcttttgccatgaagggcaatgtgatagacatggccgtcggtgtgattatcggtggggcattcggaaaaatcgtctcctccattgtggcagatgtgattatgcctcctatcgggctgctggtgggcggtgtcaactttacagacttgaagtgggtgctgaaacctgccgaaatggtggacggaaaagaaattgctgccgtgaccctgaattacggtaatttcttgcaggtcaccttcgacttcctgattatagcattctctatcttcatgttcataaagttgttgaccaagctgactgaaaagaagaaagaagaggcgcctgccgctcctccggctccccctgccccgagcaaggaagaggtgctgctgaccgaaatccgtgatttgctgaaagaaaagtaatatcgaagcggaacttcatagggatgtcaaaaccctcttgacgctttttttaggcgcggaattctaagacctacacaagtttttgcacaggaaacttgcgtaggtcttagaattccgcgcctaatattataacatgatgaaagcgttcatggcttttgatacattccctaatgcatttaactctccccggtaccgccggaaactgtccctttttatactaagcagtaatcttaccacagccgtggtaagaaaataacattgctgtggtaagcaagttgcatagctgtggtaagaaaacagcacggttgtagtaagaatagcttttagtatccttgtggatagttctagcctgaaattaaagctgtttttagtaaaaaaacgtttttctgtcacattatccctgataattcctttactttttctacttttgcaaatcatttattaaagtctatacggatttatatgcaagagaagattattattcttgatttcggttcgcaaaccacgcagctcatcggccgccggctgcgcgaattgaatgtctattgcgagattgtaccttacaacaaatttccatacggagatgagagtgtaaaaggagttatcctttcgggtagccccttttctgtttatgataagagtgcattcaaggtagatttgagcgggattcgtgggaaataccccattctgggtatctgctacggtgcgcagtttatctcctacagcaacggtggacgggtggagccggcaggaacccgcgagtacggacgtgcccatctcggttctttcgattcggagaatgtccttttcaaaggggtaaggaagaatacccaagtatggatgagccatggagacacgattacagccattcccgacaacttcaagattatagcttctacggacaaggtagcgattgctgcttaccaggtgtccggcgaggagatgtggggagtgcagttccatccggaagtatttcatagcgaggacggtacgcagatgctgcgcaacttcgtggtggacgtatgcggttgcagccagagctggagcgccgcatcgtttgtagatactactgtggccgaactgaaggagcagcttggcaacgaccgagttatcctgggactgagtggcggtgtggattcttcggtagccgccgtgttgctgcatcgtgccattggcaagaacttgacctgtatctttgtggaccacggactgcttcgcaagaatgagttcaagaatgtgatgcacgactacgaatgcctgggactgaacgtgattggcgtggatgccagcgagaagttcttcaaggatttggagggagtgaccgagcctgagcaaaagcgtaaaatcatcggccgcgattttatcgaggtcttcgatgccgaagcgcacaagataaccgatgcccgttggttggcacaaggcaccatttatcccgaccgcatcgagagcctaaacattacgggcaagaccatcaagagccatcacaacgtgggcggtctgcccgaggagatgaacttccgtctgtgcgaaccgttgcagtggctgttcaaggacgaagtacgccgcgtgggacgcgaattgggaatgcccgaacatttgattacccgtcatcctttccccggtccgggactggctgtccgcatcctgggggatataacaccggagaaggtgcatactttgcaggaagccgacgatattttcattcagggcttgcgtgactggaaagtgcaggatgccgacggcaacgagacatcgctctaccatcaggtctggcaggcgggcgtcattcttctgcccgtacagagtgtgggcgtgatgggcgacgaacgcacctatgaacgtgcagtggccttgcgtgccgtcacttccaccgatgccatgaccgccgactgggcgcatctgccctacgaatttctaggcaaggtgtctaacgacattataaataaggtgaaaggtgtgaaccgcgtgacctatgacatctcttcaaaaccacccagcacaatagaatgggaataagacctactgaaattattaacttaaaaaacaatatagaagaatgaagcaggatatgattgtgattctggatttgggaagtcacgaaaacacagtgcttgccagagcgattcgtgcgttgggagtatatagtgaaatctacccgcacgacattactgccgccgaactgaaggccttgccgaatgtgaaaggtatcatcatcaacggtggccccaacaatgtggttgacgggatgtccatcgacgtgttgcccgagatttatgaagcaggattccccgtaatggctgccgggcatgacaaggcgctgtgcgaagtgaagctgccgcagtttacggatgatgtggaagccatcaaggaggctgtgaaatctttcgtattcgatacttgcaaggctgaggcgaactggaacatgacgaatttcgtcaacgaccaggtggagttgatacgtcgtcaggtgggcgaccgtaaggtgctgctggcactgtccggtggtgtggatagctccgtagtggccgctttgctgctgaaagccatcggcgacaagctggtttgcgtacacgtgaaccacgggctgatgcgtaagggcgaatcggaagccgtggtggaaatctttggcaaggagctgaaagctaacttgatatacgtggatgctacagaccgtttcctctccaagctggaaaacgtggctgacccggaagaaaagcgcaagattatcggcggagagtttatccgtgtctttgaggaagaagcccgcaagctggacggtatcgacttcctgggacaaggtacgatctatcccgatattgtagagagtggcacaaaaacagccaagatggtgaagtctcatcacaacgtaggcggtctgcccgaggatttgcagtttgaattggtggagccgttgcgccagctgttcaaggacgaagtacgtgcatgcggtgtagagcttggattgccgtacgagatggtttaccgtcagccgttccccggtcccggattgggagtacgttgtctgggagccattacccgcgaccgcttggaggctgtacgcgagtcggatgccattctgcgtgaggaattccaactggcaggcctggataagaaggtatggcagtatttcactgtggtgcccgatttcaaatctgtgggtgtacgcgacaatgcacgttcgttcgactggcccgtcattatccgtgccgtcaacacagtggatgccatgaccgctaccattgagccggtggactggcccatcctaatgaagattaccgaccgtattctcaaggaagtgaaaaccgtcaatcgcgtttgttatgatatgtctccgaaacccaatgcgactatcgagtgggagtgagattgaccaatgataatgatagcctcaccttaaaaacggtggggctgttttttttataacaaaacaacaaagaatagaacaatgaaacttttatgtatgattgctgtctttttgtgcatcccctgggtagcctctgacgcacagaagcaggactggggaaatttgaaacgctatgcagaggcaaacaaggaactggtacggaagggaaaacagaaggaccgggtggtttttatgggcaactccatcacggaaggatgggtggcaaacgatgccgctttctttgaagacaacggttatgtgggccgtggtataggcgggcagacttcttcccatttcctgctccgttttcgcgaagatgtcatcaagcttgctccggcgctggtcgtgataaatgcaggtaccaatgacattgcggaaaatgcaggcgcttataatgaagaatacacttttggaaatatagtgtctatggtagagctggcacgggccaataagataaaggtgattttgacgtctgtgttgcctgccgctgcctttggctggaatccttcggtgaaggatgctccgcaaaagataatgcagctgaatgccagaatccggaagtatgcccaggaaaacaagattccttatgtcgactattacagtgagatggtggaaggcgacaataaggctctgaactcctcgtatacccgggatggggtacaccccactctggaagggtataaagtgatggaagccttgataaagaaagcgatagacaaggtgttgtaggaaatcccggttcaggtggcctataagagcttttctgcgtcgggaatcatcatctcgcctctgtgcagttcgagcaggcctttctcctgcatgctgttcaacgctcttgatactcccatacgggtatcattgaccacctgagccaattcttccatttttattttcagtattttcctgcctgacggacgttcgatatgtgtcaggataaagttgccgatacgtttctcaaggttgtcggtgctttctgcccaaagacggctgttcaggctttgggcgcggttgctgatgatattcatgtaattcaggcggaatatgtcatatttgaacaattcgctcatgacgaaagccttgctgatgctcactgtgtgggtctcggtttgggcggtataggccgagacgtaggaggtactcatcccgaacagagattgtggctcgatgacataaggtgcctgaaaatattccgtgaagctgtatgatgtattcgcagatgaagtacatgaggagatttcacctttcaatacgaatatcagttgactgcatgtgtcaccggctttcacgatgacttcgccggctttatgctttgtaaagctcagcttgactttccccaggatattggtaaagtcttcttgtgcgagtccttgaaagagtggcagttgcagtaatgtatcaaacattgtattcataatgctttttcttcttgttttgaaacaaaagtagatattatcaaggtgtactgtaaactctttgcccctctttttgttttttttattgtttcttaaacgtgctattcaatccttgtagacgaatcctcatccttctcctcttccttcttatcgtcctcatcctcattgttttcctcatcttcgtcttcctcttcgtcttcctctccggcaaacggatcgggccgttggggaccgtattccataaagcctatggcgcatagcgtgcctgctatggctccgctaaggtgtccttcccaggaagtggtggctttggcaaattgtgggaacatattccataccaggccgccatataggaacgttatcaacagtgaaatggcgataagcggtacatgtttgcgcagaatgccgctgaagaacagaaaaaaagccagtccgtatatgatgccgctggctccgatatgccatcccggtttccctataagaaaggtaagcgcaccgcatcctatccaaatggcaaagaagatgtagggggctatatgccggtagaaatagaacagacaccacatcaggaaaaagagtggaatcgtattggcgaacagatgcttgaaactgctgtgtaccagtggatgtgcgaaaattccgaacacgccccgctgttccatcggatatactcccagtcgtgtgaagttccaatccatgcctgtctccaaaaactttaaaatgtataaaatgaatagcaggaataggggtataaccgccgccaatgccattctgcgtatatcatgcttcatatttcgtacagtgattgctatttttgtacaatactacggaatatttgacgaaaaccgaaaaaaaactgactttttattttgcctataagctttaattcgtatttttgggcatcgctacatggcttgtagcgcatataccgaaataattaacctttaaataatgcacaactatgagttatttacgatttgacaagaccctgatgattaatctgcaagaatctttgccaagggagatattgcggacgaataggtcgggagcctatcattgtacaacaattgtagattgtaacacacgcaaatatcacggtctgttggtgataccggtccccaacctcgatgatgaaaaccatgtgctgctgtcttctttggatgaaactgtaattcagcacggtgcggagttcaacctggggttgcataagtatcaaggaaaccacttcagtcctaacgggcacaagtatatccgagagtttgactgtgaaaatatccccacaactacctatcgtgtaggaggcgtcatccttcgtaaggaaaagattttcgtacaccatgaaaatcggattctgattcgttataccttggtcgatgcccattcggcaaccacacttcgtttccgccctttcctggcattccgcagtgtgcgcgagtacacgcacgaaaatgcgcaggcaagccgcgactaccagttggtagagaatggcattaaaacctgcatgtatcccggttatccggagttgttcatgcagctcaacaaaaagaatgagttccacttccagcctgactggtatcgtggtatcgagtatcccaaagaacaggaacgcggatatgacttcaacgaagacctttatgtgccgggatattttgaagtggatataaagaaaggggaaagcgttgtcttctccgccggtatctccgagatttctccccgcaagctgaagcagacttttgagtccgaggtggccgaccgcactccgcgtgacagtttctaccactgtctgaaaaactcggcgcaccagttccacaacaagcagggcgaggagcattatgtgcttgcaggctatccctggttcaagtgtcgcgcccgtgacttgttcatctccctgccgggtcttactttggccttaggcgagcaagatgaatttgaagacgtgatgaaaacagccgaaaaggctatccgtgagtttatcaatggagaaccttcctcctataagatatacgagatggagcatccggatgtgctgctgtgggctgtctgggctttacagcagtatgccaaggagacttcgcgtgaaaattgccggcagatgtacggtaatctccttgaggagattgttggctatatccgtgaacgcaggcatgacaatctcttcctgcacgaaaacggactgttgtataccaatggcaccgagaaagcggttacctggatgaactctaccgccaatggccgcccggttattccgcgtacgggctacattgtggaagtgaatgcactatggtacaatgccctgcgttttgtagccgatatggttcgggagggaggcaatgaaattcttgccgatacactggacgctcaggcagaaatcaccggaaagtcttttgtagatgtcttccgcaatgagtatggctatctgtttgactatgtggatggttatatgatggactggagtgtacgtcccaacatgatatttaccgttgcctttgactattctccgttggatagggcccaaaagaaacaggtactcgatattgtgacgaaagaactgttgactccgaagggcttgcgtacactgagccccaagagtggcggatacaatccgaattatgtcggccctcagatacagagagactatgcctaccatcagggaacagcgtggccatggctgctgggcttctacatggaagcatatctgcgtatctataaagtgagtggcgtgtcgtttgtagagagatacctcatcggtatggaagatgaaatgacttcccactgtattggcgcattgcccgaactcttcgatggtaatcctccgtttgttggaagaggggcggtgtcatttgccatgaatacggcggaaatcctgcgtatcttgaagttattgtctaagtataatttataaaaggaggaacgaagatgaaagttttaatgtttggatgggaatttcctcccaaaatatatggtggtcttgcggttgcttcttatggaataactaagggattgagtttgcagggtgatgtggaaactactttctgcatgcccaagccgacgggcgaagaagaggacttcttgaagatagtgggcatgaaccaggtgcctatcgtgtggcgtgatgtcgattacaattatttgaagtcgaggctgacgcgcaacatgacgccggaagattattattcttttcgtgaccatatctattcggatttctcttatatgcacgtcaatgacataggctgcatggactttgccggcggttatcccggcaacctgcacgaagagataaacaacttctcggtgattgccggagtagtggctcgccagcaggaatttgatattattcatgcccacgactggctgacgtatcccgccggagtgcatgccaagatggtgagcggaaagccgctctgcatccatgtccatgctactgactttgaccgttcacgtggaaaagtcaatcctaccgtctattctatggagaagaacggtatggattatgccgactgcatcatgtgcgtgtccgaactgacccgccgcacggttattgagcagtaccatcagaaccccaagaaggtgtttgccatgcacaatgccgtctatcctctctcgcaggaataccaggacattccacgtcccgaccattccaaagagaagattgtgacattcctgggccgtatcaccatgcagaagggaccggaatactttgtggaagcagcttcgctggtattgcagcgtgcccgcaacatccgctttgttatggccggttcgggagatatgatggatgccatgattaatctggcagccgagcggggcatcgccgaccggttccacttcccgggcttcatgaagggaaagcaggtatatgaggtttacaagaacagtgatgtattcgttatgccttccgtttccgagcctttcggtatcgctccgctggaagccatgcagtgtgggactccttccatcatttccaagcagtcgggatgcggtgaaattcttgataaggtcattaagaccgattattgggacattcatgcaatggccgatgccatttattccctctgcactaatcccgctctcttccaatatctgcaggaggaaggcaggaaagaagtggatggaatcacgtgggaaaaagtaggcttgagaatccgcgccctctacgaggatgtgttaagaaactatggtaaataacaaaaacaataatagaaatgagaactatctgtctttattttgaaatacatcaaatcattcatctgaaacgttaccgtttctttgatataggtaccgatcattattactacgatgattatgccaatgaaaccagtatcaatgatgtagccgaacgctcttatatcccggcattgaacaccttgattgaaatggtgaagaattccggaggtgcgtttaaagtggctttctccatctcgggggttgcgctggagcagttggaaatatatgcaccggctgtcatcgacttgttgcaccagctgaatgataccggttgctgtgagttccttgccgagccttattcccatggcctttcttctctggccaacgaggattgcttcaaggaagaggtgatgcgtcagagcgctaagatgaagcaaatgttcggtaaggcgccgaaggtgttccgtaattccagcctgatttataatgatgagattggtgcgatggtggcagctttgggattcaagggtatgctgacggaaggagccaagcatgttctgggttggaagagtccgcactatgtataccattgctctatgaatcctaacttgaagttactgttgcgtgattttaagctgtctgacgacatcagcctgcgcttctccaactccgagtggaacgagtatcctttgtttgccgacaagtacatcaactggattgacgctctgccgcaggaagagcaggtcatcaatgtctttatggaactctctgctctgggtatggcacagccgttgtcttccaatattctggaattcctgaaggctcttccatactgtgccaaggaaaaggggattactttctccacaccgacagaaatcgttaccaaactgaaatctgtttcccagttggatgttccatacccgatgtcttgggtggacgaagaaagagataccagctgttggctgggtaatgtgatgcagcgtgaagcattcaacaagctgtatagtgttgccgaacgtgtccatctctgtgatgaccgccgtatcaagcaagactgggattatctgcaggcaagtaacaacttccgtttcatgactaccaagcaaagcggtgtcggtttgaaccgtggcatttatgaatctccttttgatgcttttaccaattatatgaatattcttggtgactttatcaaacgtgtcgattctctctatccggtggatatagataacgaagaactgaatgcattgctgaccactatccagaaccaaggtgccgagatagaggaactgcataaggaattggagaaagcacaggccaagttggagaagataaaggctgcagaaaagaaagagagcaaggctacagctaaatctgccgcagaaaaaccggcaaaggccaaggctcctgccaaaaagcctgccgcaaagaaaacaactaaaaaggctgctgaataatatcggcagcttgtcccattaatcaaaaaagccttccgctctacaatgagtggaaggcttttttatggaatatctgtcagttacttgttgaaactggtgtatgtaacttctattttcagcggagattccacttcaccttttgcattctctttcgggccgccttttagtttggcatatcccggcttaaggtcgttttggataccggtcatggttttgttaccgctactacttgtactgttgtcataggtaatggaaaccggaatcagcaataccttatcccaatcttcattttctttgttccaagttttctcccactctgtctcattccaagaactgccggctttgtctttggcggctttcttggcagcttgtttttcgttgatgcaagtggtaaccaaacgggctatgttgctgaatacatattgattagtagcaaatgcattgtgggtggttgtaaatgaggtaatattatccctgactttgttctcttcaaagaagctcttcaagtcctgtttacgtatcaacagcacgtcattgggagcactcatgctatattcgtagtcactgtttatattgtaattcgtgaaagtcagcttcacggcattcagggtgtcattggtcagtttgttgtatattgaatcgtatggcatgatagcttcggtgaagataccggcaggagatttgatataagtgtgttggggttcggcagccttttcctttatcaaatcagaattcatgaactggtttgcctggataacctctttggtagaggcaaatacagtctgcatgctatagaacaaagagtctgtaccatcttttttcttcagtgctacaccggtagtatcatttacgtggtggaaacggaattgcatatttaaagccacataatccacatagaggatggttccatctccgtaatcgctctttacatatactcctttgaaaatcttgtctatgaaagttgcggcgtctttaaagtattcgggatgctcgcgataaaccttcaatattctgtcttcgccgaaagttttcttgtccaatgggaacgtcacattgggatagaaagtgtaataaccgttattgtccttttcaaatctcacagagtccggaacagacgtatcgaaagctgaataagccttacgtccgagcagggacttggggtcgtacttgttgtagtactcttccggattgatattggtatagcgatttttgtccagcttcttgtccaattcatagatactcatccggcatgcattcagggagtcgccgaaccaactggaataatagactgcaagttgcactgaaactaccgagtcggcagtcattgtaccagttgccttgattggatttccttcactgtcccgttcggtcactttatacacttccggaagggagaagttttccgtacagttcagctccgtaaggaaacttgtttcgtaataaccgaattccgggtcggaaaacttgcctatatagccggtactcgttttggcaaatacagaatcaacggcaaatgaacgtgttgttacattaaaagtagaagtatgcgctgacatgccgtcagaatcgggcaacatacccagacctaatgttccggtgttgtcatcgcatccaaagaaagtcaggactgccaaaagcaatgttcccaggtatcttactttcatagttttaactgtctaaatcgattttatttttgttctgtttcccataccttgtcgtagaagtcattgcaggcttcagcaaagttctcgggagattgatattccaataccggttttccggattcgcgggcatagttcagtacttcctcattgacgtgttcgctttgctggataatgccgtcggagaagtcagcagccagtttgcaaagtgctgtgtagtcaatgggttccttcaatcctgcaatatctttcttggcgatgcctttcaacaatagcttgttagagaagtctgcgtggaaaggttgtttgaagtcatcttcataaagggaaaatatgaccttggcatctctgaaggaaggttcgtctttatagacttttttgatgtacagaggcgctaaagcggtcatccagccgtggcagtggatgatgtcgggacaccaacgcagtttcttcaccgtttccagtacgccgcgggcatagaagatggcacgggcatcattgtcttcatactcttcaccattttcgtctgttacctgcaagcggttctggaagtagtcatcgttgtcgatgaagtatacttgcatacgtgcagactggatagaggcaaccttgatgatgagcgggtgatcggtatcgtcaatgatgaggttcatgccggagagtcgtatcacctcatgcagctggtttctgcgttcgttgatatttccccatttgggcataaacgttctgatttctctgcctttttcttgaatagcctgaggtaggtttctgcctacgagggacatttcggattctgaaacgtaaggggtaatttcttgggttataaataaaaccttgttcgcctttgtcataataacaatgttctcaattattctgcaaagatataaaaaaaatcgggcaataaagcaaacggagcccgtctataattccttatgaattgttaactgcttgttattcagtgagacagctgcttctggaattgccggaaagtgtactgagttttgcattaatttgcgatatttcttctttatatgctaaataatggtttattttgcaccgcttttgcgaacaaccaagttattatataaccaattaaaatggaaatagtacatactatcaaggacttgcaggccggactttcggctttgagagcccaaggaaagaaggtaggtctggtgccaacgatgggtgccttgcatgccggtcatgcctcattggtgaaacgttgtgtggcagaaaacgacgctgccgtagtaagcgtttttgtaaatccgacccagtttaatgacaagaatgatttagtgaaatatccccgtacgccggaggctgattgccgtttgctggaggagtgtggagcggcatttgtctttgcaccttcagtggaagagatgtatccggaaccggatacccgccgtttcagctatgcgccgctggacacagtgatggaaggggcattccgtccgggacattttaacggtgtctgccagattgtgagcaaactgtttgatgctgtgcagccggatcgtgcctacttcggcgagaaagatttccagcagctggcaattattcgcgagatggtctgccagatgaagtatcctttggaaattgtagggtgtccgattgtgcgtgaggaagacgggttggctctgagcagtcgcaatgcccgtttatctgccgaagaacgtaaaaatgcactgaaaatttcgcagactttatttgaaagtcgtacctttggagcttcacatacggtagctgagacacagaagtttgtggaagacaccatcgcagccgcccccggattgcgtttggaatactttgaactgctagatggcagtaccttacagaagattgccgattgggaggaaacttcttatgctgtgggctgcatcacagtattctgtggggaagtacgtctgattgataatatcaagtacaaagagcctgttgccttgtaatttgtaatttataattagtaattcgtaatttataaagatatgatgattgaagtgttgaagtcgaaaatccattgtgcccgcgtcacggaagcgaacctgaattatatgggaagcattacgattgatgaagatttgatggatgccgccaacatgattgccggcgagaaggtgtatatcgccgacaataataacggtgaacgttttgaaacctacattattaagggcgagcgtggctctggcaaaatttgcctgaacggtgcggcagctcgcaaggtgcaacctgatgacatcgttattatcatgtcctacgcgctgatggactttgaagaagccaagtcgttcaagccgacggtgattttccccgacccggcaacgaacaaggtggtgaagtagtctttttattgaaatatggaaatagagccccgtttgcaatttatctgtaaacggggctttgtttttacttctgattctttcccgcagggttcgtatgagaatgaggagccgatttaatcttgtcgagtaaatacagaatctcagtttggacatcgaaattatatctttggtaatcctgataggtgggcatcaagtctggataaagtgtgtgggcacaccggtctttgcccggaaagcatatttgtatggagttggagatagagccttgcataccggtatagggtagccggaataaggtttgttccatgtaggtattgggggcttgtccgctgggtattcctacaagggtagcacccattttccacagatagaaagtgtagtggaaagctgcactgaaggtatgttcgttggtaatgacgtaaatgtgttccggagtatagagcgcctttccttgttgctttctcaattcttccggcacactggacatacagttctcaatgaagtcggtccgtcgctgttctatgtttgtggtgtctgcttcgtccgtactgaaagtgtagtcaccgtaggcatagtctgttccgtatgcttggttgaaatcctgtaagtttgtctgtagtttttgcatgtagaggggagagatgatacgatagaattctatatccatatccgtttgcaggaagtggtcgccgaacagttggtaaagtgtgggtaggacaattggagtccagccgccgctattgttgcgcaaatctatgatgagggtggaggaggcttccttcttcatctctttcagcatatgggcgaaaacttcggaaagggacgggagttgccgaatggcttgcagggtatcggcgggcatatcttgtttcaggatatcccgataatagaatcctatttgccggtataaatctttcagcccttgtttttgtatatactcaaaattatcccgtgccatgatactgttgatattgatgagcattatttgcttgtcgttgtctatgaactgataggccagttgtttgtctgtataagctttccaactgttattgtgttgcatgggtgtgttttgcacttcctgccttgacaataagggaagggttaatcctcttgatttgccgtcgggagtaagaagtgagaggtgaaggttgtctttcatttcagggaaaagctgtctcaagaaatgttccgtaggcatggacctgcatagattggcataacggtcatataggttttcactggcttggatagcggcagtgcgggccagtacctcttctaaagaatctccgttgatggttgtgatacggctacctaacaagtctttgtacgtttcagggattccttgaagtataatgccgtcggggatggtgcgtacttccagtgccaggtaacgctgatttgcttgttgattggctgtgggaggtaaaaggtaggtatgtccgtcttgcagattggataggaaaatgcttaccttatcaaaaaaggtctgtttcgtaccgggagtccggcgtaactcgttctccagatggaaagcttgttcgtagaagaatacttttcctccgaagccgctgtaagggtcgggatgggttgctgccagttcttttaccagataccgaaagtctgaggcaagggaatccccgtttaggggctcttgggcgcttgccaatagggaagccagacagggaaggagggatagataaatacgtttcatattcttgaaatatttaaattgtatgctagaaggggaaagtagaggaagaggttgtagtagaataaaaaaggtggagttcgtatgtctccacctttcatgacagattcttatttttttagctgttcgttcatcgctgctgctgcctttcgtccgtctcccatggcaaggattacggtagcacctccgcggacaatgtctcctccggcaaagatggtcgggatggacgactgcatgttatcgttgacggcaatcgttcctttccggcccaattccagtcccttgatggagcttgggacaatcgggttgggagatacacctacgctgacgatggcaaggtcaatgtcgatggtttccgtggctccggggatgggtacgggactgcggcgtccgctggcatccggctcacccagttccattttctgaagcaccacttgtttcacttttccttgttcgtcggcaatgtattcgattgggttgtggagggtcaggaattctacaccttcttccttggcatgtttcacctcctcgatacgtgccggcatttcttcttccgaacgacggtagataattagggcgcgcgctgcaccgaggcggcgtgcagtacgcacggagtccatggcagtattaccgccgcctatcacggctacacatttgccgaagggaaccggtgtatcggaatcttcacttgccgcatccatcaggttgacacgggtcaggtattcattggacgagaggatattgatggagttctcgccggggatgttcataaagttgggcagtcctgcaccggaagctacgaatatgcctttgaagccttcctcttccagttgttccacgctgagcgtcttgccgatgatacagtccttgacgaattctactcccattttggcaaggttgtcaatttccacatccaccactttgttgggcaggcggaactcaggaatgccatatttcaatacaccaccaatctcgtgcagtgcttcgaaaacagtcacgtcatagccatacttcgccatatctccggcaaatgacagaccggcgggacccgaaccgatgacagctactttgttaccgttcttttccttgatttcaggtatggagatttgtccgctctcccgttcgtagtcagcggcaaaacgttccagatagccgatggctaccggcttttcgttcattttcagatggatacatttggattcgcactgtttctcctgcgggcagacgcgaccgcagacggcaggcagtgcactggtttctttcagtgtcttggctgcttcgaggaattcaccgcgctcaatgttcttgatgaagcgggggatgtcgatacctaccggacaaccttccgtacatccggggttggcgcagtccaagcaacgtttggcctctgtcagcgcttgttctttcgttaacccttggttgacttcctccttgcggctgtgcgagcggtattctgcatcgagctcgttcatctccacgcgtggaatggcagtccgttctttggctttcatggatttgcgtaactcctgacgccatgcagcattacggcttttctcatcttccatgttttcaccggtagcttggcaggtctgaggttcttccagcttgtgcatctcctcgcgttcgatgtttttaaaagcgcccatacgcttcagcatctcgtcgaagtccacttgatgtccgtcgaactcagggccgtccacacatacaaatttggtctttcctccgatggtgattcggcaggcgccacacatgccggtaccgtcaaccataatcgtattcagggatacatccgtggggatttcgtatttctttgtcagcaaacaaacaaatttcatcatgatggcggggccgatggcgaaacacttgttcaccttctcgcgcttgatgacttcttctacgccttccgtcaccagaccttttcgtccgtaggaaccgtcgtcggtcatgataatgacttcgtcggagctttcgcgcatctccttttcaaggatgatcagttctttggtacgtcctgccagtacggtgatgacgcggttgccggcagctttcagcgcttgcacgatagggagcatgggagctacgcctacaccacctccggcacagaccacagtaccgaagttgtcaatgtgcgtagcttgtcccaacgggccgacaacatccgtaatataatcgccttcgttcagttcgcaaagacgggtagaggagagcccgacttcctgaaccaccagtgtgatggttccctttaccgggtcggcttccgcaatggtaagcggcatacgttcgcctttttcgcccacacgtacaatgacaaagtgccctgccttacgtgatttggcaatcaatggtgcttcaatgactaacttaaagaccttttcagaaaagtgttctttgctaatgattttattcattatctaataattttgttggtgtaattacgcaattactgtcagattgatagattttgcaaagataggggttatttggtaatatcaaaagaagaatagggtaaaactgcatgttgtcactggataacattcctttgtcactataatttgttcactttctacagcctgcctacttttgaaataaaaaatgaggaagagtatgtatcgaaatgtttttttaggggcaattttattgagtatgcctttggtggtttggtcgcagcaggatacgattgccgaccagcgtttggaagaaattatggtaactgctaaactcccgttggtagaaatatctgccggtaaaacaagttaccggatggatgcgtcagtcactcaaagtacgggaagtctttatgatgttcttgcttccctgccgggagtcgtgatagattccaatggtaatatcttgctgaacggacaaagcggtgcgacgattctgatggatggcaagcctacttatctttcgggagatgaattgatgagtctgttgaaatctactcctgcaactaatgctgataagatagacttgataacccagccttccgcacgccacgatgcggcgggaagctccgggttgattgatatccgtacaagaaaaatcagactgcgcggtgtgaatctggccttgaacggcaatggcagtcttggacggacgggtagcggttatggaggtgcctccatgaatatccgggagaataagttcaatctttatttgaactattcgtattatcaggggaaggatgtcatagacttgtttatcgaccgtgcgttcgaacgggatggaggaaggatgatgcaggactcttaccggaagcgtaggaattattcgcactattttcgtaccggatgtgattattatctcaatgagcggacagtttggggagtctcattgggtggaaacttttcccggcaaagggaaaatgcaggcatgtttacggaaatccgagaaaccggagttgcgggaaatacttacagccatgcggagcaaaaccggaataatgtttctgccggaaccagtatggtgcacaagctgaaaagagaagggggagaactcagcgcttcttttgattatttccattactaccgtgttggaaaccagttgatggatagttttaagcccgatacattgaaaggggatatgaagggaaataccgacttatatgtcggacagatagatgcggtttatccattgagtgaggtttggaagttacaggccggagtcaaaacctcatttgttacgatagacaatacggcaggttatatgcgtccgtcggtttccggctggctgccggacggggcacttggttcccgattcgtatatgatgagaatatcaatgcctcttatctacaagtcggctatgagaaagaccgcttgaaaatctcagcgggtctaaggttggaacatacccatgtacacggggattttggaggaaatacacaacagaaagactcttcgtttacaacgaattacttccatttgtttcctactattgctttgcaatacggtttgacttcggaacatctgtttcagctttcgtatggcaggcgtattacccgccccaattatggtgatttgaatccttttacctatatatttgatgactatacccatgaagggggaaatacgaagctgcatccttctttctctgataatatagagttggggtatgtgtatcgtgactggtttcagacagtgctctttttctcgcatacagatgatgctatcatgaagagctatcgcgaacaggaggggcggcgtatctatgtaatgccccagaatctgtcttcctatgtacagacgggtatgcgtgtacatgccgccaacctctcacctgtttctttttggaaggtgaatctgaccgctatcggtatttataataattatggttggacggagcaagggcagaaaatgaaaaaccgtatgtttaccccgatattcggctgcatgaaccagtttgctttcacttccgtatggtcggccgaactttcggcaaattataatggacgaatggcctacggacaagccacagtacatccggcgctggaagtgaatgtcggcatccaaaagaagatgttccgtaacagatgcaccgttaccttgtttgccaaggatgtattcaacaccaattatcaaaaagtagatattcaatctcccggtgtgcaggcgtttgttgacgaacggcacaacaaacgtgtgctgggtattgctttcgcctggcgttttcaaaaaggcagcgagacaaaagaaagcagaaggaaaaaagaaatagatgaaacaaaaagagtaaatttgtaactgttatgggcagactgtggaacaagtggctggtgccggcattatttgccgtgattctttttctgtgtattcgtgtggcgaatgatattccgaaacatgaatactattgggaaagtaatgagtggaatttcatgctgaaggatatgcttgtggtactcttcatgtcttatcctatcttttttctattgaagtattggcttcgtttgtgccggaagcggaagttggtatggtggcaggaatacggggtagttgtcctgacggttcccgtctggtgtcttctgacgatgtgggtcatccgctttttgatgggggtaagtcttgatttatacgatgtgcctgttccggccatagtcagtatgttgcttggcggcttcttttatatattcttgcgtaatcagatgatacagaaggaaaatgaagctcaacgcctgcagttggagaagataaaaaatgaccagctccagacagaactgaaattccttaaagcgcaatatcatccacactttctttttaatgtactcaatacggtttattttcagatagatgagaataatgaggctccgcggcatactcttgagcaattgtccgatttgcttcgttaccaattatacaatgatggggagaaagtgcaagtccgtgtggaagtggaatatctgaaacaatacatcagcctatgtaaacttcgtgctacgaagcggctgcagttgcaggtgcatttcgatgaaatggaggcgcaggttgagatttatccattgttgtttgtaccgttggtggagaatgctttcaaatatgtgggagggaactattttatagctatggatatgtgtctgaaagaaggcaagttgtgttttagtattgaaaattctataccggaaccattagtgcaccagaaaggaaaacatggaatcggcatagaaaatctgaggcgcaggctggagctgctatatccggagcgtcatacgctggacataaatagaggagatactttgtttagagtaaaacttgtgatagaattataggatgaaacaggtaaaatgtgtaataaccgatgacgagcctactgcatgtgaaggattgcaacgctatgtggaaaaggtggatttcctttctttaatgggtgtatgtgaagatactatgcagttgaacactcttttgcagactgagcagccggacttgttgtttctggatattgaaatgccttatctttcggggcttgaactcttggcatctcttgcccatccgcctcatgtgattatcacttccgcttatgagcagtatgcattgaaaggttatgaacttgatgttacggactatctgttgaaaccgatttcgtttgaccggttcctgaaagcggtgaataaagtacatggtcttttgcagcaggagaaatggccggatgaagctaataattttatatttgtccgttcagaccgtcagatgcataaggtgttgtttaaggatattctggtggtggaggggctggaaaattatgtctgtatttatacggaaagcacaaagctacttgtacgttctaccatgaagcgtatgatagaggctcttcctggtggagtatttcagcaagtccataaatcatatctgataaatttggaaaagattgagatgatagatggcaatcggattatagttgggaggcatactgttccggtggcacgtaatttccgcgaggaggtgtttgcacgtattttgaagaatactttgtagttgcgcaggagaagcttgtcatgataaaactctgggcacgaattacatggatttcacgttttttgctaaccgcaactgtgaaattcatgtaattcgtgcccgaaagaaagtgtcaaaggcgtattgctgcacgtgactattatggccttagtctattatttcaaatcccgtatacggaaccaatgcctttggtatgcggattccttctggagtctggttgttttccagtaaggcggcaacgatgcgtggcagagcgagtgcggaaccgttcagcgtatggcaaagctctgttttcttttctgccgtacggtagcggcatttcagacggttggcttgataagtgtcaaaattagagacggaacttacttccagccagcgtttctgtgcttcggaatacacctcaaagtcaaaacagagggcagccgtgaagctcatatcgccaccgcaaaggcgcaggatgcggtaggggagttccagtttttgaagcaaaccttctacatggtccagcatttcctgatgagactgtttggagtgttccggcttgtcgatgcgcaccagttctactttggagaattcgtgcagacggttcagaccacgtacatcttttccgtatgagccggcttcgcgacggaaacattgagtataggcgcaattcttgatgggcaactgtttttcgtccagaatcacatcgcggtagatgtttgttaccggaacttcggctgtaggaatcagatataagtcgtccacttcgcaatggtacatttgtccttctttatcgggaagttgccccgtgccatagccagaagcggcgttcaccactgtcggcggcattacttctgtatagccggatttgcgtgcctcgtccaggaagaagttgatgagcgcgcgttgcagttgtgcacctttgcctttgtatacggggaatccggcaccggtaatcttaacgcccaggtcaaagtctatcaagtcatatttcttggccagttcccagtggggcagggcatctttgggcaattcggtttccatgccgcccatcttctctaccacattgtcgtcggcaccgacgccttcgggcacactgtcatagggaacgttggggatggtgtaaagtaaagtctgcaaatcgttggcagcctgctccatattggcttgcaagtctttgttgacttctttcagctcggccacgcggcttttggcggcttctgcttcttctttcttaccctccttcatcagttgtccgatggatttggagagtgagttggcttctgccaagtttttatctaagatggtttgattggcttttcttttgtcattgaagtccagcacttgtgcaatggtttctttcgcattcttgaagtgcttcttttccagtccacggagaaccgcgtcggtattttctgtaatttgtttgatggtaagcatatcttatacttgtttttatgttattcggttttgtgagtgcaaagatatggaaaaaacaaataaagtgttgcttttgacatgaaagaaagggatgcaatccattcggattgcatcccttttccttatttcttgttcggaaacttatgcttctgcgttttctgcagggataacagaaactgaacgtctgtcttccttgcccactttgaattgtacagttccgtctactaaagcgaaaagagtgtggtcttttcccataccgatgttattacccgggtggaattcagtacctctttgacgaacgatgatgttacctgctttgcaagcttcgccaccaaatatcttaacgcctaatctcttgctctgtgattcgcggccgttcttagaactaccgacaccttttttatgtgccatttcttcttactgttttaattgattaagctactacttctgtaattgttaactctgtgaattgttgacggtgaccgttcaacttacgataaccttttcttcttttcttgtggaaaacaagaactttatcgccttttaccatgtttgatacgacctggcaaacaacctttgcaccctctactgtgggagcacctacggtgatgttgccgtctttgtctaccaaaagaaccttgtcaaactctactgttgcaccgttttctgcattctggatgtggtgtacaaacagctttttgccagcttctgctttgaattgctgaccgttgatttctacaattgcgtacatttcttatatataatgtataagttagctccgtcgggtggtctctaatcacttagaaagcacttggtcgaacccggtgcggaataatcgggcacaaaagtactctttttattctaaatggacaaatgttcttttgcttttttgttcttttaatgcagattgtacttttagattattggagaaaaactgtttcatcaaggagaaacagtccgtgtagggatggtttctgttacaaaatgaatttcagaacatagataccggccagcatcagcgccattacaagacacgcgaatatgacgagtagcacaagactgtaagtcagcatgaggatagtgcgccaaaagcttctccaccaggtgcagcggtacaattgtttgtaatcccaacagaataggacgaaaataagccataaaggcagctcatacaaatcgtctacctttgcgtacccgttgaaaggcagcacgatgatgctcagcaggagtatctggcaagctatgtaggcttgtatgaacacatgctccgtggtattgtagtttaacttatatttccggcgtcggaaggcaagttgggtggcaagtgcaaacaaaggcagtgtggcaatgatgcggaatgccttgtttccgtgtccccagctcttcatcagattccatactttcattaggaaaggagagttctgtaagactttttccagtctgtctcccacttccgaggtgtcgtttacaaattcatcgatgaggtcgccatcatcgctgttctgttcggacacctgtgtggcagaagtggagtcgttcttctcttccagtttgttcaagcttttctccaggctttttatagtgatggcgagggctcgcttttcctctttgctataggttttctccatctttttggtaagcttctctttagcggcaatgatttcttctttgtctgtctgctctgtcttttccgtcttttcttttttgcttagggcttccgggtctaccagttgcacagccatgatataaagggctgcaagaatgaagagtgtctggaacgggcgaaaatactctacacgcttaccaccgatgaagtctctaatcatgtaccccggacggtagaggagttccagaagggtacgtccaaagccattatctatattgaagaagcctccggcagtgtttttaagcgcgttactcaaccgatagcgtggagtgttacggctttgtccgcaacggttacagtagttgccggtataggtggtgccacaattcagacaggtgcaggtttcgttgccagcgggaggagtttttctcccttgtatcagcttgatgtgaaatgcgcgtaagcgtactgcgcaggggtgccaccatgagtcgatgaaagttcttgctttgttgggtagtatccttcttttttggaggataccccacaatgtcagtatgaaaacaaccgggaagaagttgctgtcgtcggtcatgtccagctcttcaatagccagccagaagagtgtcactagaaggaggatttgccagacgcttatccttttctgtttccggggagaagtggcatgcgcattttccggccggatgggattttcaatcttgaatatggaaggatgctcctcctgaactgccagcagttcttccaaggtgttcattattttccggtgtgggtacttctccaattctttggcagtggttactccgtgggtgactccagcaaagtctactccggccgcttgggctgtttccgcatctaccgtgctgtcgcctatatagagggtctcggctttgctgacatgtagccgcttaatggcaaggagtagcccttcgggagatggcttggcggctttcacgtcttcaccacccacgatgatgtccataaaatcttcaggaaaatgctggtcgaggagttccttgatgcggaatcggtatttggtcgagatgattccgatgcgggcgccggagtccttcagtgcagtcagtacggacttggtttccaggaaaagcaccgtgttgacagtcatatgcgtatcggcctcttttcggtattctgccttgaatcctgccagttgtccggcatctgtcacgccggtgaggatggaaaaagagtcttccagagtcttgccgatagtacgtttgatgtcgtcatccgtcacctctgtatatccgtgacgggtcagtacgttgtggaaacaagtgacgattccgcgggaagaatcagcaagcgtataatcaaagtcgaaaagataggtcgtgtaattcattgtgactttttgtgacaaagatagtgtaaagtatatttttacaaaataaaaaagaggattaatcggaattttgtattacttttgtttgcatgaattctgtagaaaagtgacaagatgtgtaagtgttttatccggttaggttgttatactatacacgttaaccctataatgttatgaatttgataaaatcttgttgtttgtttgtggtcttttcatcctttctggcatgcacctcgcaggtgtcggatgtgaagagtgtgtcttatacagagtttgtgaatccctttatcggtacagattttactggaaacacctatccgggtgcccaggcgccgtttggcatggtgcagctcagtcctgacaacggactgccgggctgggaccgtatttccggatatttttatccggacagtaccattgcaggcttcagccatacccatctctccggaaccggcgctggtgacttgtatgacatctcttttatgccggtgacattgccttataaggaggcggaagctccgctcggcattcactctttgttctctcattcggaagagtcggcaagcgctggatattatcaggtgcgtctgaaagattataatataaatgtagagttgacggccaccgagcgttgtggcattcagcggtatactttcccaaaagccgatgctgccgttttcctgaatttgcggaaagccatgaattgggattttaccaatgattctcacatagaagccgtcgattcggtaacggtgcaaggttaccgttactctgacggttgggcacgcgaccagcgcctctacttccgtacacgtttctccaaaccgtttgctgcgatgcagctcgatacagctgccatagagaaagaaggcaagcggatagggacatctgtcattgcacgattcgactttcagactaaggaaggagaacagattcttgtcagtactgccatctccggtgtaagtatggaaggggcggcacgtaatctggcagcagaagtacctgatgatgatttcgacaaatacctggctgctgtgcaggatgattggaacgaacaattgtcccggatagaaataaaatgcgatgaccgcgatgagaaagtcaagttctatacagctttatatcattcgatgattgctcctaccatttacagtgatgtggacggcgcctattacggtcccgacaagcaagtgcaccgggtagagggctggacaaattacagtactttctccttgtgggacacttaccgtgcggctcatcctctctatacttttattgagccggaacgggtgaatgatatggtgaagtccttcctcgccttcttcgaacagaacggccgccttcccgtatggaattttcaggggggcgagacagatatgatgataggttaccactctgtgccggttattgtagatgcctatctgaaaggtattggggacttcgatgcgaaaaaggccttggaggcttgtgtagctactgccaatatcgattcctatcgtggcattgggttatataagaaatatggctatgttccttataatgtgacggatcagtataattcggaaaactggtcactttctaaaacactggaatatgcatatgatgactattgtatagcccgtatggcagagaagctgggcgataaggaggttgcggacgagttttataagcgttcccgtaattaccggaatgtctacaatccggtaagttctttcatgcagccccgtgatgacaagggagagtttatccggaacttctcgccggacgactatactccgcacatctgcgagagcaacggctggcaatacttctggtctgtgcagcaggatattgacggtttgatagttttgaccggaggtaaggaacggtttgcccagaagctggacagtatgtttacttacaatccttctgcagatgatgagttgcctattttcagcaccgggatgattggccagtatgcgcatggaaatgagcctagccatcacgtcatctatctgttcaatgctgtggatcaaccttggaaaacccagaaatatgcagcccgggtgatgcgtgaactctaccagaacactcctgccggtttgtgcggcaacgaggattgcggacagatgtccgcctggtatgtgttcagtgcgatgggcttttatccggtagacccggttggtggaaaatatgaaatcggtacccccctatatccggaaatgaagatgcacctgcccggtggaaagacctttacggtactggcgccggcggtgagcaaggaaaattgctacattcaatctgtcaaactcaacggtaagaactatgacaaaagttatattacgcatgaacagataatggatggaagtgttttcgaatttgaaatgggggataagccaggtcaggcatggtacagtccccgataaccggctaacatatgaatgaacatttcgacttgacatataaatcccttttccgcaggtattataccaacctgctgttctatgccacacgcattgtgggggaagaagatgcggaagatgtggtacaggatgttttcgtggagctgtggaagcggaaagataccatgaaggtgggagagcagattcaggcttttctgtatagggcggtgtatacccgtgccttgaacgttctgaagcatcgggacattgtgagtggctatgaggctgtcatgctcgaaatccataaaaagagggttgagttctatcaacctgacagcaatgatgtggtgaaacggatagaggatgccgaactcaggaggaagctgtccgatgccatcaatgaattgccggacaagtgccggatggtattcaaactcagctatctgcatgatatgaaaaataaggagatagctgatacgatgggagtgtcattgcgtacggtggaggctcacatgtacaaagctttgaagttgctgcgcgataaactggggtatctgaacctgatgttggctctgtttttcatcgggaaagtaagtgtttttgcgagcagcgttgttttattatcataatgaaggaaagaatgaataagttgaatgaggagatattggccaagttccttatgggtgaatgtacggaagatgaacttcgtgaggtgaacgcctggctggaagggtcgggtgagaatgcacgcgaattgttcaggctggaggagatttaccacttggggagactgggggatacttcgaatacacaagacatagaaaaggccgaaaagcgattgtttaaaaggctggaacaagagaagacgaaacaatacaaggtacggaggatggttgggtggatgcggtatgcggccgtatttgtgggcctcttccttttgggaactttcggctatcttttttatcagacttatagccagccggaaacattactggctgtcaccactcatgataagattaaggaactgaaactgccggatggaaccaaagtctggctgaataaaaacactaccctgaaatatccacatgagtttgcagggaagggaagaaaggtttatctggaaggagaaggatattttgaggtgatgaggaatctggaaaaaccgtttgtcgtacagagtgaggccatgcaggtcagagtattgggaactgttttcaacctcaagtctgacaaggctaagatgtctgcagtagctacccttttgaaaggcgaagtagaggtgaaaggtaatcatggcgagggtatgattatccttgcccccggacagaaagccgagctgaacggaatgactaggcgtctggtggtgaagcaggtggatacgggaatcgaaaactggcacaataatgagtttgtctttgagaaggctgacctatacaccattgcgcgtacattggagaattcgtatggggtgagggtaattctggcaccgaacatagatgtaagcaagacttactcgggtacactgaagaaaaaagagagtgtaggggctgtgctgaatctgataaagaatgccattccattggagtataaaattgtggggaacagtgttttcctctcctcaatgaagtaggaaggccgcacaaattcgagatatgacgagaagaatttatttaatactaacaactttctaatattatgcgaaaattaatcctattgtttttttttgtgagcagtgctttatggctgcatgccaaagactttacccagtatgtcagtcctcttgtcggcacgcagtctactttcgagctttccaccggtaatacctatcctgcgatcgcacgtccctggggtatgaacttctggactcctcagacgggtaagatgggtgacggctggcaatacgtctatacagcgaacaagatccgtggtttcaagcagacacaccagcccagtccttggattaacgactacgggcagttctccattatgccggtggttggcaaacccgagtttgatgaagagaagcgtgcaagctggttctcccacaagggcgaagtggcacttcctcattattataaggtatatcttgccgaacacgatgtggttaccgagttcacccctaccgaccgtgccgtattgttccgtttcactttccctgaaaatgatcattcatacattgttgtcgatgcctttgacaagggctcttatgtgaagatacttccggaacagaatcgtattatcggttatactacccgtaacagcggcggtgttcccgagaacttcaagaactatttcgtgatagagttcgacaagccttttacttataaggcttctgtagccgatggcgtcttgagcgagaataaggttgagcaggaagccggacacgccggtgctgttatcggtttcaaaacccgcaagggtgaagtggtacatgcccgtgtagcctcctctttcatcggttttgagcaggctgaccgtaacttgaaggagcttggcaatgacaatttggaaacattggttcagaaaggccaggatgcctggaacaaggtgctgggccgtattgatgtggaaggcggaacccttgaccagtaccgtactttctactcatgtttgtatcgttccttgttgttcccgcgtgcattctatgaactggatgaggcgggaaatccgattcattacagtccctacaatgggcaagtgttgcccggctatatgtatacggataccggtttctgggacactttccgctgtcttttcccattcctcaacctgatgtatccgtcggtgaacaggcagattcaggaaggccttgtcaacacctataaggaaagcggtttctttcccgaatgggcaagtccgggtcaccgtggctgtatgattggcaacaactctgcttccgtgctggcagatgcctatctaaaaggcgtgaaggtggaggacgtgcagacactgtacgaaggtctcatcaacggtacaaagaatgtccatcccgaggtttcttccacgggtcgcctcggctatgagtattacaacaagcttggttatgttccctacgatgtgaaaatcaacgagaacactgcccgtactttggagtatgcttataatgactggtgcatctaccgcatggcaaaagaactgaaccgtccgaagaaggagcagaaactctttgcggaacgtgccatgaactataggaatgtatttgataaggaaagcaagctgatgcgtggtcgtaatcaagacggccagttccagtctcctttctctcctttgaagtggggtgacgcctttactgaaggtaacagctggcactattcctggtctgtattccacgaccctcaaggtctgatagacctgatgggtggaaaagagtctttcgtagagatgcttgactctgtatttattgtcccgcccttgttcgatgacagctactacggccaggtaatccatgaaatccgtgagatgacagtgatgaatatgggtaactatgcccatggcaaccagcccatccagcacatgatttacctttataattatgctggggagccttggaaggcccaatattggcttcgtcaggttatgaaccgcatgtacactgccggtcccgacggttactgcggtgacgaggacaacggtcagacttcggcgtggtatgtcttctctgcacttggtttctatccggtttgccctggtacggacgagtatgtactgggcgcccctctgttccgtaaggctaccctccatttcgagaacggtaagtccctgacaattgacgctccggataactcaccggagaacatgtatattgagtctctcaaggtgaacggcgtggattattccaggaattatctgacgcatggcgatttgctgaatggcggtaccttgaggtttgatatgggcagccagcctaatatgaagagaggtacgcagccggaagattatccttattctttctcgaatgaactgaagaagtaaagaatagtaataatatagtaagaaaagggttgcctcgaaaataagttgatatatcattttgttatttactatctgtattataggtgtttttcttgaatcaggtggaaataattatttacttcgttagtaatattgagcaaaatgatatatcaacttattttcggggtaactcttttttttaggattaatgataaaaaagatactttttcagtaagtgtattttcattgtctgttgttttatataggaatgcgagagaatgaatctctcgaagtaatttattgtataacctataaattgtgtttatgaaagacaattatgcttttcggagttcgacgttcatgcgggctttattagttttgttgttcatggcagtttctatccagtggggctttgcccagttaaacctgaatgtgtctcgcggcacattggggacagtcattgaacaaatcaagtctcaatccaagtatcaatttttttatgacgacaaactggctgcgttgccggtagaaaacgtcaaagtgaacaatgcgtctatagaagatgctttgaatgttattctcaaagggaaagacatttcctataaagtggaggataacatcgtttatctttctgaaaagtctgctgctcctcaagagggcaaccaacaagggaaagaacggacgattaccggagtcgtgtcagatgacatgggacctctgattggtgtgaatgtattgataaaaggtaccagcaacgggtgtattaccgacctcgacggtaactttacgctgaccactacggaggcgaatccggtgattgtattctcttatatcggttatactacgcaggaaatccccgtgaaaggtaatgcgccgattaatgtaatgatggccggagatacccaacagcttgaagaagttgtggttactgcactcggtatcaagcgttcggaaaaggcattgtcctacaatgtacagcaggtgaatacagatgccattacttccaataaagatgccaactttgtgaactcattgagtggtaaggtagcgggtgtgaacatcaatgcttcttcatccggtgtaggtggtgtatcaaaggtagtgatgcgtggtacgaaatctatcatgcagtcttccaatgcactttatgtaattgacggtgtgcctattttctctggccgtggtactgccggaggtaaggagttcgactcccagggatcttcagaaccgattgccgatatcaacccggaagacatcgagtcaatgtcagtcctgactggtgccgccgctgctgccttgtatggttcggaagctgccaacggtgccattgtcattactacaaagaaaggtaaagaaggtaaggtgagccttactgtcagcagtaatactgaattcaccaatccgtttgtgatgccgagcttccaaaaccgttacggtacgggaaccggtggtgtgatgagcacttcaggagccatgagctggggagcgcctttgtctgcagccaataactacaattacagcccgagagatgattatttccagacgggtattgtaggaacagagagcatttctttgtcaaccggtacagagaaaaaccagacgtatgcatcggctgctgctgtaaactccaagggtattgttcccaacaacaaatacaaccgttacaactttacggtacgtaacaccactactttcctggacgacaagatgactctggatttcggtgcaagctatattctgcagaatgaccagaacatgacgaaccagggtacttacaacaacccgttggtgggtgcttatttgttcccgcgcagcaacgactggtctgatattagcatgtatgagcgctatgacgctgcccgtaaaatttatacgcaatactggccggtaggtgacgaaggtatggtaatgcagaatccttattggattaactaccgcaatctgcgccagaacaagaaggaccgctatatgctgaatgccggtttgagctataagattctggactggctgactgtttcaggacgtgtacgtttggataactccaacaatgattatacagaaaagttctatgcttctaccaatacacagctcaccgagagctcttcacgaggtctttatggtattaccaagacgcaggacaaacagttgtatgcagacttcctggtgagtatcaacaaatatttcggtgaagattggtcactccaggccaacgtcggtggttcattctccgatatacgttcggatgcaatgaaaacacgtggtccgattgctgatggtggcgatgccttcagcggcgaaccggtaggtttgaccaactactttgccatccagaacctgagtgccagcaagacacagcgtttgcaggaaggatggcgtgaacagacccagtctctcttcgcttcggctgagcttggttacaagaacacttacttcttgacgctgaccggacgtaacgactggccttcacagctggcaggtcccaactccaacagcaaatcattcttctatccttcagtcggtggttctgttgtactgtctgagctaatgcctaacttgaacaaagattatctttcttttataaaggttcgtggttcatgggcatctgttggtagtgctttctccagatatttggctaatccccactatgaatggaattcaagttccggccagtggagtatcacgacccaatatccgttgtacaatttgaaacctgaacgtaccaattcttgggaaatcggtttgaacatgcgtttcctcaagaactttgaattggacgtgacatattacaatgccaagactatgaaccagacattcaacccgcagttgcctgtcagcggttggtcggctatgtatatccagactggtgccgtacgtaactccggtattgagttgtcgctgaattacaagaatacctggaaagattttacatgggatactggtataaccttctccagtaacaagaataaaatcctgactttggcagacaatgccatcaatcccgttaccggtgagctgttctctttgagcacgttgaatatgggtggcttaggtgatgcccgcttcttgctgaaagaaggtgggagcatgggtgacctttactcactgcgagatatgaaacgtgatgccaatggacagatttttgtggaccaaaatggaacggttgctacggaagccataacggacccggataaatacatcaagttgggaagcgtacttcctaaaggtaatttggcttggcgtaataacttcatttggaagaatttcacagcaggtttcttgatttcagcccgtttgggtggtgtggtttactcacgtacacaagctatgttggactattacggtgtgtccgaggcttctgccgatgcacgtgatttaggttacgtgttggtgaatggtagagataaggtaaaccccgaaacatggtacggtgtagtaggtagcggcacgtctgttccccaatactacacttattctgctaccaatgttcgtctgcaggaagtatctttgggttacaccatccccagaaagttgttgaatgatgtgtgcgatatcaaggtttcgttggtaggccgcaacttgtggatgatttacagcaaggctcctttcgatcccgaaagtgtagcttctaccgataacttttatcagggaatagactatttcatgatgccggctttgcgtaacatcggctttagcttgagctttaaattttaataccaaacgatatgaaaaagaaaaatataataaataaattgattgttgctccgttggttatgggctttatgtcctgtaccggcaattatatggatatcaactccaatccttatcaaccgggtgatttgactccggatgattatgcactgggttctgccatgagtaacttggcaagtacggttatctcatcagatgtcaatacggcacagtttactgattgtttgttgggtggaccgttgggaggttattttgccgattcaaatgccggctggtccaatacaatatccaattttaatgctacaaatgactggacgcgtgtgttcttgataagtgaccgtatcatttcaacactttacggtaacttgagcacagtgaaacaagtatcggagaataccaataatccggttccttatgccattgctcaaatcataaaggttgctgccatgagtcgcgtgactgatgcgtatggtcctattccttattctaaaatcggtcaggatggcaagattaccattccttatgatacgcaggaagaagtatataacgcattcttcaaggaactggacgaatccatcgaggtgctgactgaaaacagaaatgcggcgttggttgcttctgcagatttcgtgtacagtggtaatgtacagaagtgggtgaagtttgccaattcattgaaactgcgtttggctatccgtattgccaatgtaagccctgctaaggctaaagaaatggctgaaagtgcagtgaatcacgagttgggtctgattgaaacaaatgcagacaatgctacatggaagtatttcggtacaattagcaatccgttgtttgtggcagtacgttacaatgaagaagcttcaggtggtgatacccatcctgctgccgacatcatctgctacatgaacggttacaacgacaatcgtcgtgccagctattttgaggaatcaaaatggcctggagagacttatgtaggattacgtcgcggtatcaacctcagtaagatgaaggagtatttcatcaattattcacgtgtgaagatttcctcttctgatcccgtgctttggatgaatgcggcagaagttgcttttttgcgtgctgaagccactgcaatctatggtttcaacatgaaaggaaccgctgctgatttttatgaacaaggtgtccgtctctctttcgaacagtggggagctaccggtgtagacagctatctggctgatgaaagcagtgtacctgctctttacaaagatcccgccggtcttaatacttatgaaaagaacctttcagccattactgtcaagtggaatgaaggggcatccaaggaagaaaaacaggaacgtatcattacccagaagtggattgcgaattggccgttaggtaacgaagcttgggctgactatcgccgtacaggctatcccaaactgttgcctgcaaccagtgaaggtaacttgagtggtggaattgttgatagcgagaaaggtgcacgccgtatgccttatccttctgaagaatatacaagtaatactgaaaacgtgcaagaggcagtaaacagctatctgggtggaccggacaacatggctactgacgtatggtgggcacgcaaataataacaataaatgctgaataattatgaaattatataagaaatcattcaaaggaatcgcgctggcagctttttccgtattggcattgtctgcctgctccgactggacggattcagagagtattaaactgaaagaacccggaatcgacgaacagtctcccgaactgtatgccaagtatctgaagaacttgcaggaatacaagaattctgaccataagattgtatacggctggtttgataatagtgagaaagttcctttcagccgcgggcagcacatgtcggatgttcccgacagcctggacgtaattatcgcaactactcccgatttggcggaattcgaattggaagatattgcaaatgtacatgagaagggaacgaaagtattctattccatcagctatgacaatatcttgaaggaacataccgacaaggtgaaagaaggaacagaaacatctgcattctcggcttatctgtcggctgagctgaacagactgatagctcttgaagcacctttcgacggtattgtagccgagtatcgtggtagcaatcctatctacatgtccgaagccgacaaggctgaagcaaaggcaaatcaggatactttcttcggtgtgatatccaactggaagagtgccaattcaggtaagcaactggtgttccaggggtatcctgccaacctgataggccagtctgtgctctcttcttgtgaccatatcatcttgattacaaatgatgtcacggatgttgcccaactggggatagaagcgcttcaggccttgatggcagacggtgttccggctgaccgcttcattgtatcggcatctaccgtctctctggatacaacagataagactaccggatattacaatgctttgagagctctgtcggaagctgcttattgggtgacagaaccgtctgcagagtttacaaaagctggtctggctattgagaacatgcagaatgattattacaatgctaccaatacctatcaatacgtgagagaagctatcaatattatgaatcctgctcctaaaaaataaaagaatatcatgaaactgaaaagtatatatttagtatcgatggcattattggcaggtgtatttgctgcttgtaatgataatgacgttgagaatttcgataatcaggtgtatatcaacggctcggcgatgaccagtactgtgttgttgaaaaacactgtttccgatacggaaggttcattccggatttcaatggcccgtcctgaatcgcaggatataactattgccttgaaggcggacccttcactggtagctacttataacgctacctattatgacacagccgaggctctgccggaaaactattatacggtagaaactccgcaggctaccattttggccggtgctgtcatttcagacgacatcactgtcagcttcaagaacttgacggagctggaccgtgagaaggtatatgtattgccggttacggtagaccaggcaagcatcggagtcttgaagagctccggtaccatgtactacgtgctgaagggtgccgcattgattaatacggttcctgatattaccaagaatctggtttacgtaacttggaccaatccagatgtagccaataatatgaataagctgacggcagaagcgttgattcgtgtaagcaagtttgacaagatgctgacttccattatgggtatcgaaggtaagttcctgctccgcatcggtgatgccggaattcctcaaaaccagttgcaggtggctacaagtagcggcaatgtgaccgatgagagtctggttattccgacaaacgaatggacacatatcgctgtgacctacgatgcggatgcaaaaacagttataatctacatcaatggtaagaatatgctggagactactttggattgcggagtcgtgaactggggccagaccatgaccgatgaaggtaacggattctggattggccattcatacaatcgtgaccgttggttggaaggtaatatctcagaggtgcgtatctggaacaaggtgttgacatcagcagaaatcaatgcaaaggaccacttctaccaggtagagccggatgctgacggactggtttcttactggaagttcgatgagggcgccggtactgccattcacgattatagcggaaatgagaacaatgctactgcagtggaatcattgacttggactgctgtggaactgcccgctaaataatttagttataccttaattcaaataaaaagatattgattatgaaatatatgaatcatgtaaaatcaggcttgctggcaatggcttttgcatgtgcaggaatatgcttcaccggttgtgaagatgatgttgtcatcaacaccggcaacagtgacaagctggatactgtggatggcgtgtatggctatgtaaagtctgccgccggtgcacgtgaacttactccgatttctgtttttggcgacaaggttgctaccggacatctctattttgaactgagcaaagctgcagagcaggatgttacggtgaccttcaaagtggacgaagacgttttggaggcttacaataagaagaatggaacaagctataaaatgtatcccgccgataagctgagcctggcgaacggtggaactgccactatcaaggcgggcgaacagaagtcggcttctgtggaactgaatatcaatgccggaggcacaatcggacagacttatgctgttgccgtttctgcatctgccaataacggtgtggaagtttctacaaacaatcaggaatatatttacttggtaaagcctttggctgctattcctgagagtatcagtaagggtgatatacttacacattgctttgtggaagtaaatgacgagaacatcttgaatatgggtgaatataccatgaagagcgacggaaagcctttctttgatgtagtcagcatttttgctgccaacatcaatgtggatagcaagaccggtcgcgtacatgttttctgcaatgaccaggtttccttcttgctgagaaatgcggataagttcatccgtcctttgcaggctaagggcattaaggtggctatgactattcttggcaaccatgacgaggctggtatgggtaacctttcggaagctgctgccaaagactttgccaaggaactgaaagcctacttggatatttatggtttggatggcatcgactttgatgatgagtacaccaactacaacaactccaatcccggtcccggcttcgaaacacgctcacgtgccaacttcgcgcgtttggtttatgagtgccgccaggtatttggcaacaagctgatcggtgtgtatgaatatggttcgctcgactctccagacggtgaggtagagggtatgaaggtaggtgacattgtggactatatgacctacggttactaccagaatcagaatcccgagggagcctttggccgtgaagagtctcattttgagaacctgcccaaatccaagtatgctccgctgccttggaagattaatgatgagttgaacggaggttggagtggatttgacaagagcaaattccagaaagtgaaagatgaaggttatggcattcagatgttctacaatcccaaaccgctggtgtatcagtattatacgttgctttcggaaataagtaaagtactttttgatgatgaagtggagtggagcggcaagtactggagccgtatcggtgaagcttatcagggcaaaatgttgggttatgaagatttggtcggcgagtggaaggtaacttccagtaactctctctttacctatgtggatgaagaaggcaatcctcgctggtgggattggaaaggcagtcaggagtttgagaagaatgtaattatagagaaggatgaagaaggtaccggatatgtggtttacaactggggtactttccccgaaatcaccggtaagtatccgatgcattgcgattactataacggtgcactgctcatctatccgcaaaccattcatgagggcgatgctgaagaccctgctacctacaagatgcatttcggtacttacagcaagaatttccagtggaaagcatatcctaactatgatgattactatatggatggtgctattgctcctaacggtgatatgcatatctatggcttaggcaacagatgggctatcaatccctataagtatgtaggcggtgagattgagaccgacatcttccccgatgttccttacttcgtgagtgagaactatacgatgaagaaggtacgctgatgccgtgttttccgtaaactgaggtttcggaaaacggatgcttgaaccttttcatacatgaaacaaaggagggctttgctcaaagtaatagggcggccctcctcaagcattctcatataacaagattctattatgaagctatacacctacttatacaataaacaatatgaagaaaaacatgaaatctagttccatactgttgggcggactttttctgctgggggcggtttgcagctgtacccagacggcaccggactatgcgtcttacgtcaatccgttcatcggtacgggtggacatgggcatacctatcccggagcggtagttcccaacgggatgattcagcccagccccgacacgcgtatctacgagtgggatgcctgctccggatattactatgcagatactactatcaacggattttcacatacccacgtcagcggtacgggttgtgccgattacggggatgtgctgctgatgcccactgtaggtcggcaggattaccactccatgggctcgaagagccagcagatggcgtacgcctctgccttttcccacgagaatgaaacagccgaaccgggatattattccgtatttttggaccgctacggggtgaaagccgaactgacctctaccaaacgtgcggcgattcatcgctataccttcccgaaagcggaagatgcaggttttatcctcgacctggattacagtatccagcgccagaagaatgaacagatggagctggaagtaatcagcgatactgaaatccgtggacgcaagaagactgtatattgggctttcgaccagtatatcaacttctatgccaagttctccaaaccatttacctatacgctggtcacggactccatggcattggacgaaggcggtccgcttctgcctacagctaaagctttactgcaattccagacggagcccaatgaggaggtattggtaaaggtaggtgtgtctgccgtggatatggacggtgcccgcaagaatgtggaagccgaaatctccggatgggattttgacggtgtgcgccgtgctgcccgccagcagtggaacacttatctttccaagattgacatcgatacgaaggacaacgaccagcgtaccatgttctacacggcactttaccacacgggtatgcagcccaacttgtttaccgatgctgacggacgttactttggtatggacttgaagccccatcaaggcagggtggacgagcctatctacaccattttctctttatgggacactttccgtgcctatcatccgctgatgacgattattgatcctgaactgaacgaggctttcatccgttcgctcatccagaagtcccgcgagggcggcgtcctgcctatgtgggaactggccggaaactatacgggtaccatgattggttatcatgcagcctccctcatagcggattcttatgtaaagggataccgtaacttcgacgtgcaggaggcttacaaggcttgcctccgtacggcagaatacgatacgacgggtattatcacccatcctttggttgtgccgcatctgatgccgcaggccaagtactggaagaacaagattggctacgtgccttgcgataaagacaatgaatctgtggctaaagctttggaatatgcttacgatgactggtgtatctccgtactggcaggtgccttggacgacgaagccaaccgcgataagtatgcggcttttgccgagggatataaagtttatttcgatccgagtacccgcttcatgcgcggactggacagtgagggcaactggcgtacgcctttcaacccccgcgcttccaatcaccgtaacgatgactattgcgaaggtacggcatggcagtggacttggttcgttccccacgatgtggacggactggtggaactgatgggaggacgcgacgccttcatcggcaagttggattctctgttcacggccgattccaagctggaaggtgaatcgacctcggtggatatttccggtctgataggccagtatgcccacggcaatgagccaagccatcacattgcccatctctacaactacgtaggccagccctggcgtacgcaggagattgtggatgaggtgctgcatacgctttacttcaacaaccccgacggactttcgggcaatgaagactgcggacagatgtctgcatggtacattttgaatgcgatgggcttctatcaagtatgccccggcaagccggtatattccatcggacgcccgctgttcaacgaggcgaccgttcatctgaaagacggcaagtcgttcaaggtgatagcccacaacaacagccgcgacaacaagtatgtgcggagcattgtgctgaacggcaataagttggagactccattcttcacgcatcaggatatagtggacggcggtacgctggagctgactatgggcagtgaaccgttgaagtgacacagataatatacagaagggatgagccgaaaaaatcataatcctatatcgtgggtccccaccgtatatttcgccatgggattgccgttcgtggtgctgaacatggtttctgtgttgatgttcaaggggctgggtatcggtgacgcgcagattgctctgtggacgtcgctcatcatgatgccctggacgctgaagttcctttggagtccgttccttgaaatgttcaagacgaagaagtttttcgtggtactgacgcagatggttaccggagcaggttttgctctggtggctttggcgttgcagttaccgttcttttttgcgatatgcattgcgctgctggcagtgattgctttcagcggagccacgcacgatgtggctacggatggtgtctacatgtcggaactgaacaagcaggaccaggccaagtatatcggttggcagggagccttctacaatatagcgaagattgtggcgtccggcgggttggtctggctggcaggtgccttgctggtaggtttcggtggggtggagggtgccacagaggcagtccgccacgaggctacccggcatgcatggatgacggtgatgctgatattggcggcggtgatgctgctgcttggcttctaccacatgcgcatgctgccatcgggcggtgctgccgcatccggcgccaagtcggcaagagagacgtgggagcagttggtggcggtaatcaaggatttcttcttgaagaagcacatctggtactatatagcgttcattatcctttatcgccttgccgagggttttgtcatgaagattgtccctcttttcttgaaggcggagcgttcggcaggtggcttgggactgaatgagcagcagataggtttgtactacggcacttatggggcggcagcctttgtgctggggtcactgttggcaggctattacatttcgcaccggggattgcggcggacgctgttctctctgtgctgcatcttcaatctgccttttgtggcgtataccctgcttgccatgtaccagccggaaagcgggttgctgataggtagtgccatcgtgctcgagtacttcggttatggttttggttttgtgggactgactttgttcatgatgcagcaggtggcgccgggaaagcaccagatggcacattatgcctttgcttcgggcatcatgaatctgggtgtgatgttgccgggcacaatcagcggttttgtcagcgactggttggggtacgaggcgttctttaccttcacgctgtttgccaccattccggcgttcctcattacgtacttcataccatttacgtatgccgatgagaagaaacaacaataaccaattaataatatagagcaattatgagcaacaaaatcacaatgccttgggaagaacggccggcaggctgtaaagatgtaatgtggcgttattcggagaatcccgtaatagaccgctaccatattccgtcgtcgaacagcattttcaacagtgcggtggttccgtttaaggatggttatgccggtgtgttccgttgtgacaaccgggcggtgcagatgaatatctttgccggtttcagcaaggacggcatccactgggaaatagagcatgagccaatcaagttcaaggccgggaatacggacatgatagagtccgaatataaatacgatccgcgcgtgacatggattgaggaccgctactggattacgtggtgcaacggctactacggccccaccatcggcatcggctatactttcgatttcaaagagttcttccagtgcgagaatgctttcttgcctttcaaccgcaacggtgtgttgttgcctcagaagttcgatggcaaatatgcgctcttgagccgtcccagcgatagcggacatactccttttggcgacatctacattagcttcagccctgacatgaaattctggggcgaacaccgccatgtgatggctcctacgcctttccccgaaagtgcctggcagtgtaccaagataggggcaggttcggtaccgttcctcacggacgagggttggctgatgttctatcatggcgtgataaccacttgtaacggtttccgttactccatgggagcagctattctggataaggacaatcctgccaagttgctctaccgcacccgtgagtatctgcttgcgcctgctgctccttatgagttgcaaggtgatgttcccaacgtggtgttcccttgcgcagcgttgcaagatggagaacgtgtagctgtatactacggtgcagccgatacggtagtggggcttgcctttgggtatatccgcgagattctggagttcacgaagcgcacaagtattttgtaagtaccaagcagttggcaggcgctcggtattgctgaaaagcgcctgccgtaactgccttatacttagtgtaatatcactgcaaagatactgcatgctttttgcagtgctactgcaaagccgttgcagcgccactgcaaagctgatgcagcgtcactgcaaaactgttgcagcgctactgcaaagtagtttgcagtgtcactgcagaccgtttgcaataactttgcagagtgcatgcaatgacaccggcatgggtagcgtgctcactaactaataaagaacaaatccttactatattatgaaacgactgattactttctgtatcatctcctttggaatgctcacggcatctatggctgcggagaagcatcctgcggactatgtgaatccttttgtcggtaccaccaacttcggtaccacgaatccgggagccgtctgtcccaatggaatgatgtccgtagtgcccttcaacgtgatgggttcggaggacaacaaatacgataaagatgcccgctggtggtctactccctatgagtatcacaattgtttcttcaccggatactcgcatgtcaatttgagcggtgtgggctgtccggaattgggttctctgctgctgatgcccactacgggagagctgtccgtagattataaggaatatggaagccgctataaggacgagcaggcatcccccggatattacagcaacttcctgacccgctacaatgtgaagacggaagtgacggcaactcctcgcacgggtgtggcgcgtttcacctttcctgccgggcagagccatgtgctgctgaacctgggcgaaggcctgaccaatgaatcgggagcttttctgcgccagacgggtaaatgcgagtttgaaggtatgaagctgctgggtactttctgctacaacccacaagccgtttttcccatctactttgtgatgcgtgtcaacaagcagcccgccgcttcgggctactggaagaagcagcgccccatgaccggtgtagaggccgaatgggaccccgataacggacgctacaaactttacacccgctaccagaaggaactggcgggagatgatatcggcgcctatcttacattcgataccgaagaaggcgagcaggtggaagtccagatgggagtctcttttgtgagcatggagaatgcccgcctcaatctggataccgagcagcagggaaagaacttcggtcaagtgctggaagaagctcgtcgccgctggaacgatgacctttcgcgcatccttgtagaaggaggtacggaggaacagaaaaccgttttttatacggcactctatcatacgctgatacatcccaatatcctgcaggatgtgaacggggaatatcccgctatggagagtgataagattttgactacccaaggcgaccgttataccgtcttttctttgtgggacacttaccgcaatgtgcaccagcttcttacgctggtatatcccgaacggcaattgcagatggtgcgctccatgctcgacatgtaccgcgaacacggctggcttcccaaatgggaactctacggacgtgagacgctgaccatggaaggtgacccttccattcccgtcatcgtcgacacctggctgaaaggtctgcgcgactttgatatagaactggcctacgaagccatgcgcaagggagccaccctgccgggagcggagaatctgctccgaccggacaatgacgactacgtgtcattgggatatgtgcccctgcgggagcagtatgacaattccgtttcacatgccctggaatactatattgccgacaatgccttgtcgcgcatagccgctgcgcttggcaagaaggaggatgcccgtctgttccacgaacgttcgctgggctacaagcattattactgtaaggagtacggtactttccgtcctatcctgcctaacggtgaattctatgctcctttcgacccgaggcagggagagaactttgagccgaaccccggatttcacgaaggttgtgcctggaactatactttctatgttccccacgatgtgaaagggcttgcccggctcatgggtggaaagaagccgttcgtagacaagcttcagcgtgtgttcgacgaaggactgtacgaccctgccaacgaaccggacattgcatacgcccatcttttttcttatttcaagggtgaggagtggcgcacgcagaaagagctgcaccgccttttgcagaagtatttcaagaatgcccccgacggaattcccggcaatgatgataccggaacgatgtctgcttgggctatcttcaatatgatgggcttttatccggattgtcccggagaaccggcttatacgctgtctactccggtatttgataaggtgaccataaagctcgaccctaagtattggggacgcgaccaactggtgatagagacggaacgcccgtcggcagagtcgctttatatccgtgaaatggaactaggaggaaaaaaactgtcccgatatcgtatcactcatgaagaactggtgcagagtggaaaactgcgatttagtcttcgataggtattgtgagtcaggatagcatcggtgatggtttaggttgcccgtcgttgacagagttcatgtcagtggcgggcttttttatgcaggttggcttccggtaggttgatagggtatttcgaaccagaattcggaacctttccccggaatagagctgacgcccacttttccgttcattttctcggcaatcatggtgcagatggagagtccgagacccgtgccttgtttaaaactgtttagcttgacaaagcgttcgaatacatccttttgcttttcaggaggaatgccgcaaccggtatcacggacaaagaagcgaatcctgtcttcttgcggcaggtgataaccaatgtcgatgaaaccttcttccgtatgcttgagggcgtttgacagatagttgttcagtacttgtcttacccgtttggggactgtgtgaataatacagtaatccgcaccgggcaggagacgtatactgacttcggacggaagtttcagttttgccatcgtctgcatttcatcaagcgtcttgtttacatccatatctccttctgtgaattcgagaatgccggcttcgatgcgtgacaggtcgagaatatcgttaatcagttgcagcagcagctgggtgttttcttcgatgatatgtatgtattcctttgtatcttcgtcttgtattgcatcggaaagtatggaggagaatccgacgatggcgttcagtggagtgcgtatttcgtggctcatgttggcgagaaaagccgatttcaggcggttggcttcttctgctttctctttggctgccagcagttcggtgatgtccagtgcagaactgacaatccacctctcttttcctttgttgtaggacaccagcgttttgtgaaacgacagaatatactctctgcctttgggattgacaaagtgtttgatgtaggactggggagtttccgactcttcaacttctttgtctgtctcttggatgaaattatcttgcattaggggtttgaactcctcttcatagtgtcccacaatatcctcagcggggacttccatcatctctgccgcttttttgttccatatcaggtagcgtccttcatcgtttttgtcttttactgtcgtggcgatgggaaggttctccagaatactttcaaggaagaaacggtatttttcgttttcccggcgttggacttcatcttccgtaatgtcgcgtatgaaggccatgacattatttctgttgaggtagaccatgcgcactgcgatatatagtttctcaccactttctattcttatctttagggtcaggctgtccgaagtgcgggtattcagtacgcgtaacagcgacgtcatgtatttccggcattcatcggcgtctgtcaccaaatctttgatgttgagagttcccaggttttggaacggaagtctgttcgccttttcggtaggtgtattgagcagttttacgacaaaaccttgtctgttcagcagatataccggaatgtctattgcccggataatctgcctgttcagacttttgtatttataatttatccagtatagaaagcttgcagatgtagcggcaatcaacagaaataactgtatttctccaaataatgtaagatgcatacgcggtatctttcatttcgtctgtccccgttgacgaaggttattatataaaaagcgcgaggactgttattgcctatctgcattcgaggctctggaaaatgcccacgtcataaatagacaacagtccccacgcctaagtatataataacatagacgtgaagaaactgttgctatcatcccatgacgtttattgaattttccagattccgaataggcagggataataactttcgcttcttgcgttcttatcgaatcaagtcaaaaatggccgttatcactataactgccaagactttggtgcaaaagtagtatattttttttggatgtacgatatgatgaggagaataaagtgtatatgcaaacaaagcgtgatggtatttgaccgtcacgctttgtatagcttgccattaaaagttgttagagagaattgttagaggatttatttcatggcttctatggtgtatccttgttgtttcagaaggttcaacactccattgtctccgggcaggtgtccggcgccgactacgaaaagggtgggggcttccgtcatgatggtaggcatcttttcaacccatgccttgttgcggttgtccagcatggcttccatctcaccgggtagtgggtcacatgaattgccgtcgcgctcttccatcagttgcagcatggcgtccagatcttgcttttcataagcggcaatcaggcgtttgctttggtcgatacctttctcaatgtcgctgatggcgcagtagaggaggcttgcctggcgttgcagcgtctggctgttgaacagaatgtctatttgtgactgggctgtttccagaccgccaattttcttgccttgctgtgcggcctgctgctggaagtaagtgtcaagctgttcttgcgggttgaagcccggagtgtgtttcatgtagagcaggacgacaagctgctggttgatggcagccggtttcagttgtgccagcatggcaatgtccaccatcatgttttccttgatggctttgcctacttcttcgtattgttcgggagtaaagaggctttgcagcgtggtgtctttgggtatcatcatctgctgttgcatgctttgcatgaaggcgggagtcgccatttcgctcatcacaacttccccgtagacttgggcggtttcgctcatggcctgcggcatggcggcaatgctgtcctttatactgagtggagagaggtgataagtaccgaaaatataggatggtttctctaatcctttaccggatactttccataaaagttgtgcattggcgctcagcgcaatgctgatgaataagaggatgcctaaaagtttcttcattgttttcttcttttaatagtttctggactatcagtcgggacagagtaaagaaaatcacaagaagggaaaaattagtattattttattcttcctccgcagagccagtgttgggtgtaatatttttcccggaggttgctgactatgactccctggctggtgctggcatgtataaacttgccgtccttgaggtagatgcctacgtgtgccacttttttgcgggaagcacggctggtgaagaacaccaaatctccctcacgcaagttgcggcgggagattttactgctctctttcagttgcccgtctgtgcttctcgacagacgggtgtggtaaactttcttatacagttgcgataccagtccggagcagtccgttccacgtttgctgtcgccacctgcgcgatagggggtgcctatccattcggaggcatggatgtacagcttgtggttgtcctgcagttcaatatccacccccaaacggacggatgcttgcgccagggctttgtagtccaggcgtggcgcggaagtatggcaggaacttaagcctatcaatatgatggtaagagctactatataagaaagatattttttcatgcttccgaattttttttttctaccgttttatcttctttttccgttatttcttctacggctgcttctactaccgtttcttctaccacggcttcttcctccacaccgacgttgaagtaagcttccaattcctgctcggcagagttgttctcatttcgtatatcgcggataataacaccgttttctaacaatgcaatacgtggacaaacgtccactgtgtgattcaggttatggctggaaatgatgacggtggctccgtgctcttcattgtatcttttcagcaagtgtttgattacagactgtgaactggggtcaaggaagttgaacggttcatccagaatcaacagttgcgggtgatgtagcatagcggagatgatgccgattttctgcttgtttccggcagaatagttgcgtatgaattttttctgccccatcacttcgccgttcatgaagcgttcgaagggaagcaggcgttcgtctacctcctctttcttcagaccgtacatcttaccgatgaagtagaagtattcttcgggggtgaggtagtctatcaggaaaccgtcgtctataaaggctcccgtgaagttcttccagtcctcgcttttgctgacgtcaatgtcattgatggttacatagccccggtctgcctgcagtaagtcaagaataagccggaagagggtggtcttgcctgcaccgttgttgcctaccagtcccagcatatcgccttgcccgatggtgtagttctctatatctacggctttttttgtgccgaaattcttttgtaatttgttgatgcgtatcatgttagtgattgatgtttaatgatttctatttctgtctactgtccctgaagccttccatattcttgtagcggcgtttcatgagtcggtgatatacattcatcagccagaatttggaagtggcgatgaatgccacgccgatgccgataagtatccagggggtgacctctttgccaaagatggcattcagtgcaaaaagcagcagtaaaggtatgccgaaagcacctcctgaaatcagattctgcagaccggtgcctatattctgccggctggtcatctttgaattcaggtcggtagtcttgttgttgtagactgccagttggaacagacagcagtatacggctcccggaatgaatatcagccatgcaatgcaaccgagtacggataccttcccggtaaccataccgggaatcatcagaatcgtaggaatgagcaatgcaatgctgtacagtatgtatttggcacgcagcagcgagtagatagattccttgcggctcatcagtccgtcaatgtaattgccttcgtaacccatcagtgtgctgaggaacatgatgccgaagataatgtaattataaaggacgaagaaatctctcagacctccgtcatacacatcggaaaagctaatgatactactgaacattatcactacaccggtgatggaatagagcgaacgcttacaaatcttgttgcgtagcaataacttgagttccagtctcatgtattcgcctatttcgccgtagcggtcgaggaatttgtattcggatacatgttttatccgtgtatcttccactttgttcagttcattgtagatgagtttctgcatcagggtgcggttgatgaaccacatgagggcgatggcagccagtacaccgatgaatgacagtatattaccggtgatgaacccttctcccagattgacaaaacagtcgaaaagcggactgttgtccggaatgaatagtgcggcggcaatgccaccatatactactaccggtaatgccagccaccagatgcgctcacccatcagtgtgcggcacaacaagaaccagtagttattgaataccatcagcagccagatgccaatgcaataggtcagcacaccactgattccatagaatttggtgacggtgatgatggaaaacggaacaaacagaaacagccagaacagattgaagccatccagtccggaacggatcagcaggaagtctataagacgattccgtttgatgggaagcagtaggtagggcttcacttcctgggtgggtgttttttggaaaggcaggcgtatcaggaaatccagcacaaggacaaatatcaatccggagttcattacgtgataggcttctgtggcaccaccgtcaaaggcgaatgcaaaggtcgtaccgaagaatatcaggtaaccggcccagaagacgaacatgaagtacatccagaattttccgaatttacttttttcgtacatcggatttcgtttttctgccagttttccgtgcttgcgcaaatctaagaaaagactcatagtatttgtatatatagagtttgtataaaaaaagctgcgctgcctttcatcgaacaacgcagccttctgtgtgtatggctctcttattctttatcaggagtttcaggactgatcattgatacctcaatctcattcttctgcttgaacaagtcgtcggtgaacttttggatgtccttcacggtgatgctgttgacaatctgttcgtaatcctttatcggattcataccggtgaacaggtattcgtcaatgctgcccagccagtagctgttttccttcaagtcttcggtgtgttttttcagcatgaactccttcactttattcaggtctccttccgacggacctgctttggcgatgttgtcgagttctgtaaagataatctgcatcaacttttctctttttgccggagcggtttcgaatataatttgcagaagggccttttctttcggatatttgcttaactggccgcctacatatacaccgtaagtgccaccttcgtcttcacgtaccttggctgtataaaccaagtcaagaatctggctggtcatatccagcaggatgttatttttcaggtcgtacttgcagtcaccgttcagcaggacaaaattcgacgctttagcagtttcctgcttccttacgaactcattcttataaactccctggcgcatgtcgactttattgtccttgaatgtttccttgcggttgatggcaggcagtgaacccaggtactcggcgatgagtggtttcatttcctccacattcacatttcctacaaagataaaggtaaaatcgctggcatctttgtagcggtcttgatacatggacagaatcttgtcataatccatcttgtcaatcatgtccgcctttattctggctcttctgggatggtgcatgtaaataccggccgagacagagtcactgaacgccacctggggattcatttccatattctgcaaagcagctttgttgcggttcttgtaggatgcgaaggcatcgtcgtcacggcgtggagcggtgaacgtcaagtaagtgagctgcatcattgtttcgaagtctttcggtgaacagctgccattgacggtttctgtcttgtcaccgataccatagctgacggaagctttcttgccggccagaactttttccaggtctacggcactgaaattacccagaccaccgacactcactgcatccagtccgttgatgttgatgatttccgagtcggggaacagggaactaccgcctaggctgactcccttcatgcggatttcgtctgccttgaaatctgtcttcttgataatgaccttgactccgttggagagtgtcagcgttgtagtgccgaatgtatcatctgtctgctcggatacaatctttccgcctttcggggcttcggccatcaaaggttcatccgacaccttgtctacgtaggcagtcagtttttcagctttaatatctttcagaatcttcttgattgcatcttctgtcggcattttcaatccttccttatccggaccgagaattgcgactacctggttactgtctgtcacgagggcttgcatcatctggttcagtgcggcaaccggaatggcgggagctatctgattgatgatggcgtattcgttttcgatgcccggaatcggttcgttatcgaggaaatgacggacatattcatccacgtactcttcattcttgcgtttgtcacgctcgttataagcagattccagttggcgcagatattcggcacgggcacggttgtattccgtttccgtaaagccgaattggcgggcgcgttctgtttcgcgcaggagagtggctattccattttctatggcatcttccttgcagacaacgacaccggtgaaggcatctttggttttggcaacaaagaaatcatcgttataagtggcggcatatatataaggaggattggcggtctgtaccaattcgttcagacgcgcattcagcatattgttgatgagcgtggttgcataattctgtaccagatagcccatgtcgcctttctgctcgtcaggagtggcttcgtgcttgttgaagatgagggcttgtacattggactgttccttgtcctgataaaccaatacaataggctccttgttgtcgtttaccggatagtactcgcgtttggcagcattgggctgggcgggaatatcagaaaacattttcttgatttgggcttcgatggcgtccacatctatatcgccaactaccacaataccctgaaggtccggacggtaccacttttcatagtagtctctcaaagtttgcggtttgaagttcataacgacctccatcgttccgatagggaaacaagtggcatacttcgttccttcgaacatgactggaagcatcttctcctggaagcgttgtatggcgctcatacgggtgcgccattcttcgttgatgactccgcgttctttgtctatttccttcgggtccagggtcaaatcgttactccagtcgtgcagaatcagcaggcaggagtcgatggctcccggagtagtgaccggcacattggaaatgttgtatacggtttcgtctacggaagtataggcgttcaagttctcaccgaatttcaccccgatacgctccaggtattgcttcagtgcatcaccggggaagtgggtcgttccattgaaacacatgtgttccaggaagtgggcaaggccgcgctggtcggcttcttcctgaatggagcctaccttttgggcaatgtaaaagtcggcccggtttgcaggctggctgttcttgcggatataataggtcaatccgttgtccaactttccgatacggacatttttgtcgaccgggataggcggcatttgctgtgcaaatacctgctgaaaattgcagcaaagaattaacgctacaatccataaaccacgtaatagatgtttcatattattatgaatttaaattgttcttgaactatctgtcggacagcccttggataaatcacaacttctgttgtttttttcggattccattccggataaatggaatttatctgactgcttctcggatgcggaccaatttggtcagcaggtcttccagcaggtcgagtttcagcatgttggcgccgtcactcttggctacggcgggattttcgtgggtttcgatgaacagtccgtctacacctacggcaacaccggctttggctacggtctcgataagttgcggcatacctcccgtgacgccactggtctggttgggctgttgcaaggagtgggttacatccaggatgacggggaaaccgaaggtctgcatttcggggatgccgcgatagtcgatgactaaatcctgataaccgaaagtagttccgcgttccgtcagcatgacgttcctattgcctgcttccactactttatcagccgcaaagcgcatggcaagcggagagaggaactgccctttcttgatgttgatggtttttccggttttggcggcggctacaagcaggtctgtctgccggcagaggaaggcgggaatttgcagaatatccacatattcggcagccatggtggcttcttcggctgcatgaatgtcggtcacggtaggtactccgaaggtggtgtgcactttttgcagtatcttcagcgccttttcgtcgccgatgcccataaaggaatccaggcgggagcggttggctttgcggtacgaccctttgaatacataggggatttgcagtttttcggtgatagtcacgatacgttcggcaatgcgcattgccatttcttctccttcgatgacacatggacctgccagtaggaagaagtttccggcaggattattctttaattcaatcataggttgttactgattaagtattttcaattgggtataatcaatgttattgcttcatgcagtacgctgatgtccagtggaaaatgacggtcgagaatacgtccgtccaaatcgacagaggcattttgcgcacgcagcacttttactttttgcgtacggtagggcatcactaccttatggttcagaatccgcccttggataagcatccacaatcccgaccatagttgcagcaattcgggacggtaaatgacggaaacatccagccagccattatagggcactgcactaggcgcttgtccgtatccccacgcactgcctatgcagacagtcatgatgcgtccgcgtatatgctcgccgtttatcttgagatgcatgcggtacagcttccgttcgaagataatggatagcagtgccatgaagtaagagaggaacttcactccccagaaacgcttgcactggtcggtgattttcacgatacgggctcccaggcctatgttgatggcattgagaaagtagcgtgtcagatgcttttcaccgtcgtaataatagcaggtacccacgtctattttccggcggcggttgttgataatgcaatccaccgctttcttgtaatccgaactcatttcccaatagtcggcaaagtcatttcctataccattggggatgatgccgatggctatattctccttgtccggtgcattggaaagcatgatgccgttaatgacgtcattcagtgcgccgtcaccgcctactacaacaatggtgcggtagccgttgttggcgaggatgcctgccagacgctctaccgaaccgaacccttcggactgcacatagtcgtaaggcacacctttgctgtccatgtattctttgatttctttccaccgtttctgcactttccgtgttccggctttggggttgtatatcactcccaacttttcgggttctgcactcatgattctatttacaatttgactatttactatttacgatttaaatcacccggtcactttatcatttcatcatccttccaacttcttctttacaaaagctatcttttcttccatcggccaccgggcattcatccaatggatggtaaatccacgccgttccatacggcggaaccaggtcatctggcgtttggcaaactggtggatggctgtttccagttgcgtgaacatctcttcataggtcaacttgccgatgacataaagtgtcagatacttgtattccagtccgtaatagatgaggtcatccggttggatgccttgctctatcagacgtcgcacttcgtctatcattccttcttccaggcgctggtgcaggcggcgggtgattttctcccgacgcaattcccggtcgatgtccacacctatgatgagactgttcatctgggggaaggaacgttcgtctactggggtatgggcataatactcttcgatttcgatggctcgtatggcacgtttggctgtgtccacatccgtagtattgtgcaggcttttgtaacctttcagtatgtcggtcagttcttccagcgatttgtccgccagacgggtgcgcaactcaggattctcgggtacgggcagcagacggtagcctttcagcactgattcgagatacattccggttcctccacatacaacgggcaggcaacctttttgtttaatagtctcgtaagcattcaagaaatcacgctgatactcgaaaacattgtacttatagcccgggtcggctatgtcgatgaggtgatagggaatctgtttcccgtcgacggtatagtcggcaaggtctttgccggtgcccaggtccatcccccggtagatttgccgtgaatcggcactgatgatttccgtatggagttcggcggccaaggcggctgcaaatggagtctttcctgaggcggtaggccctaatatggcgattaaatcatagtctggcatatataagttcttgttaatctcattacaaagatagtgcaaaccgaatgcagaataaaatgaactcgttcattttttatgctgaggtgcagcttatcttcgtgttagtgcaaagataatgcaaactgggagtataatggaaagaacttgcttatttttttacgtgatgctatacctccttttctattttgaagcagaaaaagtgaaaaaggacgtgaaaacgagcatttatcttattaaaatgtgttatgaaaaatgctttttttcttggaaagtttgtcaatgtcccaaaagtccgtacctttgcaatgtgtttttcatagtattagatttaaggttaacaaaggttggagtacagcggtactcctttttttatgccctaaactgaactttggcacatttttttctgtacttttgcactatatcttgaatgaacaaacatattcaccttttatgaagctctgtatatagctacgctcaacgaatagccctgcttgataaagctattcagctatctggcaagcgatgccccgtttgccatagagattgtatatccttttattcatgaatttgcaggatagcatgctgtacttgtacagtgtgttgttttgtgctattttattgttgagcaatgcattatacatataaacagatatggcttatcaactttccggtaatgatgagcattttgatggagcagctgataaatataaccgatgctgttttcttaggtcacgttggcgaggtggaattgggagcatctgccattgcagggatttattatttggcgatctacatgcttgggtttggatttagtatcggattgcaggtgatgattgcccgaaggaatggagaatgtgattatggtaaggctgggaagatattctttcaaggtttcttctttttatcgggattggccattttgctttgtctgctgatgcaggcaagttctcctttcatattgggaaggttgatttcctcaccggagatttatcgggctgtaattcagtatctggactggcgcagtttcggtttgctgttttcgtttccgtttttggctatccgttcttttcttgtgggaataacatgcactcgggcattatcgtgggctgcagccgttgcagtagtgattaatattcctttgaattatattctgatattcgttggaggactgggaatatcgggagctgccattgcttcttctctggcagagatgggttctttggcgatgcttcttttctacgtatggctgaaaatagataaagggaaatatggattgaaaccggtatatgacggaaagctgttggtagatgtgctgagcttgtcggtatggagcatgcttcatgcctttatcagcgtagctccgtggctcttgttttttgtggcggtggaacatttgggtaaaacggaattagccatttccaatattacgcgaagtgtatctgctgtcttttttgtaatagtcaattcttttgcggtcactacgggttcgctggtcagtaatgcgattggggctggagaaaggagggctgttttcattatctgccgtaagatactgaggttgggctattctgttggatttccactgataggggtagctgtatgctgtaatcgcttgataataggaatctatacagataacgaactgttgacggagcaggctttcatcccttttgttgtgacgttgctgaattatacctttgccttgccaggctatgtatatctcaacgcagttggagggaccggtaaaacccggattacttttcttttccaagtgactaccactgtcgtgtatttggggtatctttattggttaagcgcttgcactcatgcatccttggctatttacttaacggcagaatacctttttgtgattttgctggcactgcaatcggttttctatttaagaagtaaacaatattagaaacatatcgaattatgatgactaaaatatatccgcgtacgggagataagcaaaccgtatatcttaatgctgttgtaaaggatcctcgaatagaggttggtgactatactatttataatgattttgtagctgaccctttgttgttcgagaaaaacaatgtgctgtatcattaccccatccatcaggagaggctggttattggtaaattctgttccattgcttgcggtacgaaatttctgttcaactgtgccaatcatacgttgaaatctctgtctacttatacatttcctttattttacgaagagtggggattgaagaaatcggacataacggatgcatgggatgacaaaggagatattataataggtaatgatgtttggattggttatgaagcggtgataatggctggtgttcatataggagatggggcgattattggtgcacgtgctgttgtgactaaagatgttcccccttatacaattgtagggggaactcctgccaaagaaatcaggaaacgttttgatgaggatgtggtgaagaaattattgcggctgcaatggtgggattggtcgattgatgagatacgctgttacttgccgcatcttgtacaaggctgttgggatagatttccttaataatccatcatcagtgagttgccggtcttgcctcgtgaaatgtcaaggttaggcggtgcatagctctggttacagctacataaagcatactcttgtcaatctccgaacggtaatttctctcatccgtctgtggaataatgacttcgtcaaactcaagcccttttgccatgtgggcagaggtgatgacgatgccttgcacaaatgcggagctttgacttgataggaagctgatatcattggcatatgatttcagcatgtctgccatcttcctggcttgctgctccgtcttgcatatgatgccaagagacttatatccggatttccggtaagtggagattagccccataatgccggacagttcttctacggcactgccgaactgcaggatttgtggcttttctccatgccgggcaaccggttccagctctgcgttaggatgaatcttttgcgcaaaatccgtaatctcgaaggtggaacgataactcttacacaatttcatgatttcacttgcagtaagtgacttttggatagtttctgctgtggatgagccataaggattcacggactgtcctgcatcgcccaacacggttttccggcatggaaagagtttctgtattaccttgtactgtatgggcgaatagtcctgcatctcatctatcaacagatgtttgactctgaatggctggttcccgtttccctccaatgccaagtgtaggtatgccagcggtgccaagtctgagtattcgagtgtatgtccctttcgcattttgaacattccgggattatttgtccatttaaagaaatctttgtagacttgaatgtcgttattgcctgcaaacattagtctgatttcttttttcaaaaggtttctgccggcggtggttaccgtaaaggcgtattgtattttcaacatatccagcatataatcagccatagcatcaaatcgtcggcgtatgggataacggttgaaacgtaggtactgttcttcaataaacggggcaggtatggtgatgtatttggtcagcttcacgtctgctgccttgaagtaggtgttctctatgtggaggataaacttgtcaagctctgaaatgaagccgaaagaggctttataggctattctgtcgatgaggcttgaggatggcttttctaacagttcattcactagcccgaagtatgtttggtacttatatttgtgttccaacactccggagagtatttgttccatactggtttcgggcacggtttcttccccaagttcggggaggacgttggagatataatcggaaaacactttgttgggggagataatcagaatatcttttgatgagatgctgtctctgaaggtatagagcaggtaggctatgcggtgcagggctatggatgtttttccagagccggccactccttgaataataagcgtgcggatatcttcgttgcggataatccggttctgttcccgttggatggtggcaacgatatttttcatcttgtcatctgcattggaacttaactctttttgcagaatgtcgtcatggacggtcagggcactttcaatcataaattccattttgccgccccgaattctgtattggcgttttagggaaattactcctttaatctctcccgatggagaccgatagactgcttctcctaattcatggtcatagaacatgctcgaaacgggtgctcgccagtcatggataagggtagctcgactttccgggtcatagaaggtatggatacctatatagataggcatcactttgctgttttctttcttttccaaaaaatcaattcgtccgaagtaaggaatggcaagtatcttggtgagccgcttatgcttgttgattacactttcccccaaggcaaaatggttcaggatgctttcgcgcatggagcgtatctcgtgtgggtcgatgtctttgttggaccagatatagtctttgtattctgccaaggtgtcgacgtggtctttcacggatgcgtcggtattaccgataacctttttcagaaaactgattatttgctttaaatattctttctcttgtttctctgtttgattgaatgccataattagttgttgctaaaagataagacagtgtgcaaaattagtgtattgtatcgggaagggaaatggctatttatagctatatactgggaagttttatatctttgcacattcaaaaaagtggaggtaaatggacattcatgagcttgcaaggcagaatcagcaatctgcatggaaagtattggaagatacctgtattattgaagcatgggagcgcattggagcaaccgttcgtttggtgggctcactccgtactgggctgttggtgaaaagtagggatatagatatccatatttataccgataggttggatgtaggagagagcttttcggtcatccgggaacttgcggaacggttgcctttgcaggaaatacaatataggaaccttatccatacggaggaagagtgcatggagtggcatgctttatataaggatagagaacagaatatttggaagtttgatatgattcacatccggaaaggttccaggtatgatggtgttgtagaaaaggtgactgccgctattgcggagcgccttactcctgaaattaggaaaacgatattgcaaatcaaattcgatgtgccggatggtgtaacgattccaggtatagagatttatcatgctgtctttacgggaggtgtcggcacttataaggagcttgaagagtggcgcaaaacaaatcagttggcggatggtctcggttggcttccgtaatcttagaggtagataccaagattttctactatatggatggcttccattatattgttggcatttaacttgcttaggatgtttttccggtgattgttcacagtatagatgctcactcccagctggtaagcgatttccttgcttagaaaaccttgtcggatgagtcgtaatatttctttctcccggttggataattgtttgtcgggagaaacagtgcatgttggaagcatctctcccgtttttctgttcaccaccgtccgtttgattctttcgataggggtctggtcgggaagtatatccattactcccataattatccaggctttaccattccggtctgtttctatgacttgttgccggctgcttacattgatatactgttgccgtgcattcaacatacggaattgaaatatttgccggtaatcatttctttcttccggtgggagtgagtagatgaactgtccatgctcgatttggcattccgtgagttgcattctgtcatcaggatgtattctctcttccagtaaatcgccttgttgcctgattgtctttatccaagtgggattgtatccgaaaagatgggcaaaactgtcggatgcaaaatcgtatctctctttaaatacgtcaactgtaaaaatacagctctggctcatttgtgagaacgcttgcacggatattcttttcttgttccacaaatcatagtccacatcgggaccgctaatctgctgtcttgcccataattctttgggagttgtcttgttggtagtcatggaacaaagataactgataattttcttttgagctttatcttttacgggataatattatttctaagaatatgttgtagggttggattaagtggctacctttgtaggccgtgtcattggggacgtcgtgaatgaaaagcaaacgagtaataaattcaatatgtgataagatgaaagatataccggcagacagcttaataaagaattattttcctgtagattatatagattctttttctaaagtgatggtcactgggcaggctttgacaccggaagattttcgcaatcttgccttcagccgatttcctaagtggattggttggctcatgaattttaggaatgcgattgtaaagccattaggactggatacagcaactagatttacagatatggtcttggataaaaatctgcatgaagaaattctcggaatgccggataagcatcttgatttccatgtgtccatgtggtgcggggaatatcacgaaggaaaacaagaacttcggattactactgttgtgaagtacaataattggctgggaagggcatatttctttattatcagaccttttcatgggataatagtaaagtctatcttaaagcatgttgctggggatagggggagtgggtgtaaataaatactcccattgaaatattatcatttcaatgggagtatttatttgagtggtgccaccagaaccgaaagtcggtttgtatggcactatttctcaataagttatatctttatcacgatgttagtcccttgaataaggttttcacagctttgcaccgttcaacacaagtttgtatcttgggtacgatttctaaatgcaaaggtaatatttctttctaaaattagtgcttttgcatagaaaaaatttatctttgcaaaaaaatatgccacaaactatatcattatataaattgttcttggcatcaccaagtgatgtaaaagaagaacgtttaattgtagagaacgttattaacgattttaataatacatattcttcgcagttaaatgcaagaatagaattatgtagttgggaaaaatcgagttatccttctgtcggtgaatatccccaagctgtgattaattcccaaataggtgatgaatatgatatttttttaggaatattatggactagatttggttcaaagacactaaattatgaatctggtacggaagaagagttttatagagcattagagcgtagccaacaagccggtaaagtacatataatgatgtattttaatattgaaggagtacctttagattctttagatattgaacaatattctaaagttagagcttttcaaaaacaaatagcagaattaggctgttattattttacatatgtaagttcagagaattttaaaaatgatttgcgtgctcatttatataaagttatagagaattggaatgttaatagtaaacctttaactacacaagtaaatttgtccaatttacctgtcattatagaacccattgaagatgaagtctccgaattaggattattagaatttcaggatattttaaatactaagtctgcggaagctgtaaaatctttaaatgaaataaccgtttcaactatttggataggtgaacaaatttctgaatctgcccaaaaactgaatatgattaatgaacaaaagcctgtaaatcagattcaattagctagagctgttattaatacttctgctaaagcgatgaatcaatacgctatgaaaattgaacaaccaattcaaaattggattatttcttttgaagaaatcgtaggggcttttaaaggattattgcaagtttctgataatattattccggaggaatcttggcaagagaataaagaagcacttcgtttattattgagtaatgtggattcgtcatatgggcaattagtcgaattttacaaatcagttaaagggctacctaaaatgactcaatatattatattggcaaagaaaaatgtttgctctaaattaaaagaactattagatagtatagataggtgtaaaatatctgctaatgaaatgattgatttgattaataaaaagttatttgattcagataatttataaatattgtaatccattttttgtaaaatatcctccagttttgggcgcacccctaaactctattaagtctttgtcttgtaaaatcttgatatatcgcatagtcgttcttaagcttttgttgatatgcttactgatttcagaagcatttaagccgggagtagttaccagtagattgagaatagcttgttcattctcgtttatagtatcatttactatgtcatttactatgccatttactgtgtcatagttggcagagttagagatttggcgtttgaatactgctgtaaacatcccctctgtatggaattccggttcgggcagatttgcttccctcatggcttcctgcatacgaggaataccggatgcaactctttctactaagtgcatacgggtaaataaactgaaaattagtggattacgtgtcatgcttttatgcccgaaatctttagccacaacaggcagaagtcctccgggattggaaatctctacccggtcgtcaaacatttctatcataatgcttgcaccttgttcatagtaatcacgatgtgacagagcgtttataatggcttctttaaatacggtcagaggtatttcccaaatttcttctcttggtcctgttccctctattttataggctacttgcagtttactttccaaccaagctatagcctgtagatattgctggtacaatgagcctccgaatgttttatcatctataatatagactttattcgttcccttgaaaagaacacaccttgtgatagcatgtggaaactttcgttcaggttgcttgccgaagaacatcgctgcaccgttctttgccgttccattctcggtaaacagttccaagttttcaaatatttgtttgtcgggtgtggacggacttagttttgcttctgttcggaaatccttaatcatctgttcatctgcatctgtgtagatattgaaccaatggcagggtatatggtcgaagaagattttgttacactcctgaaagaagctgcgcatttcttcggctgtgcgaagtttctgtgagtttgccccctcacggacatagatagaaccggaaaatatataaggtttatccttgccggacggaacatcaatcacccaaacagttttattcacaatatttacggaatacaattcacagtggagtgcaggagatatttcgctgatagaaccttgaatagcagaacgcttatcgttttctaagttagtatctaccacttgtccgttatcatctactccaataagcaaatatcctccgtctgcattggcgaaagcacatatttcctctgtcagttcacgcacctttgaaggaacacgaaccttaaattctacattgtagccttctccgctatcaataagtgattgtatgttttctgtatttagcatgaattttatcttaacaatgcaaatttacggataaatcagtgaaaacaaaatagttgtcataaattccttttcctaaattcagagggtatgacgcctttatattttttgaatagcttgtttaagtggctttcatctgtaaagcctaattcagcagcaatctcattgattctcatttcgctatgcaataatctgttttctactaacttcaacttatatttgatgatgtattgttgcattgtttcatttgtatgctttttaaaatagcgccccaaataattttgcgagatgccaaaatgctggctaatagtgtctgcctttattttatcgggattatatatattgttttggatatattgcaaaatatccaatgtcttttcctctgaacgttcatcaatcttttcaggcagatacttggcaatgttacgagtaacgatgactatcaatgtatttattaattgttgtatcagttctttgttatacaaatcttgatttacatattctcttataagagcttctattatagactttataagcggtttatccgtgatgttttttaagatacaacccggttgatgattggcatgttgaagaataaattctaagttcttaatatttttagttccaaagaaaccagaatgaatatatatatatatcattaaaacgaatgaaaaagaatttggtagtagtatgaatatcaaaagaatggcaatcttgaggggttattagaaacatatgtccctcatgataatcaaatttattattattgatgcattgtaaacctgttccggaaaggatataaaccaattcaaaaaatgtatgttcatgctctttaagaggagattcttcgagctcttttacgctgatttccaaaaaaagtatttgcaaccagttattactcaatattttgtgagttataagtcagaaatatgggcataacctttaggggtacattctaaaaggtgaagatttaacctttttattatttcttaacactcaaagagcggtggtagagggtattttccctcttttcggtactttattgatggttcgatgttcccatctttccacattgcttggctcgttcgcacaagccactacaaaggtactacaatttccaataaaggcaagaggacagcaattcaaatctattatttttgagggagtgaaatctgccgcttgccaaatttctctctgtcgaaaataatagtcctctgaaaagaatgaaaacagcattgataaaattgccttattaagggggggctatgctgttttatgctattatttcgtcagtcgtttatctccgttgccggatgcagttttcagccaagccgatgaataagaaaaggttttggagctgtttactctccaacggaggacgaaactgctccaaatggtttaccgcttgaacttttcgttttctaaaagaggcttggcaacctttgcatccgacaaaaggagataaatgaccagatatataacagtagtattacattaaggtaaagaacaaccatggtatagtattattgcaatttaactatttaaagtttgtttataatcaaatcatttaaagatttttgtccttctatgattttttgtatttgataaatgtcgtaattaaataaaaaatatcacgcataatgactttttcttttttctaaatttcttcaaatgacaaattattgttacctttgtaatgtaatgtagttaatggttgcgcttataaagtccttggaaaggatttatgtataaaagaggtagatgtttactctgttcttgcctggattatcagcatcactgatatgaaataacagaaaaaaatatacaatggctaagcggacggacaggcagggaaatagtacagattcccaatccccctctttataatacattgcgtataagatttattaactgtctggtctggggaatctacagagatttaacgaatcaagatgggaagagtcagtctttgtcttgtcataatgttcttcatctgtagtgctcaaaaaattgatgcacaagtacagaatatcagagagaaacaagataccatttcggcgactaaatcattagagcatatcaggcccgagaatatcaagaagggaccattgaataatgctttggatgtattgagtggtcagtctgccggtgtgaacgtcaccactaatgggactgacaggctcgctatgctgaatagtatccgtgtgcgtggtaccacatccattatgggtggcaatgacccgttagtaattattgacggagtgacatctgacatcgctacgctatctaccatatatcccgcagacatcgagagtttcactattttgaagaatgctaccgaaacggcaatgtacggttcccgtggtgcttcaggtgtaattgagattaagaccaagaaaggaacggggcgaggtttcgaaatatcatatgatggcaactacggattcgagtcaatgtataaacatctgcaaatgctcaacggcccggagtatatagctacagcagaggcacttggattagattacaataatggtggctacaacaccaattttcacgatgtaattactcgtacgggcttgatacatcagcatcacttggcttttagcggtggttcggaaaactcaaactatcgagcatcgttcggttttatggatcataatacaattgtcaaagttaacgattaccgaaatttagtggtaaaacttgatgctacacaaaaggctttcgatggtcgcttagttggcgattttggtgtatatggctactcgtcaaagatacacgacattttcgatacacgaatgctgttttactcggcagctgcacagaatcctacatatccagcaggaactgatgttaatggcaactgggtgaagaactcggctgcatcacacatcaaccaccccggagcactcctctatgagaaaaatgactccgaagaacggaatttcaatacacatttggggctgaaatttaatatccttgacaatttgatattgtcggctttcggctcttattcatattcatctacgggaaatgctcaattttgtcctacatgggtgtgggcgcaaggcaatgtttatcgtggagagttcaagggtgaagactactttacaaatgtgtccctctcatataacaatgcttggggagactcacaccttgatgctgttgttggcgcagaatatcttaaacaggtaaggactggtttatgggtgcaggcaaaaggaataacaacaaatgatttctcctataataacatcggagcaacatcatcgcgtcctttcggtggtacgagcagtagctatgaagacccgtcacttgcttcaataatgggtagtgtcacatatagttacaaggatagatattctattgcggcagcactccgtggagatggctcttcaatggtaagcgataacaatactttcggattcttcccatcagtatcactgggttgggatgtaaaaaaagaaggcttcctctctgatactgactttataacaatgttgaaactaagaaccggatatggtcggtcaggaaatcttggaggtataacatcctatacaacacttaataccgtaaaggagaatggtatcgtatccatcaacggtgcacctaccgtaacaatgggaagtatacgcaacacgaatccggaccttaagtgggagactcgttcaacatttaatatcggttttgacttaggtatatgggataatcggttgatgcttacctcggaattatattactcaaagacaacggatatgctctatgagtatgatgttcccgttccgacctttgcgttcgataaactgatggcaaatatcggctcgatgtctaaccagggtgtcgaactaggaatctcggtagttcccattcaacgaaaggatatggagatgaatatcaacttcaatatgtcctaccagaagaataagttactttcgcttagtggagagtataatggtatgcatatgacagcttcagatattactccgattggctcgctttatggtgcaggtcagaacggtggagacaataatgtagtatatcagattgtaggtcagccattgggggtattctatctacctcactgcaaagggcttaaagaaaatgaacttggtggctacagttacgatattgaagatttgaatgatgatggcgagattgattttagcgatggcggagacaggtatatagcaggtcaggcaacccccaaggtaactattggatcaaacatcagtttccgttacaagtcctttgatattgccatgcagataaatggtgctttcggtcataagatattcaatggcacgggcttggcttataccaatatgtctatattccctgactacaatgtattgaagggtgctcctgaaaaaaatattattgatcagaatgtttcagactattggttggaaaaaggtgactatgtaaatattgaacatattaccataggctacaatattccaatgaaatccaaggctgtgaagtcattgcgtctttcggcaggcattagcaaccttgcaacaatcacaggctatagcggtcttactccaatgataaacagttatgtagtaagcaacactttgggcattgacgacaaacgcacctatcctttatatcgtacctattcgttaggtcttagtattcaattctaaccgcttacagttatgaaaagatatataaacatattgatggttgctttggcaacgatgatgacctcttgtcttactgaagaccctagagatcaactttatgaagaagacatttacaacaatgccaacaacatatatattaatgcagtggctgtgctctacaattacattggtggcagtgcagacagtgagggtttacaggggacctgtcgtgggatttatgactataacacacttactacagacgaagccatgatacctattcgtggtggcgactggtacgatggaggtttgtggacgaatatgtatcagcataagtggagtcctaatgatttaccactctacaatacttggaaatacctctacaaggttgttgtgttatcgaacaaatctctgcatatcatcgataagtatagccataacctatctgaggagcagagagtggcctacgaagctgaggtgcgagctctgagagcacttttctactactacattatggatatgtatggcagagtgcccatcgtaacatcctatgaacaaccgcaggatgaagttgtgcagagcgagcgtagcgaggttttccgttttatcgtgaatgagttgcaggaggttgccgagttgttgccaaatgagcgtagtaataagatgggtaactactatggtcgtataacaacacctgtagctaatttccttttggctaagttggctcttaatgccgagatatattgtgatgataattggactgatggcgttccacggaacggtaaagagatatttttcaccgtcgatggtgagaaactcaacgcttggcagacctgtatcaaatattgcaataaacttgccgaggtaggttatcggttggaggacgattatagctataatttctctgtgcataacgagaactccaacgaaaacatattcaccattccgttggataagaacctctatgctgcgcagttctggtatctcttccgatcacgacactacaaccatggcggtgcgttgggtggctcatcggaaaatggtaccagtgccaatatctcaacagtcttagccaacggatacggcacagatgatgtagatgctcgctttgaaaagaacttctatgccggcatcgtagaggttgatggaaagcctgtaatgatggacaatggacagcagttggagtatttcccattggagctaaagttgaatcttacgggaagctcctatgtcaagacagctggtgctcgtatggcaaaatatgaggttgataggacctcacattccgacggtagacaaccggataacgacatcgtgctattccgctatgccgatgctctcctgatgaagtccgaggcaaaggtacgtaatggtgaggatggctcgttggagttgaacgaagtccgaggtcgtgttggtatgccatatcgagaagctacgcttgagaacatattgaaagagcgtttgttggagttagtatgggaaggctggcgacgacaagatatggtgcgttttggagtttatcacaaatcatacgatcagcgagtccaactggctgatgagaaaaatgggtataccacagtttttcctattccacaaaaaagtatagacttgaacccaaaattgaaacaaaatgttggatataaataactttagcctatgagtattcaatttgacattgcaaaacagattatagctgaaacatgccctaatcgcaaacttaagttggagaatattcgcctttttgcagatattattcagcctaagaaatatcaaaaaggtgatataattctaaatgaaggtgatatctgtaattgcctattttatatagaaaagggatttattagacagcactacctaaggcatgataaggatgtgatagaacatggaaaatccagtgtaagctgccccctaaaaccaagcgattctgcccccttaaaacattcaacaatgcccccttaaaaagtcttgaccgatggggttattattattttagtttatttccctctgtatgcagccattttacggacactttctcctgtcagctcaatccggtgcgccgtatgtataatacgatccataatggcatctgctactgtagggtctccgattgcatcataccaattgtccgttggcagttgcgaggtgatgatgatggacttgcgcccatgtcggtcctctattatatcgagcaggatgggtcgttccttggcatcaaggttcacaaggaagaggtcatccaatatgagcagcgtgctccgttcgattctcttgagttccgattccagtgtgccttttacttttgccaccttaagcgtacccataagtttcggagcattcgcataatatgtccgtatgcccttcttgcaggcttcataccccattgctgtggcaaggaagctcttcccggtaccggatgaccctgtgatgaagaggttctgtcccttgcggatgaactccagcgatgcaagccgctccatctgattgcggtcaaggccacgcgggattgcatagtctatctgctcgaggcaggccttgtagcggaacgccgccccgcgtataaggcgttggatggctgcattggcacggtagtcccattccctggcaagtaacatgtgcaggaaagattcgattgtcattgtttctgccatagtggaggttaggctttcagtgaaggcggcggccatgccgtgcagcttcatacggttcatcagttcgattgtcaacgtgttgcggtctttttcgacagctatcggtgcggtaagattatttgtttccattgttgtctctatttaaatgttttaattgtgcgaagtaggctgctccgcggatgtttttgtggatagatgttacggggacctcatcgtcaatgtcgtcttttgacaggaagtctgcatcatccccgcgttcaaggatccgccttatctcctgatatccgtataggcgcagttgcgtggcgcatgcgcttgccgccaccaaccgttccagcccgaaggtcttctccaacgccatgatgcctctgcatgaacggaacgccgcgggaggatacttcttgagttccgccaccttgcgcagatacagcagcaggacgttatctgtctggccggctcgttcgtaaatctgttccagatccttttcataacttccatgacgtccgggcagtccgtgggcatccttggtcgtataggagtatggcgtgtcatcgcgctggtgtgtggtcaccagacgcaggccatgatatatttccagcgtgtccgcatcatagacaatctcgacacgtttgcctatatactctttcggtacgctgtaatggtgaagcctgaaggtgacatagccgttacgcattactgttgcggagcgtcgctctttcatctgatggcgtatggcgggaagcgggcggaggcagtcggactcaatctgctcgaactgttcccgtctggactggggacgcccgctcatcctgcgtccgttgaaggccgagagcgattcggatatggccgcattcagagactccagcgagtggaatacaagaccctcgatgtcagcgtagacggatcggtaaagtagcttcacggcattctccaccaaggccttgtcctttggatgacgtacccgtgtggggtatacggtacatccgtagtgttcggcaaatgccgcaaactcctcgttgattaccggctcgttacggtcgctgcgggttaccgccgatttgaggttgtctggtacgatcgccatcggaaccccgccgtaaaaatgaagcgcgttctcacacgccttaatcaagtcctgccttgactgggaccagaccgcctcacaataggtatagtggctgcacggaagtatggccacgaacacttcaacgctgcgacattcaccgctttcactgtcaacgacttccagtttgtcaccggcgaagtcgatatacatctggtctccggcataatgctcgacatggcctacgacatgtgtcaccatacggtaacgcatgagatagttgccgaaactggcatgtctgtatccgtcaggatgggtctcgcggtactcttcgtacagggttttcactgttacgcctcggcggctaagccgggcagcatactcaggaaggagtgcctcaagctcaagctggcgttgtgacggttccctgttacggccaacaccttcagagaacatttcctggatgcgagcggaaggcatggcggccaactcctttatcggtataccacactcttgaaacaggcgcacatatctgcgcaccgtgttgcgggaaagctcaaagctcctgcttatctgctttatccccatccccaatgcgtaacattggaggatgtttgctatctttgttgtcatagtagaaatgattttatcccaccggtcaagacgggaatcaaatctacgaaaaatcccctgccgggcattgccaagcaggggtatttttatattggaatcaagggggtaggattattttagcacaagggggcagaatcgcttggttttagggggcagcttacactggattttccagtattctccgcaagtccgttgtttctaagccatgtctcgtatttctttagccaagcaacatctatatctgtgaaatgaatattcaggtatttattgtacttgatgagtgaattgtacacttgcttaacggaaagcatatatccacgtctgttttcttcttgaagaagtcggagatactccttaaatgcttcttctactgttttcggtttaactgaattagaaatttgctcattcaaagtattggctgtaaataacttatcttctgatttcagtttaactatttccgtttcgtactcttttttcttgttagctatgagtatgttaatatgctctctgttagggcaattcgattttggaacattcttttcaaagttccaatgttccgtttttacagacacgccaagactgacatacttctttttgccatccttgcagatacgaatcataagcggatgttcaccattactaagagtttttgacttgtaacacaatacattaaccgttgtagccatattgatttccggtttaactcttggtttaactccgatagtgaaaagcggctaaaactatggaagaacggggtaatatataaagaaaaaagcaactactttaattagtaactgcctgataattaatcttttaaaagtggtgccaccaggaatcgaaccttttgcttcggtttattctaactccttgagtgactgcacattttttgctttatcttttatgaaaaccattgaattggccttacgctaaattcattgtttttctttactaatctgacaaaatttgtctctttgacactgcaaatataatacacaggttcgatttctgcaaatattttcattccttttaattatagttttcaacaagagaaaaaaataaaaacatgtgctaaatcaaatgcattaagaatttatttattgtttggggtgttgactttaaagttggaaattttgcttcgcaaatcattagaaagatataccccttgaatctttattttgcatgaataaaccaaaagcactaaaagagcaaaaatacaaatgacgactatttcactaggcgccaaaaagtttggaactgacttgggcatgaaggcacctgcaaagagatctactaaacataagattatagctcccacctttcctaaagcactctttacctttcttgatttttgtatctctatatcgcttacaatttgtgcaatcacagtattattggttttcattgcatattctttcaacgtaaatatcgaaacttcttcattattaaatagaaaaatatatttcccaattaagggtactgctagtgtacataatgcaaagaggatacaagtaaaaaatttcacagtccaaatacagacaatacctaatattacgaatggaatcaggtttattagagttaaatcctgaaacgtaattccaggttctttttggggacaacacacacctaaatacaaatctgtaaacaccaatagaataaggaaatttgtccatatatccgtatcataaatcttgtggttgtcaaataacgcaatcaaatctttcatgttgttcataaatacttttttaaattaatagtttatagtaaagcggcagtcaacattttaaatttccactgtattaaaatagagcctatactgaaaaggaacagggctattggttatcaataccctaaaaccttattcgatataatgtctacagattataccattcaaatatattatgtgttattggattttacaaatatacagatactattcagaatgtcataacttctccataaatattattttgtacagtttttttacttataattcatgcctttatcatactttgcggcattgctgcatgaaggaggtgtgcatgccaaaacagaaaagtttttgagccattcatgtaaaaaggatatacaggatgtcatctgatgacttttaatgacatctgatgacactgctttttatgtttcggatataaagcggttctttgtcgtgtattaatagtgaactaatccatgaaaatgagatgccatgaacatacaagaagcaaagaacatcaggcttgttgattttttagccggattcggatacaagccggtaatacagcgtgggaacagcgtatggtacaaatcgcccttcaggacggaaaaggaagcctctttcaaggttgacctccataaggaattgtggtatgatttcggtctggggaagggaggggatattataacgttggccaaggagatttatcggacacaagatataggttatgtactacagtgtattgaggataaaagagccgtactgaaaccggttactgtttcctgtccgtttgaaaaggcatatcccgcctttcaagatttgaaaatcattcctcttgccaaccggatactgcttacttatctgaaggaacggtgcattgatctggaaactgcccgaaaaatatgcagggaagcccattttaaacggaatgggaagaattattttgccatcgctttccctaatatttccggagggtacgaaatcaggaacaggtatttcaaggcttgtattgctcccaaggacatcagtcgcatcattagcacgccggaaagcaggatttgctatatttttgaggggtttatggattttctgtctttcagaccggcttttccatctttggaagagggggattatatagtgttgaattctgtcagtaacttacagaaggctttttctttcctttcacaatatgacggcatccgttgctgtctggataatgataccgccgggaaaaatgcggtgcaggcattaaaggacaaatacggaatccgtatatgcgatttttcgcatgaatattccggatataaggatctgaatgaatatttgtgcaggaagaacaatctgctccatatctaatagatgtattgaaaagactgcctgatgatatacccttgtttctttcctgtcatatgtggcaggaggaaacaagggtgatttttcatgtggtgatactatgttaatagtagaatgtggtcagatgcgttttatggtcttttacaatctttacttcatgcatctgtccgtatatctcacgcatggataccggacaatccatcttttcccattcttccggggaaatcctcatgtcggaatgcctgaaacacagcatgaccatttcctgagaatcctcttctgcgaatatggtaccttcatggtcgttgacaaactgtttgagtccatcctcatccttacaggatatttctccgacgtacatatcctcgctcggccgggtgtttttgcggatatggattttgaaccattcccggctttccggctgttcaggtgcgccacactcccacagggctattttcgcatcgtagtaaacctccccgttttcacatgccccgtaatgcccccaatgcttgaaacggccggtagtccatgccttgaaccttacatcgcctgcctttaccaacagacactcaccgccatgcatatcgcatttgataccctctttgtcacgggacacgaatggaacacgggaaaaatcccggagtataatgttatctccatatacggcatctataaagaacagccgggaacgctcaccataaccggaaacaaagaacaggttgtctcctgtccgtggatactggccggagcgtgtcttttcgatgtgttccaccatggtattcactttatctatatcttcctgtacaagtccatatatccgatcataccagtagttcaggcggatgaaagtttctttgctatacttgtttgttgtctgaatcataatttccttattttgtgattaaacatttccggctttggcaaagccggtatttctatctcttacatgtcagacatttgtcttttgctctgatagtgcaaggcttggcgaaaaaataccgcagcgaagcgaggatgattttttcagccaaccagtccgaaggaccgccttgcgcatcagaagcaaaaggctacctttacatgtaagaaatagaaatgctgaccgatatatgattccaaaataaaaaaacgtataatctgccggttctgtaataagaaagccatgaaaccctctctttttatcgtttccatgactttcttatgtttatgtcgtgatacttggaaacgggtattaccaatgatcaaatgtttccaccctgtttttttccaacagaacaagaatgtccttttccttatataataatttgcctcctactttgtaatagggcagcctgccgttcattctgtaatcagccagcgtccttcgtgtcagcttcaatttctccgccaactcgctgtcggtaatgtaacgctctccgttcaggaccggacgaaggtttttctcctgatcatccagcattttggacagggtgcttatgttccgaaaaaaacgtataatctcagggctttctttggtcagtatgaattgagtcataaggattcgggggttacatggtgaatactgttttccaaataacgtataatatcctgacgcctgtaatataccttgcggtctatatggctgtaagggataatcctgcttctccgaagttgcaacagctttcggggcgagacattcataagcatacacgcttcctggttatcaatccagtcatccatactacagatgcctcctccgcatgtttcacgcattctcttttcaacggcttccaaagcctcattcatttccatgaatgccttagcttcgatacatacaaattccataaactctgctttttttgtccggcacgaaaatacgggaagtaaaagtcatgggcaaaaggatgtcatcaaacggcatcagatgtcatcagatgtcagagaccgctctgtttggggaagcaaattaaaagaatggctaaaagtctgtttctttaccggaaaaacagtatttttatcccggacaatctgtccgaaaataaaaaaacaggaaatatggaactgataatcaatgcaacattattactaacggctatcgttctctggatatacggacaatactggagaaaaaagtgcggcaaggtgctatgccaatatgcagcagcctacgatgagcgggaagacagggagaaaccgctacgtcaagccatcatagcaggaaatcctcatgcaccgctgttatatgcgctgacttgtcctgagctgtttgataaagtccgtccgttgcgattgttctcattcgggagcattcgctgcgtgtttgccggctattattttcccaaacgctttgaaagctggctttgtgatgaccagttggcattcgtgcaaaaagtatatgatttcaaggatggaaaagacagctgtacggaatatttttcacaagcattcctgcttctttccactgatgaggatattactgccatgtttatgccgtgcagcacatcagaccgctattacagacgtttctcaggtattgccggttttctggaaacgcatggctatgtccgttcaggactggatttaatatgcattacggaaagcagggagtgtaaacacgcctcagaaaaacgctctgaaataaataccgccaactatatgatgtcaaacgatctgtacggaaagcgcgtggtgattgtcgatgatttgctgaccagcggatccagcctgatggaatacgcccataatctggaaagggccggtgccaaagtggaaggtgctgtatttcttgcccgtacctttcagatgccttcgccggcaaaagtaaaacgcctggtatggaaacgccatctatcagtcctgatccggagaaggtctgacgacctgtaaattgtaaagtttacattcggattttacaattttacacctcgaatttttacatttcaatttcccctatactatttttatatctgtattttattgatttgcagtgttatataattccccgtccaatataaacggataatgtggcatacatttttcactgaacatggcatatactcttgaaagtgcgcacaagaaaagggtattccagtaataacctttaaaaagacaggagaaaattgccatgatgtatatagacaatgaagtgcttgaaaaaatgataatgaccatagtggaaggttttgaccgtatagaaaagaaactggacaggatgggacgcgtgaaggactgcctgaatggagacgagcttttggacaactatgacattgccaaactgctaaacgtgtcattgcggacagtcgcccgttacagggaaaaagggctgatccgttattaccagacggacgataacgggaaaaacttctacagaagctcggaaatacaggagtttttacagaaacgtgggaaaaaagataagggcgggaataccaacatgggaaagttatgctaactttgtttcataaacagttgttatgaagacaaatgccaattcaagatataccgttgcagtccttattgacggggataacgcatcctttgagaggatggaagatataatgggctttgtttcccgttacggggatgccgttgtgagacgaatttatggagactggacgaggaaagcgctttccgcatggaaggaaagtgccagggagcatggattcaggcttgtacaagcttcctcccatgttcccggaaagaacacgacggacattgcactggtcatagatgcgatggatattcttcgggacgggcaggtggactgtttctgcctggtggccagtgacggtgattacagcctgcttgcccaacggatacgggaagccggggtgaaagtgctgggatatggggaaggaaagaccccggtgtcattggtacggtcctgttccgtattcctgtatgccgaccggaaggaaagcaaggcagaggagaacactcccgaattctttatccgaagggatatggagtatttcgacaaggcttttgagcaggcggctgacggcaaagaagaggtttccctttcactgatcggcggtgcattgaaaaaaatgatgcccaaattcaaggtcaggagatatggatgcaagacattgggcaaactctatgaaaagttggaccggtatgagctggtcatgacggaaaagggagtggcaaatgccgtacggctgaaatattaaaccgcatagcaggagtgttccaaaacgtcagtttctcctatacatcgttttatgtatcaggagaaactgacgtttgtgttctataccgggatggggtttacccgtaatgtgtcaagattgagataggctccccggtagaacgttcttccttccctgagcatgcgccacaggacgtcgcatccgatttgtgccaacatggaattgatgaagagatcctgtttttgcaatgcctcagtcagcgagcagctcggtcctgaatccttctccctgatggtggaataagggacttcctccgttatgacgttcatcttgggtataggcaggtattcagtggaggagggctgcggtatcttgcttttgacattacctatcagtacttgtccggtggtctgggcattgccgaaatccatccagtatatcggtgatttctcgtcatcgtatgaacgttccctatgctttttcaaaaaacgccacagaccggtccgtgaacgggtggtgtccgtgcaggtgatgatgatattcgccaaaacggaatctgatgttcctgacggatagcattgcccttttgcttcccatgaaaagccgaaaaagcggttgatacgggttacaagtgccaccgccttgttcagtccgagctcggattcgctgaacaactggcgtccgatgttcgcttccgtgacagtatcggggtcaaaaaccgtcaagtgcaggcccggatgtccgagtgcctgcaatgcgatactcattcttgccagattggtggccacctgcgatccggttccgcccgcaccgattacgaaaacggttacgggatggtggggattgagcaggtatctgtctgtataatgaatctttttcatatcaataagtctttaagttgtctgtccataggtttcaattcgttatagtcaaacggattggtccgtgccttttccgtcaccgaaaccagattgctttcggtgggattcctgcttcctcccaaatgggaaaattcactgagccagaagcgtttttcccaatgctcaaggagttttgagaaagtcatgttttccggaggagtcaacgaggcatttcccaggcagacactgcttcccgttacattgaaaaacggggcaaggaaaagcgggctgtcttctgccggtgcttctcccttataggcaaaaatttccagtctgtcaccggaagccctgtaaatgacaccgggtacatggaatgtcccgtccggaatattcagcctttcggaaaagaacatctgccgttttcccggaggattgtaccagatgtacctctcgtgtcccttgcgtgtatcgcaccacagcatattggtggggattttcccatgcggtacatcctgccggttatccgtatagtattccacaagggagtccataaattcatacgtaacggggacggcagcctccatccggcctctgtcgttgatcggatgcagttcgagataatatgtcccgtgtccatagcggccatcactgtattcgtaagcaatcagtgccgctttgggaaccatcacctgttgaagtttcttagtcagttcattcgtaagtattcgataaactccccctttcattctaaaaatgtgatgttacttttgtagccaaagtaaaaaagctcaatcattatgtcacatcaatggaccatggaagattttgaatctatttatgcccgtttcaagtcgagcggactttcagttatagatttttgttcgaatgaatgtattcgccccaaacgtttctacgcgtggcgttccaagctgttgcgcaaaggcggctttatcccggtaaaggtaaacagtaagggagaggtcagtcttccccataaggagaaatccctgcagtctgcacctccggtcagcccgtcgccaaatccccagccactatgtgagatctcctatcccaacggcgtcatagtccgcttgaacagccctttgtcaccggaggtattgcaaaccttgatatttttgaattcaaaccgttagcctatgttttctttgaatgaatccaacagatattatctttacccgtatccgacagacatgcgtaagagtttttatacgcttagcggcatcgtgaccaaccagatgggaaagaatgtacgggacggtgacgctttcatttttatcaatgcgaattgtacctgtatgaaaatcctccatatggaatatggtggtctggtgatataccatatgaggctggaacaggggcacttccatctgccggtcataaatacggaggaaggtcgggttaaagcgattgaaaccttctggaatgaccttgtgatgatggtccagggaatggacggcagcaaggtcaggcgttataaaagaagtggttttcatgggttgtagttgtaacaaactataacatatacaatgccgcattccggctgttttttagtatcttggcatcataattaaacgattatgccaaccgataaggaattactgataaaggatctcatgcacaaatgcgactgtctgtatagagaaaacagccgattgaaggagatggtgtccacgcagccccttgaagctgcggacaaagaggcgtatgaggctttattgtctgacaaggatgccataatcgcccaaaaggaagcaaaaatcaacagtctggaacaacgtgtatcctatcttgaacggcagttgtacgggaagaaggcggaaaagttcataaagcctgacgcccaggaccgctggctggattttgaaggcttcgacatgcttccccgggaggctgaagccgcagaggaagcggaaaaggagctgaaggctaccagagaagcgatcatcgcccgtaaaaaagcgaggaggcaacatcctacgagaaaatcccttccggaaaatcttgcgcgtgaggaggttcatatatatcccgaagggtataatccggaagagtggacgctccttcccggagaggaagtgaccgagatccttatgcacgagcccgggaagttctatatccgcaggatagtgcgccatacagccaaacggaaggggacggacgagttcaggaccggcccgcttcccgtcatgccgatagcaaagagctatgcctccgcctcattgctggcagacatgatgatagggaaatatgtggatcacataccgttccacagacaactggaacagttcaagcgtgtgggggtacacctccccgcgtcaacggtcaacgactggttcaaggatgtggcggatctgctaagacccctgtacttccgattatgggatctggtgatgcagactgactacatacagtcggatgagacgacaatccccgtgatgaatgacgagagacacaagacggtcaaaggttatatctggcttgtgcgcagcgtcatgaccggacgtcagttcttttactatgacaagggttcccgaagtggaaaggtggtgctgaaactcttcggcaagttccggggagccatacagacggacgggtacgaaaggtacgagatgctggacgccaagaaaggcattatccttcttggctgctgggcccatgcgcgcagatatttttgggaggcaagaaagaatgacacgcagcgtgccgactatgcgctcgaacagatacagctgctttatgacgtggagcgcaaggctgacgatgaacgcctgacttacgaacagagggctgaacttaggacacgtcttgcatatcccatacttgtgcgcttcgagaaatggctggtcaatgaatatcccaaagtgatgaaaggcagtcctatcggaaaagccataaaatatacatacggaaggttcgacaaactctccagataccatcttgacggtcgctacagaccggataataacgagatagaaaataaagtgcggcctgtcgcgtgcggcagacgtaattacctgttctgtggcaataatgatgccgctgaagatgcagcggtgctctactcgttcttcggctgctgcaaggctgccggggctgacttccgcacgtggctgatctacttccttgaacatgtacatgattatgacgatgactactcgatggatctggccgaattattacctgacaatctgttatccggtggcaagatattatccgttacgccaccggaatctcccaagaaagactcctgataccttcataaatcccgcctaaacacgggaaaactaccgttttataccaatcaagacgggaaaatagggaataaagtgccgtttttatcttcattatccccgataaatagggaaaataagggaaagaatacccttttatactaattatgacgggaaagcagggataaaaataccgctttatcccatttattacaggaaaataagggaaaagggggaaaacttccttttatccgctccattagtagggaaaatatcaacttatataaaacccgcacatctttgggctgaattggtgtaacaataaatcatagaacgataaaatgaataaacgatattatgaacatacgttatccactacgagggagtttatcgaatacttacgttcattcatgtcattcgttttaaaagttgtcatcaatatagcctgtaaaacacaccaaccatctggaaagcctttccggatagtcatccatctgaaaaagactgtccgtttccggtgtcagtagcttgtaagtgaccggagtaagggcataggtttcctgataatccgaattcatataccccttgacacactccgccaatgtatcatcagcagaatagaccagtatgacctggctttccattcccaccgggggaaaatcgcattcctcttcataagcccaatcgtactggtagcctgtcaataccgggctttccggagtaatcaatgccatgccgtcctcaatcagttccaacagcttcagctctttttccttttttgtccggtaattccgcacagcctcctccaaagacttgcagaacggtttgcccgacatccgtctgagtgctttcatccgttttccagactgataggaatctgccagccgtttgttcgccctgatttccttcggggaagcatcggaatcccggtttccccagtcttccagttcttctatggcaaagtcataacaaaatgtctcagtaatatcgtacagtctgtggtgtcggacaaatagccggatgaactccctgacaatgttcttcaatgatgccgaaagccgttcggtaaaatcaaccggaatccaaaacaaagtaggttccggccagtcatgatggcggaacagacagaaatgcagccttccgtccttcttttccagattgatacactccggtacacactcttccataactctgtacaactcggtaatattcaggcgggggcaaccccctttcctgtatcggaaagggagttttatacccataagttccgcatatcttgatgccgaccggtagagatagtcaaaattttccggagtcgtgagattgaccggagaatcattatccatatcctgatgccaataatccggtgcaaggggtgtgattctaccggtcagaaaagcattgtgcttcccggtggcagaagtatccttcttttccgttccgaggttccccttcggatgtgggacgaacttactgagagaataatcagccgtgccagtccatccttggcttgttctgaaagctgtctgcatgtttccttatccttttttttcttgttcataccgcttaccctttcactccgatggttgtcttgaagcggtaaaccgccttgtcgtcctcccactcaggaccatgtaccgttgccgtagtcagttcagggtaggtcatggaatagaagtccatcacctcgtttacggacagttcgctgttcggatcatccaacacgagctccacggagtccttcttgaatttgaatactctctgcaatcctttgatttcaagtgccatattatttttcttttatagggtttaacaatataccatatccatttgtgccatatccgtcatgcggcattccttcggaaagtccggatattccgcataagggtcctccctgagtagctcccggtcatcctcgtaatccttgtcgaagttatacattgcagcctcctgcaccgttgcatactgtgacggagccggttgttgcatccagcgattgtccgccaattgcggttgcggcacctgtaccggttgatggaactggatttcttgcggttgtggagcagcctgctgaggaaccggttgcggtgcaggttgcctatattgtacgggctgtacttgcggctgtgcaacgggttgcggagccggggcaggctgttcgggcatggacatcggaacttgctcttcgctccggtattgtggcgtctgggctgccatcggttgtggagccgattgctgcaaggatggctgtggatcagttaccggcggctgtaccatgtcgaacagacttccctcggatgccttcttctgcacttccgccatttttttgtcaatgtccgcctgtttgtccggctgtgccagtaccttagcctgcctgagccaggtcaatgcttcggaataatgctttcctgccgtggcatcctcagctttcttcagcagtttttccatcttttcccgtttttcacgggcttccttggactccttttccaccgtaggcttggaggttttgctttgtgaaaccgcctgctctgcctgcttctcgaacgattccaggttggtaaggataccttgcgctttctgtacgggtgcaccgacagcctgcaggaatcctgcatccagttcttccggcgtaccgttcaggatgagcgggacaatgcgttcgccggcctttactcccgaccgtctgggaacgacggcaaccgtcagattgtcgtttacccgtctgatgttgatactcaggtctgtgcctgccgtaatcatttggttgattgcttgaaaaaacataatggtaaaatttaaaatgttatacataagtttccttgaaaaaatccttcaggattctctgcctgtccggattcgaggcgatgcctttcaacggttccagatagtagccgatacgtctgggcccgtctgtcgtacagggaggctgtcttttgacaggtgttgtccggtttgtggcaggccatgcagccggcatgaccggagccgaggatgtaaatgtgtaagttctcatatcttctgcatttgatggttatacaagcatgcccatgacaatcaggacaaggattgttttcaagacaaaggtgaatgtcctgaaggcgagacggaccagtgttccggacataaggaacaggacagacaggtacacgggaatgacgcccttgcagtaaagcaggcatattcccgtaagcagaaccagtgcgaccacttgcctgcagatgttttcgatgagtttcagtttcatgtctttaaatttttaagaatgaataatcccatcgggatatgttttcccgattttataggcctccggcccttggattgcctttttgcgcaaggcttggcaaaagaaaataccgcagcgaagcgaggatgattttcttttagccgaccagcccctgaaaggggccgccttgcggcaaaaacgaggcaatccaagacctttgccgcttaaaagcggaaaaacgtatcttgtacatatataaaaaagaggcacagaccccagtctgcacctcttctgttccgtaccttccgcccagccgtctatatggaaccatgcggctgtccatcttccgaaagtttccggaaaatctcaccggtaacctcatttaccgtttccaatacgccatccagaaattctttctgtgtgagttctccctgttcaatccgtgccagctccgcttcccagccggaggtgagggaggcgtcagccactttcattccgcgtaccgtttcatataaaagaagaccttttggggtcgggataatgtatttgcccgaataccggatatatttacgctccagaagcgtacggatgatattcgtgcgcgtggatgcggttcccagaccggtcttgtccatatagtccgccagttcctcatccgtataaggggcagcgggcagcgatttcctgtgtataaggctgcatcccgttaccggcagcttctcctcccgaaaaagttcagggggtacgggacagaggtcgttgtcttccgcgacaagccgttccctctgaaagataccgagccaccccgcttccagaatacggtatgtacggattcggaacttgcgtgcggcacagaccgcttcaaccgtcgtatattccaccttgcagggcggcatgaacgtttcaagcatcctgccgacaacaagggtgtaaaccagcctttcctccctgtccagttcccccggctgtatgccggtgatgacaatggcatgatgctccgccgtgtcctgatttccggttacgcctttccttgcagcaaggtcgatcataccggcatattgacggaattccttgccggacagcagcttttccataaccggaggcaacatgtcatacacgtctccgggcagcagacggctggaagtgcgcgggcaggagatcagttttttctcatacaggctttgggtaatttcctgcacccgtatggctgtcaggttatggtaacggttcgcatccttctgaagcccggtcaggttataaagggcaggtgcggtgatttcctcagtccggctgttgaccgccgtgatacgggcatatcctgccgccttgcagtcctcgtaaagttccagggcatcccggcggttgcagaaatcttccacatgccgcatctttattatcttcccgttcttgcagaggctgacgaatacgggccagctgtctgcgggaatgtgattttccctttccctgtaccgtccgcttatcgctgccaatacaggggtctgtacccttccaagcgagttgttcccgaaaccgaccgccttgcagacggcatagctcgaattgactccaagaagccagtcggccttgttgcggctgtctgccgccaaaaacaagttgtcgaacaggctgcagggacgaaggttttccattcctttggcaatggcttcgtccgtcaaggaggagatccacaggcggaggcaaggtttcctgcatcccaaaaaacgataaagataccggaacagcatttccccctcgcgggaagcgtcggttgccgcaacaatggtgtcacacgcatcgaacaccccggctatcaccttcaactggagcaccgcattgatgtcgggattccatcccgtgtccgtctttacatgccgtaccgtcagaaaaggaggcggcagcagggggaagttctcccgctccacccatgccgtaccggtatctttcggcatcgccagggaaagcatgttgccgtatgtccatgttaccatgtatccgtttccgctcatatatccgttctcttttctgtcagctcccaaaacccttgctatctctctgcccacattgggcttgtcagtcactatcgctatcatattctttttccttttgatgttccgtaccgtcaggaacggcacggaacgtgagttatacttattgtttcccggtcaaactgccgcctcctccttctgacggagaccgtttatttccataaccggtctgccgttgccgtcgggtaccagcttcagcgtggcatccattgtcaggctgaggaccgaaatatggagtttcagcggaacgatgcccgtttcctttccttgcagcaacagttccatgttgccttccgcttccagttgtttcttactgatacctgcggccttcagaccgtcccagtcgatatcttccgtcttataaatatgacgggtattctgatccgtattcatacgattcgtttttttaggtttgtatgattgattctgtttctctccgggcaggtctatactgcctgcgatgcacccttcttctgctcctgctgttgtccctgtgcggtctccgtctgtgcggcacggcgggaagtgtccctgcggatgtccggattttcctgaaaatactgcaactgcccggaatagggattgactttcaggtaggaactgaaggtctgcccgttgtttttcagcccttcgacaagcaaagtcttgccatcctggaggttcgctttttcctgtgccgtgaacacgtgcccgtaaacctccgccggaatacgcggtgcctgctgctcgttgaatccgttcggcgtgcgtgaatacatcgtcctgccggtattcatatccagcttgacgaacgaggagaattcctccccgttgcgcccgatcatgttttccagatagaccggctgtcccttgcgcagggtttccctgtcttcggcagtcagctgcacgttgcagatttcctttggaatataaatctctccggtttccggattgtgccgcgtgtagttcgggcgccccgtaaccttgtctatcgttacaaaggacgagaaggtgtcattcctgttcctgaacttcatgtcttccaccagaatggtatgtccttcgctgagcatttttatctgggtgggcgagagaggcacgcctccgatggaacgttcgttgaaaatctggtttttcggaaagatgaattccagtcccctgcgctcggcactgtactggagtgtggcatcgaattccttgcctgctttggaagtcataccctccactttgacaggctgtccctccttcagcagcctgatctcctctgcggtaagtttgaccccgctcacttcctgcgggatgtaaacgtgctcctgacggacggcaaccagctcgttggtgctcttgtcgatggaaatcagacagggggtatattcactgccgcgcaggttgagttctgccacacgccccatgttgccggtctcacgcaggtttttcttgtcctcctcgttaaagttaaacccgaaataaggacgctccaactgcggttccttgcgtatgccgtgaatggccagtcccacctgtccgtcctgttgcgggatgagtgagagccttgcatccagtttggctgtcagcaaaccggaaagatggatggtcaggggcaccagtttgttggtcttgtagcccttcagcatggaatcaaggagtccctgctgttccagcgaagcctttgagattccgaccttttccaactcctcccagttgaccatgttctcattataccggtaacgcggtccttgcgactcctgcgctgcctgttgagcctggggctgctgctgttgctgtgccgcctgctgtacttcgctctgttgcaggggttcctgcggttgtgtctctttgtctgccatagctgttttttctttttggtttacactttgttccttcttgttttctctcggacggatttcgtagcgtttgaggaactctttcaccgcatccgtctgctttccctccgacaaatccctgatggcctgcttgttcaccttgtagtcgtggtaggtcatgcggagcaggcggaaatgggtaggttccttgagctggctccaaaaattcttgatgaagttttcgagaatactcgaattcttgtcgaatttcaggaatgagttttcattcttctcgtccgccggaaccgtcttcgcttttccgtccttgtcaatttcactgacagcctgtacaccgaatttcggatcgttcttgttatgaacaagcatcaattccgtaatctgttccaccggaagagcatcacttccggccttcggtttccgggtccgtttgggcttttcgttcgggatcttttcttgtgccataccttttcttttaggggttaatgaattgctttgacgcttcaaaggtatggggtatttccaaataatatgctgattttcaaaaaggtgtcatcagatgtcatcaaatgtcgtcagatgtcataaacatgactgttcccaacggctaaaccgtgaacggagaagaagggaagtgaataaacggaaagagagaagatacgtgaggcagaagggaaaaagcctgcgcatccgacaccagaaaagagcaggcgggcaggcaagacaaaaccatgcagaacagagggagctgaagccccctgtcttctcatgccttccgcttttttacagcaagactttcataagacctgtattccggctggatatgtggaatttcatggattatgaaatacggcctcttcaagcagcccatatcctttatccatgcgtcacatcggtcgcagtttgcccctgtaatcgtttttcaaatcgaatctggattgccgccgcattctttttcgtgaaaattttccacggcgaagccgcaaggaaaatttccacgaaaagattcggcaaatgcggccggcaagacaaattcgattttcctttgatgagggggaaaactgtatcgcaaacaaacctatctggaaattccgtgcaggctcattttcttgtaaagggtcgggcggctgattcccaacaaggccgctgcctgtgtcaggttccctttagagatggaaagagccgtcttgatctgttctatgtttcttctttcatctttctgcaaacacttgtctatcttctctttccccatggggtcagaaacgggctctcccgcatattggagccgtaaggaattgggggtaatcagttttcctttgcatatcaataccgccgcatgaatgacctgcttcagttcccgtacatttcccggccaactgtatcccagcagcatcttctttgccggttcgtcaaaatccaagacctctttccggagcaatccgcaagattgctcccggaaaaaatccgccaaaggcagtatatcctccaggcaattatgcaatgcaggtacggtgatggtaaaatcctgaaagcgataaagcaggtccttccggaaacgcttttccgcaacagcctcctgcaaatcctcattggtggccgcaatgatgcgcacatccatcagcctgtcccgttgtccgcctaccggacgataccgccgttcctccatggcacgcaacagcatccgctgcgtttctatcgaaaggttctccacctcatccatgaacagggtgcctccctgcgcttcctgaaaatatcctgccttttcctctgtggctccggtaaacgcccccttgacatggccgaaaaaggcggaaggtgccagctctttggacaaactgccgcaatcgaccgttacatacggcttgccggatctgaggctctgcctgtgaatcttttttgccaggtgttcctttcccgttccggtgcttcccaatatcagtaccgtcatatccgtcggcgctaccatgtgaatgtaccggttcaactcgcaaaaaggggtgcttttgcgttcatagattaccttggtgaaagcctcgttcaccgtccttatttttttgattacgggcagcagcctggtttcaaccagcggtttgaggatataatcttccgcacccagcttcatggtatgaaccgcagaatgtatctcttcataattagtcatcatgatgaacgggtgcatatagccgttctccctcatccactgcaacagcgtggtactttccccgtcaggcaatcttaaatccgccaatacgatgtcatcctcacggacggatgtcccaatgaccttcttagcctgtgccagcctgtaagtccttacagtatccaaatccgccttctgcaaaaaattgcagatataattacagaacaagacattgtcctcaacaacaattactctcataagctttcttagcctgttgtgccaaacatattatttcttttcctttttccaatacctgctgtacagtccgcccgaactcgtccacagaaaactctcccgaatcctgaagcagtgcgaacaactcatgcagcggcttgccggcatgaatgatctcccatgagcctgtcagatgatgtatccattctttcagtgcctcatgatcattcttttctgcacattcagccatagcctccatatccttcctggtctcccgaatcagggtatccagcatcttccgcctgttcccatatttcagcagggcatcgaggtctatctgttcagactgcctttcacttcccagacattccgtacatacctgcaaaagttcttcggcggaaaacggctttttcaaacagcccgaaaaccctgccgcatacaaatcccccgtatcgcagtttcccgatgcggtactcgcgataaccggaatgctccgtgaatttcccacattggccatgcgcaggagcttcaacacctcgaatccgtttgtccggggcattttcaaatccgtaatcaaaaggtcataactacggctgcggacatgctccatcagatcacgcgtgttctcacataccgtgcaagccaccccgtgatacgcaaacatttccctgattgccgccagcaaaacggtgtcattgtccaataccagtaccgtataggaccgtacggaaatccggctcctgccgctctccgccatcgcttcctctgccacagccaaaggaagacagacagtgaaccggctgcccacccctttccggcttgccacttcaatcctgccgtccaacaatccgaccagaccttttactattgaaagtcccagtccgaccccttcttccgcaatcgcattgggaagcctctcgaatgcagtgaaaatgcgtgtctgctcctcatcgtccattccggtgccggtatcttccacgataagcgtcaatacgccctggtcaaattgtgtgcgaaccgttacacttccccgctccgtaaacttgattgcattggacaacaagttgcttcctatctgtattatcctgtccctatctcctataacaaccgcatctccggcactcagcacgttcagcaaaaggttttttcctgccgccagcggcataaaatccgtttccaaaatctcggtgacggaacataacctgaacgggacaggaacggccttttccccgccactctccaaccggaaaaatcccaacagggaattcagcatggaagacatgtgtcccgccacctgccgtatgttccggctgtattccctgcacttcgacacttctctttccgtggaaagcaattccgcatagctgctgatagaagcaagcggcgcacgcaagtcatgggttacggccagcatgattttctttcttgcctcaatcagttcctcgttttcaagaacggtctgctccaactgacggactgtgccttccagcctttttttataacggtttatacgcatcatatcccggtgtatcaccatataggaccatatcagcagcaaaaccatgaatgccgtcagaccgatgaccgtggcaaatgaccgtttcccggcttccgcaacttcttcttcctgtctcttcaagtccgcttgtaccgttccatccatattctcaatcatctgccgcaactgcacattcagccttctgttcatcccatccaagctgtccgtccgttctgccagcttccgggcatacgcctgctgtctgccaaccacgctccgattaagctcatgaagcatggaggcggcagaaggagaatccgccctgtggcgttttgcgaacaacctcttcaggaatcccccttttggggcattttcccgttcactctgtctggcaatggccggaatcttcgctgcaatttcccggtcggcttcctcctgcctgtgtacccaatatatgatttcccgcatataccgctccttggctctccacaaattacggatgctgtctgtatgtgagccggaagaggagtacctcaagctacacaacaggctgtcaatgtgccgtctccgtttctgaaatgataaaaaatcctgctcactccactccataaaggtttcacagaagaaagaaagcctgagcattttcacgtatatatcatttatctcatgctttttccggttaatcatccgtacttccatttccctagccttagtctctttccattcgcagatgccaacgtaagcaataccacttatgactacaatcttggccatatatcctaccgctattttggcaagaagcggttgcaggcgcaaagatttcaacaatttattcctactttccaattattcactttttaattcattatattctattaaaattctttgcaaaataaaccgaccagtcggtttattttgcaaagataagccttttccaagaataatgaaaaaaaacaggttccagcaagtaaagttttatcatttatcagtctaaaagacaacggaatgaactgaaagggaggaaaaggaaaggaatgcgggcttaaatttctgagaacatccccaagaaagtcttaccaatagaagtgttcaatgcctgtctgctgaacgccttggcatccttcaaacttattttatgaccataagccacattggaaagaaagtcctgttcccggacaagaagttgctgatacatttgtggaaattcgtccatatattcatgggcggaggaaacaaactgcatataacatatcaggagattgccattcagatgttcgggaaaactgtttatcacccgttctatcggatttctgtattgccttaaaaactcattccaatccttgtcagccaaagaatacatttcacaagaaatctgcgagtcggggaaaaaacgcattctgacaaccgcatcaatcagtttctttttggaaggaaagtagtgtatgacagcccctttggatttatgcacggcaacagccacatcacagaatgaggtctgcttcattccttttgtgatgaataacctgtatgcctcctctataatccgctgtttcaaattcgggtccatcctactgcctatattataaaaaaatagcacagacgcaatcaacatccaaacatggtagtggaatacctagagacgaagtgacgcacctgtgctatatattttaatatagcgcaagctgtcatattccatcttgtctctttgaaattttccacttttcgtttggaagatgatatatgatactatactatgtcgttttaacagcgcaaaaatacgttatttatcgtttatttccaaatttatacgacacttaatagcactgttccataagaaaagcgtccgctttcagggacaagcagcagtattttttcaccggatttgagtttacgggtagaacagaactcatccaaggcagccagtattgctgacgatccgatatttcccacccaggtaagattggtaaaccactctcgtttgtacaattcaaaactctcgtttttcatcgcttcaatgagattaccataaataaccattgacgaagagtgaggtattacataatccacatcgtcaggagtcatgccatgtttattcagacatgatttaatatgtctaatccataacggcatcaacttcgtccctaaaagtttaatgtcctgtttaataaccataagggactcatcgaccaattcctgactttcaaaagatttccagcttttcagttcaccgtcctccctccggacagctccggcaaacatacaggtaggggtttcattggcatatgaatccatttctatccattcaatctttaaagatacgcccttttctcccggatgattttccaataatgcacaactcgcaccatcgcttaacataaagcgcaggaagtccttttccaaagccatatatggattggtgcccaaattgcagcatctttcatattcgatatcgaagtttttggataaaagcattgctgacaccaattcagatgtgctgcatattgcattctgtttttctgatgcagctatgctcaaataagctattttcagcgcttgcagacaagacagacaaactccagcagaagagaatatttcaacaggttcttcccaaagcccatgtaccatagacgcatgagaaggcagaatctgatcaggggtcgcagtagcacaagcaagcaactcaatgtccttttggctcttattggtcaatgccagcaacttacgtatagccagcatcgccatttctgcatttgtatgtgtgatttcttgatttttgtttaaggcatagtatcgccgtttaattccattttgctttaaaactatccgttgcactttggaatgttttccagaaatgagtcccaagaactcttccatttcatcattggaaacaggagagttcggaaagaagcttgcaagcccagtaataaaaacatctttcttcattagttcaatttttaattagttcatattgattataaagaactactttcagttcttctattcgcaatccattcaccaatgcatcctgaaaacattttccaaacagcaggattcgaaatgtcaaagccaatgtagaaggattaacatcggatcttatttcttttgtttcaacagccttcacaaatattctttcccataatttaatctccttatttgttatttcgttgaaagcctcgttaaatcccggatagaaatattctgcctgcaaaatcaagttaagatatgcacgtgtaatattggtcttctctttttctatgagatagatcctcattgcattcatcgtttcctccaccttctttatgtaataatcaataaattcaagcagagaggtgtgagaaatgtccttgaacttatttttggcatcttgtttgtgaaaaatgtaaaaatcaatcacatcaataaacagttcttgcttgcttggataatgatatgacatacatcctcttgataaattcagacttttttctatctccttcaggggaaccgtgttgtaatcttttgtcagaaactgtttgtatgcagcttccctgattaatctttttgtttctgagccttttactcctttcataaccttgttttttagtatcatacaaaagtaggtcttttgagtgaaaacacgttcatttttagtataattaaatatgtcctacccaattaccattaaatcatttatgaccatacataccagtttatgaaataaatgccaacgatgcctttttcttttttttcttatacatatattattttttgcttatatttgtcttcaaataagccgattagtcggtttgttcggcatagaggaacccaaacagaaagtggaatttcaaaacagagatgttcctctatgtctttgttattccatcttctggcaaccggattctatccctgttccaccatatccctaaaaaataccgaccggatggtattttttacggcaaaagtataaatatataccataaaaacaaagggaaaggccaattatgcattctatcggcaaagaaatgcctatgaaatatacataatccgcttttccctatgagaaacattatgttaccggcttatcttgaaggcatcttcatcttaacctgcaccccctgtgagtttaaaacacgaaccggtgtcttttctccggctttcaaatagaacagaatataatccttcgcacgctgggactcgaagaaacctttttcgcgatattcggcaatccacctctgaatcatcggaatctgccaacggttcatcaaaatatagtagccgaaataatactccaaatcgctcaggaaaatattgagtttcaagtaatcccaccagaactgttctttctttttgcttttggcattgagtatgataacctgatgttcataagtgtcacgaggattttcccaatcctgttgcgaaacaaatacatcgggaaccacattatcggcatgatcctttgccggaataaagggaaataaggattctattgaatcctttatctttccatataaggacggttcgtactccttgttgtacagcataacatcccgcaaacgggtggaagtgagatgggttaccacggaacgtcctaccacacaatgatccggaacagtcattaccgatgccagacgtttcataaatctgacttctgcttttgcctgttcttccttatccggtctcttgaaaggataatctgaccaggcaatcttccgcatcccccaatgcaggtctgtaagttgcaaccccgcataagcacagaaaatggaagcacgaattatcttgaagataggggtacggtcaccctcgtgggccacgtaaggcaggtcttccacgccaaaaagcatttcattttccgctatcaaatcggcagagaccgtcttgccttcttccaagcgtcccttaatcttgaagttacgcttttggtatccccaagtgtgaacaggtcgcgtagctatcagtgccacacaataattgccgttttgcggcatgaaatctacattttgcggtgttgcattgagcatcaactcgttcagcaacttaatcttttggatatagtccataaatcaacaggttttaagtgaaacattttgttaacagtgcaaatgtaggcatcaagtttcgtaccggagttccgtttttcgccgaaaatcactgcagggtcaaccaattattcaatatttattctgttctcgattctcagtatatagtttgtttccgagaaaaagcgttccatacgtactgcctgaccggttctgaacaaaggtttttcactattggctatgtaggctttttttatgggaaaattccgtgcctcttcctgttgttcaaaataaccaatggtagaacgcaactgctgttcgccgtcttttatccattgattacccttgccttttctttgtttcaactctacaaatataatcgtatctctataaaacaggcagccgtcgcagcggttgtccatactcccgtccgccctgcgcagttcaatgcaatggtcaaccggtacgaaattcacctttacctgaggataattgtccactgccgcaatccaatcctgcccctgtctttctgcaatatatgctttttcagcggcaggagccggccggtcgcatataccgaatttgcgtctgtttgatgatgatatatgttgtgtcgggaagaagtcaatcataattcctgttgtatttccaataaatcggcaaaatcttcgtttgttctctccagcatcctgttgaggaagttctcatcggaaggaagcccatgatatgtgtccagtactgttactgtcccttcgacctcgttgaactcgtaaatagcgatttcgtcagggtgtatggcagcttctatgggataaatagcatttatcctttcttgtacctcacaggaaagattacctacagccaacagcataccggctttgacagcgacggtcaggctattaataaggtatgggctatgtgttgtaactaccaaacggtttgtttccaaagcattgttaaaagccagcaactgtttcattatcatccattgcgattccggataaaggttttgttccggttcttctacaatgttgacaaatgccgatttgttgaatctggcagaaacggctgaaagggcaatcctccgttgctcgtccgtaaggttcggtatgttccatatattcgcaacttccgcttcgaagcgtttcgcttcatcgctgctcatcttctgggcactattcgcctgactttttacagattcggacaaatgtaaagaaaccaaataaagcggtacgatggattggaatccgctggacgcttccatcaacttcaccttatagtcctcacctttgacataaacaatgtcattttgtttgttatattccagttgcgcatgattgataggcagttccagactactcttaatgcgttgtttggctttgtcatattccgtaagaaaacctagcaaggcatccggcaaatccttaatcagattcggtttgttgaccatgctgatgaaattccgttcggcaggaacgtacatgatttgaggaagggcatagctgtccaatgcattctcattcttttctatgacaagttcgccttgcttcgtgtaggtaaacttgtaggaatccccttcgtagaaaatctcagtctgttcctttatgaaataattggaaatacgatggtaaccgcaatacttgttcttgaacttggcggcggtaaattctttctccttgaaatcaccccgtgtcaagaccttctccatccatgtaaaggtggaaaccagtttggcaaccgtacttttaccgctaccctggttacccgtaaaaacggttactttctttatatctatccatccgtccgttacagatgctgtttctttcaacggaccgaagtttttaatcttgattctactcatatatttattgtatagacctgttacaaagatagtgtttctaaatgaaacgacctaatgaatgttgtgtttcatttgcagtgaacatagaggtcttcccaattctttgtttttccaatttttaacctgtatgttttatgatggttttctaatagtcagaagtgtcattctgatatccgaatgtgtatcagtcggcattgaacggacggatttcggaaagattttcattgccgctgtcaataaagcggtcgagcaccttaatcatgacaacaggtatattctgcttccatagtatctgtgcgtccagctctgtacaaaccaatgccatctgtttcaattctttttccaagtatgctcccgaactgatatattcattcagaagaggtttgttttcggataatttgattacagaggcatataacttgtattgttcattgatacatttcaaatgaaacttgtcctttagtgtggaaggcggatcaagtaatttcagtttgggcaggtctgacttgttgagaataatcacagtatttgtaaattcgactgtatgatctccaggcagactatacaacaatctgttgtcaggggatttgaacttatactcgttttcctttcgtaaattctgaggataagcattgtaccagttgaagtggaatccgatgattatctgtttgtcggtcaatcttaaagtctggaaggccttgtcaagattctccggaaaaaccctatattcacttttaggctgatactggaagcttcggagccagcagtttttgaaagagtatagtgtagcagcactgaaagactccttaaaattgacatatcctattgttttatccgtacagaatgcctctgccggcatcagctgacgtattcttccgacacaattgaacttgttacagcttttgtactcatcatcagttatgacagaaacttctgtaatccacttcatttctctgccaatactatctgatgctatttggtaaaaatcctgaatttcatcttcagacagctgttgagtaactttttgatgttgtattgttgaagtaagcgaattggaaagggactccagtgcattcttcagcttatgtttagccctgtatatgcacgactgatccaatggcagtattgttgtgatgtcttccagtggaatggaattctgctcaatctgtttcaggataatcggaacattttccagccattcgttcttttcggataaggattcaggaagagccggcagtgaataaaaatcctcgtaaacataggtgcggttaagtgttgccagacgtaacattaggatatacaagtatttctgtatccagccattgatgatgctattgttgcgtacgccagcctgaagaccaaaaaatggatatttttgctcgtatttgtacattgaatcgggactgaatgagagcaagtccatatacagtggaataatttcagccagtgaacttggaatcagtacataatgagggggttggctattagtgtaatacaatatttgatttaaaagttcatattcttttctatataacaaaagtccacctaatgcgatatgaaactccttaaattctttccgttctttctgcctaagctctaccatttggctgtttgcaacagtttgtccagatgaagtgtagggaacgtttatacgttcatcaagttggaaagatgtaagatgaagaaacaagtgtgaatgggctgcaccccaatatttaagaatccattcgctgcgcttgtaaaacaattgctggttcaaacaagtccaaatcgtacggtaggtattctgatgcattatggtgaactgaaaatcatccagcattgcattgactatatcatttccgttcttgatggaaaccgcttccttttgttgcatgcacagctgctcattaatggagacaatgccttcgtataactccggcggatattccattaacgtccattgtttacctgcacgtaaagatatgatccagtcatacaattcctgatagcaatcgcgcaatacatccacattgttctgtttgagcatggcaataaaaagttcgaaccacgcttttctggtatcttgtgggatattgtttctttttatcaaatgcttttgcagcttttcaggtacattatagatatagataagcctgaaaatcataaatatactgaatgttagcagtacacagaatattgtcgcgagaataatggcagaataatctatgtactttgtaagaactccgaaatcaaaatagttaggtggagcgaccaattgatagaacagtaaaaatatggtaatagcgagcaagccaagaaaatgctttgtgcttctttcgttcataaagagttgtatcaggcgggtagattcatacttatcgtctatccgctgaataactccaattaacaagggaacggcaatgcccagtatggctgccgttataggtataataatttctttagaaaaaatgtccataatataaaaaatgttcaatagttgctatggtactggaggaaactttatgcgtccttctttatcgatggtacaagataaggcttccccttgaatttttttagctatacggttataatttgttgctgttcgtgtttttaaatctaccatttctttccaatcaaaggtatgctctatattaaaaacattctgttcatttgctgaagtaaatcgcatggatgattttacatggatattaccctcttgagaccggacattccagttaaatctgggatgatattgtaattttgcagcgaggcataatctttcgactgttgcctgaattatacctatagtcgtgtttaaatctttcagactttgggagtaataccatttgaattcatcatagatttggtaatccaagggattctcaaaaggttggaacaactggtaaattttgctcaaaaatgatgaatcatagtcatgtaaaaatgccggaacctcctgatccattaaaacacggcagcctttggccccagcctgttccaatttgacagccttacttacagcatttcctagcaacatttgtcccaaattagtgttgttatcttcaatgatatctccgtatgcaataccaccacgacatagaataccattttgcaaacaatcccacataatagtatgacatgaaagtatgacatctttcatgttttcagaccagacgaaagcgcaatcggacaactgggtgaaatttactgtagggtatttactctggcagtttgccaagattttccgaaaaatgatcaaaatattggctgcaaattcctgattccctgaagtctgaaaatgtttagagacctgccaaatattaaaatcgtcttctgtaagctggattttaccttgtgttaaagctgaaaatcctagtatatccacatagaagacaaaaccttttagattattcatgttcataatgttatcgtttataactggttgaattttttttggacattttgagctatactgatgaaacagttgggaattgtaacatattagttgttgcttgtcacaaagatagtatatctaagtgagatgagttaatgggggctttgttttatttttgattttgccaataaatggtatttcctaaaataattttgtatagttcttcatttttattgtaaaacaagttatattcttctttatgtttccatcttgaggctgttttgatgactttaatgagtttattattatcataaaagtattctatagttgaactatcaccataaatattaactccaacatatattgaattctcattatttactatttcaaattttgatatagatattaaattaattacgggtgtattttcattttctgttgggtaatatttgaaataggttttgttatatccatgtttagaatattcatataaactgatatataaaccttttcgtatatctgcatctatatgttgctctgaaataatcattttgttattttcatcgaagccaaatctgaacaagtcctgataattccatttttcaatggtcatgttttttaaaagtctaccttttttttctttattaagtaaatgataataaggtagtagattataatattccttggtcgaatattcccatctatgtacattttttaaatattcttttataagaagaatattattctttttttgtaaacttgttatttttaattttaaatctgttaacataattgtcgatatttaatataaattacttatgaattaatgggttgaattgttccatcttccactttctatttctgttccaattttttgtaattgttttctgacataattgtcttttaaattatcgcttaatttattgtctatcgcatatttctcagcactctctaataattcacatattcgtttatcactttcaagcgaatgtatgtaccctgcatggtaagtaccagtagttctggcagcttctcttcctggatgtccagattgagttacttgagaattagcagtaccccatagagcaactccattttcggcatcattaattcctatgtgacacctttccaatacggctttggatctgtttacatattcattattccgattcaattgaacaatatgatgtggagtctgtccagcagcaacaggcctataggcattttccatagctttttttaatttataagcatgagataagcctaaaatatcaagtgctatgttagtagaattaacatatctatatattgctaaaataccagattttaatcctataggatcttgactcatgtaactaccaattcttggttcataatacctaaaacggttgtagtataatcccgattcctcatccacatattgcccttgaaacctgaatggacaatcaaactccattcctttatttacagtaatcacttttccataaatatctagtgtacaatcccaagttttgtttcctttttcatcgtacatctgaataggtgtacccaaataatcggacacaatagaatattgcttaccatcctgtatctttgctgttggtacaaacgtgcctgcttcgaacacccaggtggtaacatcttctgccggttcttttggaaggatgttttcctcttcgtccgattgtaagccaacggctttatagctccattcgtgtaaaggtacgtttccgtcccacacccagcgtgtgacctttccgaaatactgtttggcggtgcgtcttcccaacgcatcgtaacggaactccaccggtcttccgtccggacgtataaccttctttagcataccattggaactccactcgtagagccatcccgtacctgtagccagacagcggacgccgcgctccttctccatgcgcttgcggtcataccttacgcccgtttcctgcaaccgtttgaactcacggaaaatgaggtttccttcgtcgtcgtagtgatagaaacaatccgggtcttccaacagttttcccccgggaccgtatttgcggtcttttttgtccggtgtctcaaagaggttgcccacgaagtccggtacgcggtaaatcacgtccgtttccgagccctggatggtttcctgccggataaggaagtcgaaacggtcgtagtcgtagcgcatgaccgttcccgtcagctcgttctccttggcgagcaaccgattagcgacgccccactcgtagcggtacgccccgcgctcgatgccgcccgcgcggacggacttgcgcacctcgcgcccgaaacagtcgcgctcggtgctgacggttacgccaccggagaaggtgcgctgcacctccagccccgtattgtcacgcacccacgatgcctgccagctctcgcctgcctgcatggtctgcaggttgccttcccggtcataagtgtgacgaatgtccgctcccagactgctggtgatgcgggtgcagttgccttcgctgtcataggtacggctgacggtgtattctccctgcctttcctctgtaaccagtcccgtcttcctgtcacgggtgaattccagcaggttctcgctgtgtttcgccctgacgagcatgccgtccttgtcatacgtgtagagggagacctccccgtcatactgttcctccttcaggatattgtccagtccgtcgtactggtattccgtccattttcctccgggacggttcacacgggtgacacgacccgcgccgtcgcgctcgtactcacgccgcagaccgtcgaagccggtttccgtaacgacctgtcccagcccgtccagctcgaagaaatagttgtcgcccacctcattgccgatgcgccggagctgcaactcgctgttgtagccgaatgtaatccagtgcctgtcctgctcgcggcttttcaacacccccagcgccccataggtgaacctgacctcgcggatgttgtcgctggcatgtaccatgtttcccatggcatcgtactcaaaccggtgcacgttgccgtccggttcttccagccgtatcaggttgtccgcccgattgtaggcataacgggtaacattgcctttcacatccaccgcctgcacaagccttcccctgccgtcgtactcccaccggcggaacagcccgttggggaactgcagcagctccaggtcgtacctgtcgttgaacgtgagcgtgtaaacccggccctgtccgtccgttatggtacgcaacacgcctccctcgtagacatatttcacagtttctccacccggtgtggtccggctgacgacccgatcctgtccgtcatagtcccatgaaagcctctttccgcacggagtgtagagcgagaccaggttgcggttgttgtcatagtccaggaaggtgtcctccccgttctcgtccgttatccggaccggcagtccgaactcgttgtaggaagtcttgcgggtatagccttcggggttgaccgttacctccagctcctgaaagctgttgtactggcggcgggtaattcccccgttggcatccactatcttgtagatgagtttgtcctcaccgtaataatattcggtttcggcattttccccattgcggatatgggtatatcccttaccgtaacggatgaaatattccatcacgcctccatcgccccatgtatgcacacagcgggcattctcacccttaccctcgtattcccaatggaaggacatacccccttggttggtaagctgtaccagcaggtgcccgccggaatagacgaaatgcttgctgacatccagcgcgtcaatggtttccaccatgtcgccccggtcatcgtaacggtagcggaccagcttcacctcctcaccgtcctgatttacggaaacgcagagcacccgccccgactcgtcggtttccactttcaggaattctccccgtgaggatatgattcctgccagccttccccccgaagcgtattcgaagcggagccggaatccgtccttcgtggaaatgcccgataccatgcggtaaccggagcggttttcgggaccgtcaaaacggtattgcaacccccggatgtccgtaagcatgtaaccccggccatcgagtgtccatgccagctgttccctgcggtcaaaatgggattctccaagtttcagcgcaggcaggaaggactcccgtccgtcagcatgacggaatgcgaacgccccttcctccaactgccgtattcccagattgtagctgtggtgccaattgtatcccaacggaccgtccacggcggcatcactgtaataggtacgttcccatacgacgggaatcggacccggaagctcgaagtccacattggtgtgatagaccctgcccgtagcagcgtccaccggctcaccgaatatgatgcaagctgttttcttgagaatcctggcaagccggggattcaatcccgccttgtctatcaatccatgcagcagatgggatatttttttcccgagctttgacaatcctttcagccccagcttcatcgccagcgcaaacacatcaatggtaggcggtcctcccacaagcacgggatttcctacggatgtgatggtggagagcatggaagtgggggcaagcagggccttgctcaccttcctgggcttccccttgcggggaatcgtcggtattcccacaatgttgcatgagagtgccggatgtgtgagggaggaacagggcgcaccgtccgccaggacagtggaactgcccatccacatctcggactcggacataccgctgaccaacggggccggatgcaatacaaatgccggcagatgcacgatgccgatacctgcctgcgcaatccactggttatgcaccttgaccgacggagccatgctcttgaggatgttgcacgccactccggccactccatcagccgcaggcggcatggcagccgccatgccggccatgaggtctgccatgaggtcgtacaccttgcctacatgaggcacaggcatgatgggagagggaggggtaacggtaggatgcatgtctatcccgatggacaggtcgccgaacttggcgacaggcatacccggcatggaaggaaggattccgcccagacccgcctgaatctcgtccaaagccgccttggaggctgaaaaaaggtcggcaaagccccgtctgacgctgctgctaccggcggcgtcagctatattcttgaacacatccggcataatgaaactttttgattcttgtttttaaaccgattggtcggtctgctttttgcaaatgtatcatttaaaatcaaaaaagaaaaacattctcctactattttctatcaaaaatcataagacaatccataaaaggcaattgatttcaagtcatgtatcaaaaaaacgtcgtatatttgcatctgttgaagaaaaaaggagagtaaatggactttgaaggagaatataccatacggacggcttccaaccagcagacatacgagccgaataccgtatatccggacgcagtgctaaatatagcccgcgaatcggcttccgtgttccaactgaagcggaaatgggaaaaaactcctccgatgctgaatctgacccctgattttcaacggggactggtatggaagaccaaacagaaaagcgagctgatagaatccatactgatgggtattcctctacctctgatttatgtgaaggaagatgagaagggagtgtatcttattgtagacggcaagcagcgtctgagcaccttgttcagttttatcaacaatgaatttgccttggacaaactcactatcctaaaggacaagaacggttcccgattcgcagatttgactccgttggagcagaataaaatagaggactgttcgcttaccttgcatgtgattaaggcacctaccagtgaccgggttacctttgacttgtttgaccgggtgaaccgtggcgggacgcggcttaacaatcaagagatgcgcaatgcgctctatcagggcaatgccacgaaactgatcaaccggctggccaagaaagaggtattcgttgaagctacagaaggttccattccagacaaccatatgaaagacaggtatctggtactccgttttacggctttttatttgtggcagcagcatatcaccatagacccggacacccatgagcctctggattaccgaagcaatgtagaggattttttggggaaaacgatgcgttttctcaatcagctggagccggaaaacggtttgtttaaagaactggatagccggtttacacgtgccatggagcttgccatacaactgcttccgtcaggcggcttcaggctgccttcgttacccggcaagaaacggccgataaacatggctttctttgagagtttcagttatcttctgtcaagattgaacggagaaggggaacaattccatcgtcaggttcaggatacttatatgcaattaatgtgcaatgatgcctatctggattctctcacacgctccgtggatagcggaaagcagacctataagcgttatgaaattatcaaccgacttattcatgaactgaatttatgctaaacaatctgactgtcaacaattataaatgcctggtggaatgttcgttggaattaaaacctctgaacctgttcgcaggtccgaattcatcgggaaaatctaccgccctgcaagccttgctgattgcttcggataacgtgacggagcaaaaaggcaaacacggtctgaagaaccggagaacagaagcgtcgaatttcaatgatgtaaggaactttgtgaccaatgccaagtcatacgaaatctgtatttcgtatcatggagaagatccgacccggctttgttttactccgggcgatgactcattccaaaccacttttgtggaacaatcggctgacgcatctccgaacctgctgggagttctcggaagcgagaacctgctgtacctgcctgccacacgccccggtggggcatatatgcatcccgttaatcccgattcggaaaacaagctggggcgtaacggggaatttgtgatagactattacgccaagcaccgtctggatacgctggatgccgcattgatcctggctcccggcactcaaaccctggaaggtcaggtgaattatcaactggacaggctgaccggttaccggctggtggtggaaacagtaggaagcaatcattacgtaaaatatgaaacgcgcagcggcaaacagcttctcccttaccatgtcggtaccggagtaagctttatgacggaagtcatcatagcttgtttcgcgaccccgaaaggcggcatggtgattacggagaatccagaaatccatctgcaccccaaggcacaagccgacctgattgatttcatggcaaagatagcgaaagccggtgtgcaaatcatcatagagagccatagcgaccacctgtttaacggtatccggcgcctgatcagtcaggaaaagttggccttgtctgacgttgccgtgtacaacttcagacaagacgggaatggattgacccatgccgaacctgtggaatttaccccacagggaggaatccaatcctatattcccggcatgtttgagcagtttgatattgatttggatgccattttaaagctataagactctatggacggtatcattatcaatgaattgtcattgaacggacagtttttggacagccgggatttctggaaaaacggaatgcctccgtttcacaaggcattgcaggatgccctttcacatggagtgggatatctgttcaaacaaggaagtttttttgctgcgcaagccactcccgacaagactttacacgatttgctgacagcaccggaaacccgtatcatcgatgaagccaggctgtataaaagtacattggcacgtgccatctgtaatccgttttgggatgaagctccccaacaggattccaatgcccaatattcagtaggtgaaaccgatgtatccggcagttcagttgccgaagcagcagcccgctcggtttgtcttctatcatttattagatccaggtatgagaagcatctggttgccgtaaccaaagatgaagaaccaatcgaggttggtaatatctggaaagagaagcaattgtactctatcttgtttgaaaggggtgaactatctctcgaaaagtatattaccattcgtttcagtggaggcaagcttgatttcagccttattgatgacacgctgggtttttcccttattgacggcgagaatcagaacgaatttattgattcattccataaatttgaggagttggactggagtgccattgctacagataatggattggattataaaccgtataacaagaacaagaaaagcaagcgctatttttcggatgacctatggaagaaaggcattaaaaagttcagaatcactcagcggaacaggtgtttcggctatgtggagaatggtgttttttatgtgttgaggtttgatttggaccatgagctaagcgatgttggataatgtttatagccccttggccttatttttataaaaatagaaagctgtgcaaatttataagattggcatcttgcttatctccatatactttcagtcggaaattcaagaattacaaatcctaatacttataaccggcggatttataatccgccgggacgggtcttgtaacttaacaataaaggtagtgttccaataattaatatgtaatacatttgttttgatactacctgctattgtactaaaaaattaagaatactcccaatatgcaacaaaaagattttcaatattttcattttctattttaccatatacatatatacttccactcataaattctgagatgcctctcattccaatttcgttgatttgaaaaatgaaatcatatccatcttttgttacttttccatcattatccaatccccattgtattggtatagcttttcctccaaatttgataacattatttttttctggcccatctctgtcttctcctatttcatataaggaataaatatcatcaatttcgggatgtttaaatttagtacaattactctgttcgcttatttcatgttcaattagtaatactttgcaattaggatatgaattgtattctaaggaagtatcaaaatctggagtaaaaatagagtattgtctttctttatttaatgggctttgcagggttaagtagaaataatatttttccatattagggaaagaaatattatctaatattttaggagcattacccccaacccaactattacagttttctttatattcacatatatcataatataaagcgtcttctctagtctttaatatcttttttatgttcataactattttatgatttacatgttattaaattatttgctttagcatgtgctattgcatcctgtctgagtttctcgactaatgcggttgctttttctttcgcagtttttctatccatgccatcagctattaacccttccattattcctctacgtgttaaagctgcatttttgtttatccttaattccgcaacactattacaaatataactttttaagtacctgagcaacaaaaagttgctcaggaatttgccatgtcagatttttcacctatcttagtgttgcaaatcaaaatatgtatcaaacccgacagacatggcaaaggtagcaattaaatccgagaaactcactccttttggaggaatattttcaataatggagcaatttgactccagactctcatctgtaatcgactcaaccctcggtatgagatgcaggctgtatggttatcaatacagcgaaatcatccgttcgcttatgagcgtttatttttgtggcggctcatgcatcgaggatgtcaccactcatctgatgtaccacctttcgcttcatccgacacttcgcacatgcagtgccgacacgattcttagagccataaaggaactgacccaggataacatttcctacacatccgacactggcaagacctacgacttcaacacggcagacaagctgaatacactgctcctcaattgcctattgtccacagggcagctgaaagagggcgaggggtatgacgttgacttcgaccaccagttcatagaggctgagaagtttgatgcgaagcctacatacaagaagttccttggttatcgccctggcgtggcggttattggcaacttgattgtcggcattgagaacagcgacggcaacacaaatgtccgtttccaccagaaggacacgctgaagaggttctttgaaaggtttgaacaaaacaagcttattatcaaccgtttcagagctgattgcggctcgtgttctgaagagatagtggaagagattgctaaacactgcaagaccttctatatccgtgctaaccgatgcagttcgctctacaatgacatctttgccctcagaggttggaagaaagtggaattgggcggcattgagtttgagctggcctccattctcatcgagaaatggaaagggaaggcataccgtcttgtgattcaaagacagaagcggatagacggcgaactcgacctgtgggaaggagaatacacctaccgctgcatccttacaaatgactacgagtcttccgagaaagagattgtcgaattctataacctccgtggagggaaggaacgcatcttcgatgatatgaataacggattcggctggaacaggcttccaaaatcctttatgggagaaaacacggtgtttcttctgcttatggcactcatacgcaacttctataaattcatcatggcgaggcttgacgtgaagaggttcggactcaaagcaacaagccgcatcaagacgtttgtctttaagttcatctctgtgccagccaaatgggtcaggacatcaaggaagtatgtgctgaatatctattcatgcaacaatgcttatgccaatgtgttccagaatgactttggataacaccgacaacttatagtcgtgattttgcgtattgcctcaagtcgcatggtggggtaaggggcatttatatgtctttatggtgacattcgatgcactgtgccccctttttactaacgatgcagattcttttcgcttctgtatcatattaggcgcgtagttgcggatttgaggtttatattttctagtgcagattgtcctttcaagtttttacctttcatcccatatctattttgaagagcggtaattctattgtgtatacccttttctcttaatgcaatagaagggttttctttagaaattaaatcaactcctctatttttacttgtgggaagtttattgttctgttcaagccatgcgtgttgaaggagttcgtgtgctgttaaattgtcaccaatattcgccctactgctaatattgccataagtatcgatgtcaaattctttggctacaagtccaaaaatatcaatacaaagattgacatttttgacatagctataaaatctttcacctgcacttagtccaatagggtcttgacttatataattaccaatttctggttcgtagtacctaaagcggttgtagcataatttagtttctttatccacatactgcccttgatagcggaaaggacaatcaaattctgttcccttatcaatggcaagcacttttccatagatatccagtgtacagtcccatgtcttgtttccttgttcgtcgtacatttggatgggggtacccaagtagtcggacacaatggaatattgtttaccttcttgtatcttagctgtaggaacaaaagttccttcttcaaatacccaagtggtaatgttttcaatcggctctttctgaaaggattctcctttttcatctggttgtatttctgtagttttgtatctccattcatgtataggcacgtttccatcccatatccaacgtgtgaccttcccgaagtattgctttgccgtgcggcgccccaacgcatcataccggaattccaccggccttccgtccggacgtatgaccttcttcagcatgccgttggaagcccattcgtaaagccatcccgttcccgttgccagaaaatggataccccgttccttctccatacgtttgcggtcgaaccttacacccgtttcctgcaaatgcttgaactctctgaaaatgaggttcccctcatcatcgtagtgatagaaacaatccgggtcttccaaaagttttcccccggcaccgtatttgcggtctttcttatccggtgtctcaaagaggttacccacgaagtccggcacacggtaaatcacatccgtttccgaaccttgggtggtttcctgccggataaggaagtcgaaacggtcatagtcgtagcgaatgaccgttcccgtcagctcgttttccttggagagcaggcggttggcgattccccattggtagcggtaagcccctttctctatgccgcctgaccgtaccgacttgcgtatctccctgccgaaacagtcgcgttccgtcttgacagtcacaccgccggagaaacttcgctgcacctccagcccggtattgtcacgtacccaggatgcctgccagctttcacctgcctgcatggtctgcaggttgccttcccggtcataggtatggcggatgtccgctcccagactgctggtgatgcgggtgcagttgccttcgctgtcataggtgcggctgacagtgtattctccctgcctttcctctgtaaccagtcccgtcttcctgtcacgggtgaactccagcaggttctcgctgttcttcgccttgacgagcatgccgtccttgtcatacgtgtagagggagacttccccgtcatactgttcctccttcaggatattgtccagtccatcatactggtattccgtccattttcctccgggacggttcacacgggtgacacgacccgccccgtcgcgctcgtactcacgccgcagaccgtcgaagccggtttccgcaacgacctgtcccagcccgtccagctcgaagaaatagttgtcgcccgcctcgttgccgatgcgccggagctgcaactcgctgttgtagccgaaggtgatgtggtgccgttcctgctcgcggcttttcagtacccccagtgccccataggtgaacctgacctcgcggatgttgtcgctggcatgtaccatgttccccatggcatcgtactcaaaccggtgcacgttgccgtccggctcttccagccgtatcaggttgtccgcacggtcgtaggcataacgggtaacattgcctttcacatccaccgcctgtacaagccttcccctgccgtcgtactcccaccggcggaacagtccgttggggaactgcatcagttccagatcgtacctgtcgttgaacgtgagcgtgtaaacccgtccctgcccgtccgttatggtgcgcagcacgcctccctcgtaggcatatttcacagtctctccgcccggtgtggtccggctgacgacccgatcctgtccgtcatagtcccatgaaagcctttttccacccggagtgtagagcgagacgaggttgcgattgccgtcgtagtccaggaaggtgtcctccccgttctcgtccgtaatccggaccggctggccgaactcgttgtaggcagtcttacgggtatagccttcgggattgaccgtgacctccaactcctgaaagctgttgtattggtgacgggtaattcctccgttggcatccactatcttgtagatgagtttgtcctcaccgtaataatattcggtttcggcattttccccgttacgaatatgggtatatcccttgccgtaacggatgaaatattccatcacgcctccatcgccccatgtatgcacacagcgggcattctcacccttaccctcgtattcccaatggaaggacatacccccttggttggtaagctgtaccagcaggtgtccgccggaatagacgaaatgtttgctgacatccagcgcgtcaatggtttccaccatgtcgccccggtcatcgtaacggtagcggaccagcttcacctcctcaccgtcctgatttacggaaacgcagagcacccgccccgactcgtcggtttccactttcaggaattctccccgtgaggatatgattcctgccagccttccccccgaagcgtattcgaagcggagccggaatccgtccttcgtggaaatgcccgataccatgcggtaaccggagcggttttcaggaccgtcaaaacggtattgcaacccccggatgtccgtaagcaggtaaccccggccatcgagtgtccaagacaactgttccttgcggtcaaaataggaatctccgggtttcagtacgggcaggaaagactcccgtccgtcagcatggcggaatgcgaacgccccttcctccagctgccgtattcccagattgtagctgtggtgccagttgtatcccaacggaccgtccacggcggcatcactgtaataggtacgttcccatacgacgggaatcggccccggaagctcaaagtccacattggtgtgatagaccctgcccgtagcagcgtccaccggctcgccgaaagtcttgcacttgatgggctggagaatgtccgccagcctgttcatgccttttttcctcagcctgtcgattaggttttggaagcggtcgcctatcttcttccacatcttgcccaagcctttcagtccgaacttcatcgccagcgcaaatacatcaatggtaggcggtcctcccacaagcacgggatttcctacggatgtgatggtggagagcatggaagtgggggcaagcagggccttgctcaccttcctgggcttccccttgcggggaatcgtcggtattcccacaatgttgcatgagagtgccggatgtgtgagggaggaacagggcgcaccgtccgccaggacagtggaactgcccatccacatctcggactcggacataccgctgaccaacggggccggatgcaatacaaatgccggcagatgcacgatgccgatacctgcctgcgcaatccactggttatgcaccttgaccgacggagccatgctcttgaggatgttgcacgccactccggccactccatcagccgcaggcggcatggcagccgccatgccggccatgaggtctgccatgaggtcgtacaccttgcctacatgaggcacaggcatgatgggagagggaggggtaacggtaggatgcatgtctatcccgatggacaggtcgccgaacttggcgacaggcatacccggcatggaaggaaggattccgcccagacccgcctgaatctcgtccaaagccgccttggaggctgaaaaaaggtcggcaaagccccgtctgacgctgctgctaccggcggcgtcagctatattcttgaacacatctgacatggtgagaattttttagaatgtgaaaaagagacaaccgggtgttccaaccggcacactccggctgtccctgtaaggacttacctatgcatcctgtgcatagtcgctgttccagtcgttctcgtcatccccttttgtaccttccaacttgatgacaaaactctttgccgggaaataaggagtcaggtgaatgtcgaggaaaatacggtctttctgcttcggatcgcgctcgaaacgaagaatcttgaatttctcaatcaagcgtccgggaccctgtatgctatccaaaaacttgctgatctgaccacgcaaatccctttccgccttgctgttccagttctcaaaggcacggcggttgaggaaatccatcagcactttcgttacccaatcgaacacacggactacggaataggtctgcaatcccaagttgtccccgttgaacaatgtcttggcagagaaagccatcaccttgccgtattccttcaccatcggaatcaggccaatcttctcgatttcggaaatctcgctttttttcaggttgaaagcaaccccgtccacctcgctcatggaaccatacttcttaccggcggtaacctgtgccattaccgtcttgtacacactgccggccaatgccgcagaaggaggaatcagcaagtcttcggtttcgcccagttccgcatagcgtccccgtcctaccagatagttgcaggtcatacatacgttggacttgtacacatcgcctcccgaaagattggaatcaaagaacatttcaatgacatcatccggtttttccagatcagcgaaatccgtgtaaatcatcaccttgttgtcatgcgcaatctttgcccatttttcaacaaccttgttggaacccaaatatcccgggataaccagcagggaatagttggtacgcaagtccaaacggtcataattcgcacgaagctcgttagcaatggcatcgataaagaaggagttgtccaaatcggtaagctggctcatcgaagcgttcacaatggagatattcttgatcttgtcggaatccgtattcttgtagaagagcatgaccgtgcggtaggacttctccaactgcctgacctcttccaccgctttcagctggttctgggatagcagaccggacaccgccgcagacttcttctggcacagttccaccatctcgctgatggatttgttgcctttcaacatatcgacccacatctcaagccgtttttccagttccttgcgctcagccgcccgttcggggtcggaaaggaatatgttccgccgtgccttgcgctccggattcatgttctgtatgccgtccacggaagattccaagacattgaaaccgccaaacttagccagaatctgcaattcagcgttcagatttctggactgcgccacagcctgttgctgctgtacggctgcttctctttgtgtattctgttcgctcataactatcattcattagtggggttagacttctcattgttcttcaaatcgtccaaaatggcagaaatcgcattgacaaacgctccacgtgtctccggattttccagcacccgttgcagcaccttgttggaacgcaacgacttctccatcctgtccgcaaactgcttttccgcattcaggccggacaagaatgaactctgttccgtcattttcctgacagaaaaatcaccgacattgtggaaacggaaattttcctctacgggagcaccgtccgcatccgcgaactcgatatctatttccggccggaaatgtgcaaagacttcgtcaatgttggtcagaccggcaaccacttcgggagccaccggctcatccttcgtcagctgttccaccaataaggttcgattttgtggaatttccgcaataccttcggaagcgtcaatcttcacttcgtttccgccgattccataattaccaagatccatacttattcaattttaaatttaaaatatatattaattaaatctcgctcaactgaaaaaacttccccttcttctggccttcgcctgctgcatatccggattgtccaccagttccttccaatcctccccaatccattcgcagagctgccgttccaatatcccgacatcaatcggagcacgaaccagccttcctgtatgaagagccagatacgccgcataaacgaacgtggaactccgcctgatttcggcagaaaggtagctgcctcctgccagggcaagcaaaaaatattcgaaagcctgttccatctttccatcctcatagcgcaggaaaccacacatgcgatagccttccatgacataataagggtccttttgcatgacggcttttttagccatcatgtcatacaaggcaaccgcttcctcccgttttttcccggctgtcagaatggccgctttcatggaaacagccattttccaataactatatcctgccgtttcaccgccctgcatcgccttttccgcctcccggacggtttcgtcgctgtatttcatgctatgcttatattccctgatagcataacatgcctcggatgcgataagcagagcggaaatccggatattcgtatcctttatttcctgtgcaatatccaacagttttcggatttctctgtccaataatttccaatcctgcttttgtgtagaatccatgacaaccgtaacctgctgcttgaaccgattttcaggtgcaatcaggtcgttaccgctatccgaccgtgccatccggttatgcaaagccgccgccatatcgaactgcgggcgtatgcaaaccacttcccgagactcacccagccggatactcctgttctttttcaagtcaatggttgtcatccggattccctgcgggacaccttctttcagcacattgccgaaccatcctgtccgggaataccccctttcctgttccggaggaaagtacagacagaaaaaggcatcatccaaccgggagatacatgccttgaaacgcaacatctctctccacaagttgcccgccgtatgctcaaccgacacatcaggaatgtattcttccttcagcagcccgtcgtgcctcagagccctgagaatatcatacttctcctcaaccttttctgaaaaccaacccgcatattcctgccagagctgttcagtgtattcctcgtcatcccccctgtacggcgtatcaaaacgaaagaatatgtcatcgaactgccctaccggagaacgttctatttccagaaacctgtccaccaagtccacatcattctgcccgacaatccatacagacagtttccagtccctgttgccgactatgtccgcccagtaatcgactgctttgtaatattcctgtatcacagatgcagatgctcccatagccaaccgaattatgagttaaactttactattcctcccgaaaccgttacgtttccctttccctctatcatcagatttacaccgttgaccgttccgttctttgcagcaacatcgtaatcctttgccgcctcctgtttgatattggtaccgctgctgctaattatactcttttcgctgctgagcaccatacattcgttgccggacagcaatgttacacttttcctgccttcgagagcaatggtatcggcctgcaagcctatcgacttatcatccattacgatgaccgattccgcctcgttggtaagggtaatgcttcttttcgccatgacggtaatggcatccgtgccatccaatatgatcagctgttttcccgtctggtcggtaataacgatgcttcccgtctcatcgtcgaaaacgatggcattgccgctgcgtgtgataatgctcttgaccttgttgtccttgtcccctcctttacctgaaccggaatggaacaccgatcccgtaacataggggcggtccgggttgccatgctcgtagcttaccataacctgatcgccgacttccggaacaaatacccatccgcgattcttggaaaccgcaccacttactcccgcattaggagtctgcaccctgatccaattggttgtcttgccgtttttctgccagtcgaaagccactttcacacgtccctgtcccttgtcgtcgttgttttccttcaccgtagccagttccggcaacgccaacggtcgcttcacatcgggaacaggaatatgtaccgtaccgtccggcacaccgacaaaactattggagtaatgtccgtcacggcgtacctcatgctcaatcccgacaatacggaacttgcctaaaggaggcagtttcatcctgtcagggaaagaaacatcgatgatttcaccaatccttatccggcaagtctttcctatgcctttgatgttcagaagattggcaccagacgcattctttacaatcctcatctgttcgtccagttccgccttgtccgttacatgggggtcggcagccgaggtcgtttttgcagtatatgccttctcagagcagctgtgtgcaatagactgaaggtcgttcatgccatccggtttggcaggcgtatccgcattatgctgtttgttctcctgcgctacataatcgtatcttgcggatttacccggtaccagattggcaaccagacgtacctcctccaaatccatgtcataaacaatcttctccgtattgtccctgtcaggcttgccgaaatacactttcgtcccgtcataatagaaccactccccataaagagccgaaaggcgattcataaagtcaaagacactctcgttatactgcgccatgtagggtatgggcgccgcatacttgggattggaaaccaaattgacctttccatactcctgcgtcacctcctttattatggtagagagggactgatccatccaagaatcgagtgtcctgttgttctcatacagtatcgtagggcttgttccgtgaatggccactccgcctgtctcgcccatgcttccaaccatttccacttgagtgatgattccctcgaagtcataactttcacccgtctgcctatggacaaatgaaatgctggctgtctccccgatgtagccgatgaatttttccggggtctgttggaacgtattgttaggcgacagataattcaccaccacagtgaaggtgtgatgccggttgaaaccctgacggagatgcagtgaaacgaatttctgttcttctcctttcacggttactttagtagccaccaaattcagaaaacttgctcccatactatcttaaactatgattttaaataaataatccgactggtcggtatgttttttggtgccgaaataaccggaattggtatattccggcaccttaaaactttgattaggaaacaaccattagttgttttccggccaatcctgtacaaatgtagcctcgtccatcttcacggtctgtgcagaaatggcgaacttgattgtcatcggataagggttagccacattcagtgcctcttcgtaatccaccacataaccattttcgaacaccaattccttcattttggcatcttcatccgctttcttgaagacgatgtttccgtttacgggctggtactgcttgaacatcttatccagcacaatggtatcgggagttgattcgatttccacatagattgtgccaccataaatgtcagatgccggacggcctttggggtccacatcacgattgaacttaactctccaggtcagtacatcaaactctcttgagtccgaaaacttaaatgacgctttaaatgccatattctcaaagttttaaattaaaaaataagttgattttgaaatatccggtcaaaggaggcctgctacagtcctatctttgtccttcaatttctgcgcccaatatatggcattttctgaaaactacaaagaacttttgatgattttttcttgtttttgccgaaaatatgcccataagcataaaaaaaacactgccaacaatagccgaattattttttttgccttatatttgcaatgttctcctgcgcaatttttaaatcttacgattatggaaacaggagttggtttcatcaatcttgatgattctgtaaaaattgcgcttaacatagcacttgcagtggctcgtgaaaatgcgaacgagtgttatacaccctcgcatttgttgaaggctctacttcataaagatgtagggttaagagattttataataagtataggcaaggatttaggctatctggaggaatgggcggacgtgtatatcgaacaatgcccgaaatccacccagttgtccgaaatcaagccttcggaacggattgacgccgttttccgtgccgcagacgatgcacgaatccagttcgggctgttcgacatcaatcccatctgtgtgctattggcactggcaaagcccggtgtcgctttttccagcgaccagctcaggtctttccccattctggaaaaggatatccattccatatatataggtaacgggcagccggcatgtccttctgccactacggagaagtcctatgccccgacttccgcctcatcctccttcttgggcaaatactgtgtggatctaaccgaagatgcggccaacaagctgcatccggtcatcaaccgcgaccgtgaaaaccgtatggtcatggagatactgggaagccggagcaagtccaatgtcctgattgtcggtgatgccggagtaggaaagacagcactggtttacggacttgcctgggagatagtcagccataaagtgccctcgtttctggaagaaacccgtgtatttgaactggacaacgcctccctgattgcgggagccacctacaagggggaaatcgaggaccgcctgaaaaacatcctgaaagaattgcggaatatcgacaatgcaatcctgtttattgacgaaatccatgtattgctggacaaccgacaaggaaataccggtgcgggaaatgtattgaaatccgaactgtcgcacggcgacctgaccgtcatcggcgccaccaccattgacgaataccgcaaaatcatcgagccggaccatgctttcagccgccgtttcgaggtcatacaggtaagcgaaccggacataaagtccgctatccagatgctacactccgtgcagaaacaatacgtggactaccatcatgtaagaatcagcaacgaagccgtagccgaatgtgtccgtcttgccaaacggtatatcaaagaccgccgtctgcctgattccgccatcggtctgctggacatgacgctctccgccatcaagatggtcaatgaaacaggaaagaagaatgtggagaccctgctatccgggctggatgaaatagaaaaggacgaaaaggaccttcaggaaaagaccgaagaactgaaaacgctgcttttcgtaatgcacaacaaattaagccccatccttttaggagtcatacccgatgaagcggatatccatgaattgcaggagtatgaagaactgaccggctatctgagaaacgcattgaacgtcctcctccaatttgcagagaagaaaatagaggaggtgggtatctatgaggtagccgccgttgtcgccagcaagacaggcatccctatcggcaagatacagtcgcaggaaaaggaacggctactcaatatggaagattatctgaggcgacgcgtcgtcggacaggaccaggccctgaagacattgacggatgccatcctggaatcccgtagcggcatgaacaagccgggacagcccatcggctccttcttcctgctgggacccaccggtaccggcaagaccgaacttgccaaagcactggcggaagccctgttcaatgacgagaaatccatgatccgtttcgacatgtccgagttcaaggaagaacactccgccgccctgctgtacggagcgcctccgggatatgtgggatatgaggaaggcggcatgctggtcaataaaatacggcaacagccatacgccgttgtcctttttgatgaaatagagaaagcgcacccgtccgtatatgacattttcctgcaaatcatggacgagggaaaactgcatgaccgtctgggcaaggaaggggatttctccaactccatcgtgctgttcacatccaatgtaggaagcgagtggctgaccaagcaacttgagtccggcaatgttccgtccaccacccagatcatggaggtgatggggcagtatttccgtccggagtttctggcacgcctgtctgaaatcgttccgttctcccccatccgcgaagacatactcctgaaaatattcgacatacagttcaacggagtcagaaaacttctggacaagcagggtatcggcataaccatcaccgatgatgcccgtaagatgcttgcacacaaaggattcacacccaaatacggtgcccgccaagtggccggtgtaatccgtaactatctgcgcagaccgatttcacggcttatcatcaacgaggagctgggcaaaggaaaaagtctggaggtaggtctggacgaacagaatgaattaacctggaatattcaccaataatcaagtacactatgtttggatataccgtattcttaaagataggcaacctggctgcctcctcactgaccgacatgtacaaggacagctaccagctcatcggttgcgaattcggatttgcccaagggatagatatcaaaggacaggcacagaccgaggtaaaaggcggcacgttttatgtaacctaccctcatcttcccaaccgtgacatgatccagtggatgctggatgcccgtaaataccagagcggagccatcgtagtccatgacaaccaaggctccacactcgaaaagatactctttgagaaagcgacctgtgtggatatggaaatcagctatatccggcagggcaaaagctatattgcgaccaaactgaccgtacaggcacagaaactggcattcggtacagaagagtttgaaaatcagtgggtgttttaaaaacagcagcgttatgggactttttaattttccgcaagtggacagcaacgtgaatgtcatattcagcgttgacggcgacgaatatgcagtggaacagttcaaaataggttttcaccagccagtagataacctaaagaaccaaccggaaggcgaagtgcgtggaggacgaatcatgataaccctttcgcagacggtgaaaagcaacatctacggatgggctgtgaaaccgtgggtgaaaaagaacggggcagttctgttcaagactggaacgtccggaatcgtgtttgaggtggcgtttacgaatgcatattgtgtcaatctgagacgggttatagaggctttgggacaaggattgtcaacaagtctgattctatctccagagagtgtaagcgtgaatggtattgaatttgataatcggtgggtaaagtaatgggcgatattctgaataatagaataataactctagaggattttgagtttctaaaatcaataggagttccatatacaggttatgtcaagggtattggatatacctgtcctgtgtatatgccagcacaggctttcaggattacagatggtaatgtgcaatggagcagttgtgagttacaccctcttttttatcaagctatagatgatagtccagagcgcatctttttgagcatgggatacactactgaagatataattgaaagaataacttatgataatggtaatggaaccataactgttgctgtgggaaaccggtctgtaacttttccaaaagaacaaggtaaggttaatgtgtatttgaatcaggaaggtggtaattattttatttatatagaagctacagattcaaaaggaaatattcttttgagtgattcaaaaacgattcgttcttatatacatgagaaaggaattaaacaagattttgacattacagatggagtgggctttaataaggaaattcttgataatattaatacaggaattggagcttttggtattgggttaggtgcgaaaactgaaataatagattatggaataagaagttttcatggttattcttggaagcagtttaattcactcgataaaaagcagcagttacttaaagaggctcaagcaattggaaaaaccgggactaaatatttaaaaggtatgaaaatgcttggaaactggagttcgtatgcttctgctggttattctgtttccttaatatttgtagaagatggaagaacattggaaaagaaatttgttaaagcagcattagatgtgggatttacctatataggtatattgggaccatggggatttgctattagttctatttactatttggtggatacagctacagatggctttggatattttaatgaataaagttatgcataaaatcttagaatatttgttttataaaattcaagtattgactcgatatatggacacaagtatgtatttaaatatacatgttccatttattatgtctacagtcttattattctatttggcagatattgcaattatatactattatattataatgggatattcaccacaaaaaaatccaagtaatgtgtttttggtggttttcattattatgattttattatggagtagtctctatttttattatcggtataaacatagaaatgaacgaattatggaaagaaaaatttatgaacatagttctaatgtatgggcatatcttttcatatttactccttttattgtattattaggatttgctttattttttagggtgtccagttctacgctctcgtttttggtattgatttaacaacttaagatattgattattaactataacactattgtttttaggtacaattttaacatacaaaaaagcatagctaattcattgaatcaatatattttaaagagatatgattatcagcactttggaacttgcatcatatcttttttgaactaaaagctggaacatcaaactggacaccctatttatttttttaatttcattgtttatgaaagagtataaggtattaataatttatacaatctccaatgatcaatcaaaaaagtcatttgaagaagaactggagagatacggtctggaacgggtcgggacgcaagatatctttgcccttcccttagaggaataccggacaaaggtacaggcattcaaagcctacctgcgagcctatgtacgcaagcatctggacagccaagacacggtactgttcgttgaatcacgcatgaacgaggaacggaccctgaccgccatgctgcaaaccaatctgatgagtgaagaagaataaaataacataaggatatgagtgcacaatcgtatatcaagttctggacagccgaaccctcggagcatgaagaagtgcaggcatacgacctgctgggctacgagtatgacttccggaaagaaaccactcctaacggaaaggtaaccgggaagacctacggcggtaaaatacgggtaagcattgccggatttcctacagaggaactcttggaatggatgttcaattcaagaatcctgaaggacggagaggtgatgaacacttccggcctgcccggtactcccaaagagatcatccgtttcaagggagcaaaatgccttgatttcaatgtgcattcaacaaccaaagagagccgtacctcactattcatccacttccgggaaatggagaccggcgattcgtgtcacttaaacttataatcatgaactggttcacttcattgttcagaaacaaaaaatcctcaatgccggatgaccgctacgtgatgcggctgtccgtctgccatgagacatacagcattgaagagttcgacctgcaattcaagcggaatacagaccgtgacggattgcctgaaggtgaggcatacggcggattcgtcacctgtaccctcagcgggatgccgggtgacgagctgttgagatgggccgcatacagccactcccatgaagacggcgaaatacggatctacctgaaggagcaacccgaccaacaagcggcatttgccttgcgctttgtggaagggaactgcatccgtctgcaacgcaaggttgaccgtatctccaattccagcagcatcgtccttctgtttgccgcaagaacactaaaattcatagacgaagaatttgaaaacgaatggcactgacaagtatggaaacaaagttttgcaaattgcccctggattttgaagccttgctcagcgaggatgtggaaaacagccgtcttgcatcctgctcggaaatcgagtccatcgaccagtttatcgaactgctgatcagtacggctcccggcgaacatgcctttgacaaggagttcggctgtgagatcttttttctcgactttgaaagcattgtctcacacacccgttgggaaggacaattctcggaatacataaccaaggcaattacccggcacgagaagcggcttacgggtgtaaatgtacgtgtcatcattgatgacaccacccgacaggacaatgtatttgatgctcccgccgtaaagaaacgtgtacaagtatatgtatatggaaccctggtacataccggagaaaaacggtgtttctattatgtaatctatttaggaccgatttcaacccgatgaaaggattatgagtacagaaaaatacaataaagagcaaatcagaaaccgtatgctgaaatacgctgcggctttctggggaataaaaaaggcggaaaacttcgacccggttgtcaagctcctgctggaagcattgtccaacgagatatatatgctgggagaggattttaccgccatcgagacaaggctgctggaaaagaccgcccgaatccttaccccggacatccttacctcaccctttcccgcacacggcatcgtacacgcctatcccatagaaccgtgttacctgataacccgggaatcgggcatgtattacgagagcgactcgcttacccggaagctatcgaccggaagcgtatcgttttatcccgcctgcgataccctgctgcacaaagccgacgtgaaatatatggtctgcgacgaccttctctaccggatagcccctaccttggagaagaccatgattgcccgtgcagagacaaggatgtctccgcgtaccgtctggttaggaatggcggtggatgaatccatttccgaccttgaagacttttcgttctatctagattttcccaaccttacggagagctatgaatatctgctcctgctcccctgtacggaatggtccgtagaagggaagacagtcgtgatggaagggggaatccatgaaaagacaaccatacagaaagaaccaacccgtgcctttttccaagactatgacgtaatgtccgtcatagacaaggaagtcatggatatttacagcaaacattttctgaaggtatcgcagtcctttccactcgacggttcctgcaggaaaaaccttccggacaccctgcggtcctgtttcaaagaggccgttctggagaagatgcaggacaagctggtatgggtgaagatacagttccccgcccatttcacaacggaagtccttgaagaacttcatgccggcatcaacatcgtgcctgtagagaacaagacgcttcacgaacagacgaccacccttgaggaaactttcagggtgatacccttgcgcacgggcagctacgaatcccttctgtccgtacacagcgtgaaggattctgacggaaagaactaccatgaactcctctattccgcaaaggattccacggaaagctatggaacctactccatccgcaaaggaggatgcgagcgtttcgactcccgttccgccaaggagctgctcggctatctgtccgacctgctggatgacgagacccatgccttcaatgccgtatcaagcatcaagctacaggcacttaccatccagatggagcagctgatggcgcaaatgaaacagacagcggacaacatgaacgagttcagggaaacaccttattaccttatgattgacgaattgtccggcaaggggcagattaccgtcaaatactggacaaccaactgtgaggtaggaaaccggatacaggcaggcgtaaacctgtcccccaatgccaccacttacctggacccgaagacactggctctggtcagtaccacctacggcgggaaacaagccccccaaaacagagaacggattgacatctacaaatacgccttcatttcgcacggccgtgtcctgacacagaacgacatagccagcttctgcaaaaaagaactcggagaactgctggtgcggacagaaatccggaacggggtggaaatcagcccgatgccgcacgaaggactgatccgaaccaaagaagtccatctgattcttggaacgaaactggatgagccttcgcaggaaaaacagataaaagacaatctgcgtaccaaactctcggcctgttcgccggacacattcaactaccggatattcatagaatacaataaagcataaataccatacttatgaacccagttacccaacatctcatttcatcgtacctgctgatgccgctgctgaccgtgattttcggaatcgcggcctattttatcgcacgcaagaacaaactgctcaacaacaaaaaactgattgcgtatctgctgctgtgcggcataatccttgccctgcccggcctgtccggattcatggactataacttcatgccttatgcctacatcctgctggtcatcctgtactggactgccggatattacaaccggctcatccttcgcaaagtgttcgcgtcaagcaaggaaatgccttctttcggcatccaatgcctgctgacggttacggtcatgcttctgggagccggactcttttccgtagtgttcaacctctgcaacgaactccagtacggcatctgggcctccacctgcctgctgccctttgcatttccactcctgtattcccaaacggtgaacagctatttcgacatacccattgaaatttataaagtatggaaatattcggaggaatatgactcggataccttgtacatcaaccgtgaacggagcatcgtaatggatgtggacatattccgcagggtggatgaccccgcatcggaacgcataaccggcaaggcatccgaggatgtcatcttcgggcagtggttccagcgcatgattgacgactgcaacctcaaatcaccgtcttcgcccatcgtatataagaatgaaggaggagcctattacgaatgggtattctataccaaaccgtcctttttcaagagacggcgctatatagaccccgacgttacacttgccggcaacaagctgaaaagacacgatgtaatcatagccaagcgtgtggcaaacgaacttataaagtataacgaatattaaatagaaacattatgataggaaaacagagccaaaagaaaaaatatccgctggtaaactgggcggacggaatgcccgtcaacaaagggcatttcacccaacaggaagaccactttacggaccggttgtgcgaataccagtcgtttcatctgaaccgcaatacctacggactcctgccattcaagaaaggagaaccggtttccggcgatttcagcattacggaactcgttacaggcaccttggaagtccgattgaaacgttgccacgcccttacttccggaggttacctgatagattatgatgccggtgaggatgacgaactcaccgccagtttccatatccctacagaagaggaagaagaaaaggacaagcggtgggatgtcatactgatggcagaccctttcgagcatcttccttcgggtattccgaacgagaaggaaatcagtccacgccagcccaatgccttacccaaatatgcgttgagcgtgctgccgagcggacagaccgacggaagcgagctgggaagacactttctgctgatcggccgcctgcgcaagaacggaaaccgctgtgaagtggacggaaacttcatcccgccatgcacaagcatgtccagccatccggacctgaaaggctactataccaaattcgggcaactcgtggattccatagaaaaagcttcgtttgacatccttgccaaagtggagaatgcagaaaaacagaccagcctggccaccaacatcggtatgctgtgccgccatgtcatgctgttcatatccgatatctacttctccttccgcaacgaggggcaatactattcaccgctacacttcctgaatgtattctccacattggctcaccgcctgtatgtatgcctgagtttcatggacaaggaagacaaggaggacctgctgaaatacttcaacgaatggaacggcatcactcccggtgcctacgaaggcctgctgagggaaaattgcgggctgctgtacaaccaccacaatatccgccaactgatggttacggcggaacgtttcctatacctgttcaatgacctgtggacaaccctcagccgtctggaatatatcggcaagcacaaggaaaacatcgttgtcgccgaacgctccagacaaccgaaagaatcgagcgagtcacgctggaacatactggactaatcccctataagcgaacggacatgacggaagaacaagataaaatagtacggtttgacgaacattcccattcattcaacctgccggataccgacttcaaggcggaagtggtggccagcggactgaaagaggccgggtatgatgcagagcgtaccctcatattcagacggggagacatccggcgcggattctcgaaagacatccatgacatccacccggaatattcccattatgacctgacggattacctgtatctttatgtgaacaggagaagcctttatgacgagctgcccgaaggcatattccacaagaacctttaccagtccgagaaaatatcgaaggaacaggtgctggacgaaatccgcatccaccgcgaagaggaatttttcgcccgccgtttcttcaagcctttcgaaatctccctggaccatatgctggtagccttccagaataaggaacgccgcattgacgagatgaacgtacatccggatttcgtaagcatcttttccggtcaatggcccgtactggaactgctgccgacccatctggcggtcatgcttatccatatgctggcctatatggaacagattacagcgagcctctccaaagccggcgagtgcatgaccattctgaccggtgtgcccgtgcatatcaagagaggagacaaatgcgtggtggaagtggattcctgccttattcccaaattgggaagctgcattctgggagacgacatggttctgggaaacagttttgccgacggcacctaccagatgctggtagaaatcggtccactgtccgcccgacggatggagagcttctttcccggcgctgccgacagtaaaatactgaatgcgctgacagaactgttccttccctcggacaaggagatacagatccgctacatcatccagcaggaagatgcccggttcaggctgggaaccccaaccgaacaaggcgcctatctgggtatcagcacctatttatgaatataaaacatcatcctatatgaaaccgaaaaacaacacagaagtaaggaaagcctatctgagattcgcgggctatctgacatgctgcaccatccttgcggtaagcatctttgcctgtttcctgaaaacctccggcatagaagtaaagcgaatcacggagcaggcactggaatatgaccatatctatgccaaagagctgtccctgtcgaacagcatggactccatctaccagtacatgaaactgatgaacacttcaccgcaaataaacgacaagctcctgcaaagcgttgtcagtacgcgcaagatgaacctgctcaaatatgtccaaggcatggacaccaaagattgcaggctttacaggcagctgctggaaaacctcaacatcttcctcggggtaaaagactccatccgtctgctgaatatccaggaagagatggtgaagaaagacctgatgcagtgcatccaagacaactggaaaacaaggcgtaacctgaatgtgggttccggcggcaacaaacaataaaacggaaagccatggacaacaacagaaagacaatgaacaaacgggaaatattcatgggacatgcctatgtattcctgttctttttcctgacaaccgtagcgtgttgtctggtaatcttcatgtggaactcagatttcaagatgtttgaacagaaagagttcgtaaagatcaagatgaaccgcatcaaggatttccagcaggaacaagcggaaagccagttgccggtggactccctgttccgtaaaatagaaacatttgaaccgggcgtttacgcccagtatgaagaagacgacatccattatctgataaacaacctgcggaacacatacgaaaggaacagctgggacaagcgatacaagctgttcatgcacattgccgacttttatgccatgtggctgtccgacaggaaacagctatggagtatcggacaaaacataagtctgttcaaagccaatctggaggagtgcgagataggcttgcagaaaaaggaggaagacttgcgctcaggaactaaaaacaaatgacatgggaaaaatttataccagaaagattctgttcgtaatcgcagccatgctgctgtgcatccttgtcgccatactgatccggctgttcttttccagccgcaccgtgcgtatgacactgacccccatagaggtggaaaccggagaaacggtccattatgcagacagcacccgcaacgcacgctcctggctttgggaattcggcaacggggacatatcacacgaacggagcggagaatacgtgttcaagaaaccgggacgctaccaagtgcgccttcaagtggacggaggactggaaaggaaacagatcatcacagtacacaggagccgggatgattacggaagcgacgagcttgtcaggatgaaagcaccggcaaccgcctttcaaggagaaatcgtatctttcaaaggatacggtccgtcgaaagaatggcgctggcagttcggagaatccggaattgtcgattcgcgggagcagaatccactctacgcctatacagaacccggcatatacgaggttctgctgactacggagaatacccaatatccggtccggcacaccattgaaatccttccccaatatacggagaacgactcgacagacgtgcttgtcatcatcggcaatgacatccgtgaacacttgcaagccatcgtggacggcaagccgttcaatacccattacaattatatcctgaagaaatacctttgcggaaatccggacatagcggtaaccgtcaacaacagcaagaagaatgatttctattcctattgccaaggactgaaaatcatagcacgcaggaaaacccttatagacgaggtgttcgtcgatatgggagacaacctgagcaacgaatgtgtgatgcagctgatggtaacacagcacgaacgcttttccgaacaaaaaaacaaatgaggcatgaaaaagaattgcatatcgacactcataaaaggaggatggatttgcgggtgcatcatctgtatggcatcctgcggaccggtacaccgttttatgcggataaagaatgtaccccgtgaatatatgcgaaactattccatagaaggggtaaaggctccccgcagccagacactgcccaagcataccccgtggattgtctttgccaatgaagcaggaacatcctatctgagtccgagcggaaagaacgagatgcagtctgtgaaatacatggacgcatttctcgtcatcaagcgaaaaggagactggctcagagtcattcaatacgacccagccattctgaaaaacgggaaactgaaagaatggaaacaggcaaaatactgcggatggatcaaccaaaacgacctgttgctgacccggagcggctttaccgacattgttaccggattcaaaaacaaacaggtggtcatgctgaacgacagcgtggcattggccaccccaaaaacgtattttgccaacgactccgtaaaactgttcaaaaatacagacctgacacaagaggctggcaagattccattttacagtgtcgtatatccttatcaaatatcggaagacaaaggatgcaccctcgtggcagacaagccgcagcttgacgcagacagcatagggcatgctgtcatcggatggatagacgaacgcctgctgaccgcccccgaacagcagctccatatagacataacctcgctgccggacagcacgcttgtttttaaagacagggaacggaaagacaccttgccgctatcatccaacgacctgaagcggaaactgcaactttcggccagccagcctgctatccgctacagcccggtactgtcctaccggaacaatgacacgagcttctgcttcaaaacccggcttccgatgccggtcatcgacaaacgggaaagctatgtgctgaatgtcaacggcaatccaatctattacgggactttcaaaaacaagatagagaaggacctgcaaaaaataaacctcatgtttgtcctggaaggaaaagagaacaccatccaacggtttccagccgtggtgaatgccatccaaggactgcaatcgcaactggtgaatgacgacagcttttctttcaggttcggtgccgtgcttaccttcaacgaaccggacagccggaaagaccccatctgcaaactgactcccgactacatggagctgcttgatttcctttccgccaaagcacgtaatgccgagcaactgaaacctacatacggacgattcggcagctggtccggccttcggatcggagtggagcaattcaacaaatgtccagatgaaaccaatatcctggttgtcatcggcgataaagggttcaacagcgagtgggcagactccaccttggtgaacaagctggtaaaaaacaactgccgcatgatcggcttccagctctacggaggagaaccggataacttcaacaacttcgtgctgcaaatcgggaacatgatagattgctcggcaccacgcatcagccggaaaaaacgggaactgattgtatatcccgaacaaatcagaaatgaaaacgaatatgcggaggtgaaccataacacctattgtctggactttccaaatcggagcatgacacagggatggctggtgtttccgcaaaagaacgaatcgctggaactggaaggactgaccaccgccgtggattccatgctgatacaagtgaagtttgacaataccctgctgagcaacagtctggcaagggcattcgacgaagtgggtacacaccgatataggacagattcgacaatgacagcttattaccatatccgccagtcgggggtacaccccatgctatccgtacttccggataccgaacctgcctggagcctgcctgcacagccaatcgtactgccggactcgctgtcctccacactggactattatctgcttgtcaacgaagaggagttcaaacggttgagaaagtatgtggaagcaccctccaagctgatcgttgactataaatacgaagcggtcaaaaagaaaaagcaagcgaaggtggatatctgcgactgtccggacgactacctacaggcagatgccgaagaatctaccgtacgtgtaaagacggacagcctgaacgcaccggaatatgcctcaacccgccgtgcaaggagaaaactggtcagacatttcctttcagagcgcaacagggacagatattgcaaggtagggagaaagactttcctgagaatgcccctatcagaggtcttgcaaaggtttacctcctgcccgaccgactatcctttctttgaagtttaccgtgtcaaggacttgcggaaaaagaaaatgattacggatgcggagctggacatgctgattgaatatttcaaggaaaagaaaaaactgctggacgaagccgccggcaagccgttccagtccaacgggcagacatactattggatcagccgtgacctattaccatagtcattcacctgaaactgtattatcatgatttatgaaactattctgaaaataagaggaatggaggtgccgatactctattataactatcggtgccacatccggcactatgatgacccgaatctgagaaaaatcatacaactccacatccaagtatgcgaggaaatcggcaatcgggagtgtctgccggtcgagggagacctgattacgcttgcgtttgagtgcaagggtgaagaacagttcttctatgactggctgaacgaaggagccatgcacaacggggaaatccatttcatctacaacgaagtggagattgcggacattttccggttctgggactgcttctgtgtgaaaatagaagagtatatgagtgtaggaaactctccgatgatgatggtgctgtatttgtcaccggggattatcaaaaggaataatctggaggttagggagaaggtgtggaaggtgtcggatgtttcaattatatatcaaacttctaccgagaggaaagatgattcggttagcaatgattcaaataagaaaagtctttctgtaatttttgtaaaacctccatttcaattaaagaagaaatttcaaaaagatccattttatgaaattgaaatgaggaagcaattgcaaatgcagcaggatggaataaataatatgactatatttgagtggctgaaaaatagggagaattttaaaaaatatgggcgtaatcctaaatctaagaaaattcaagaagattttagggatagatataggaatgctaaaattgatgagtatcttttattgtatgaagatatggatattaaggctatagaggcaatggttgactcagaattggaaggcttagcagcattacataatcctgatcagatagcaggaggatatgttgatgtggtgactcaaatgggaaataaaagaataaattcgtccattgggtcacaatggggaagtatagaaaaaggtcgttctcttaatattgaaaatgaattgttaaaattaataacagaccctcctcctataacagaagaggagcagaaaaaaataaagatgaatgtaaatttagttgaaaacttagaaattgttaagtagtatgtttgagaaatttttagaaagaagtggaaattctataaaattggaagagtttagtgaggattatatccgacaatacaataatttggtttcggaaaaactaatttctttttggagaatagctggtattggcatttattgtaatggcttgtttagaactattataccgaatgactatcagtatattatagaggaatgttatcctatgtatgattatgaaacagtgactccatttatgataactgtttttggagatatttttgcttatgttaagaatcatgtaattggagattacgtcgtttttattaatataaggtatggaacttttaaaattctatcagaaaatattgacatattgttaaatatagtaattttcaataagagttgtcttgaaaattggtttttattgaatgaatataatacaataaaggaagtgaaggcgatgcctaagatagatgaatgttatggctatgttcctgctttagttgcaggtggaaaggattgtattgataatattcaaatagtaaagattgctccttatattgatacggttattcaattaatgggcgatttaaaaagaattagataatatcaaatcaacacatatgttacagaatgtttttaaggttgatacaatagtttatgtttcaattaatttaaattatgattatagtatatcttatatggaaaatatagcccggaacttcacgaagaagtatccaagctatcttatccataagaaaagcgaagacaagataaaagcctttctgaccgacagggtgaagaccaaagtggaaacctttgtgaatgcagaggcaaagaacgtggcagtaaccgaggtgcgagaaatagcagacctgatagcggaatatgaaggtgcagaaagttcttcatcttttggaccccatcctacggattccccctctttaggaaacaccggagtggagcttgccatgagtgtagacacaggcgcatcggacatccgtcctgtcaatgtagccaaacccacgggggcaacaggaaaacccaagataatgaaaagaagtgtcatccgtgtaaccatggaactggaagtgcagatggaaaccaaacaatacttgcaattcctgcaacagattccagacctgttcagcctgcatgaattccccaatttgagatgccgcgtgatatgcaaccagaaaaaggcaacaatcaacgaagagccagcaccggttgaagtgaaggttttggatgacagaaaataccagcggtggtttgttgcctttacactgttgatggtatgctgcatgggcggaatcatagccctgttcttttccattccgaacctgtacaaacaggacatccacttcctgcggaacgatacgattcatcaggagttttccatttccaacagccgtattgacttgaaggatgtaagcctgacgaatcatggcgggaaagacacacttgtcatcaaggataaaaagataatcatagccaaataaaaagcaatggaaaattcgattcagatacaagggataagaaacatgctatcccatagcggatgcccggaagacctgctggaaagttacctgcaattcctacaaaccgaaggccaacaggtgcagattgtcagaggagaagtctttatgatgtttgaaaaggaagcgcaataccgcaagagaaggaatgaaaagatgaaaggaaccgtaactttctgcaaaaacacgaagaacgatacaggggaatacaatacaggagtgttcatcggaatggaatttatccaatgctgcttcaaccatgggattcctgcacgggtgctgaatgtgcggagagtacatggggaagtgacggagattgtcgtggagttcgggaagtagatgaaaggaatacccctattgcagagctccgacctaataatatgtgggggaaattgatgggaaaatccccccacacacttcatcttgatatttaatgagaggaaggattactccttcttggatgttttttcattatccagccccaatcgcttgcataactccggatcgtttttgatacggcccatctcttcgttgatgatggcctgcgcgtccgacttgatctggtcgtagttacgctgaatctgctgcatcatgatgtcattaccgtccttgtccttgaattcgttgatgaaagggattttcctgtaggccttttcttccgcactgaccgccgcatggtctacaacaatttcggcatggaatattttctgttctatcttctcgccaaaattatccgccacagccccgacaaacgtaccttgcgacagattggcaatcttggatgccgggataagcgagtcaagctgcgtgttgatggaagtggaaacatcctgacggttgatggaaacggactgacgctgctggagcaccttgccgaagcgttcagaaagtgtctttgcggtttctccgaccacctgcccgctgaatatatttcctaccgtgttctgaataaccttggactccttttcaccataatcgcgggtcagctggctgaaatcctgaaaacccaaaagtacgcccaccttgttgcttcgtgccgttgcaatcagattgtcaagcccccggaaataaatggtgggaagctcatcgatgattacggcacatttgagctgtcttttcttgttgataagtttgacaatacgggaattatatagtccgagtgcagccgaatagatgttctgcctgtccggattgttgccgacacaaagtaatttgggttctttcggattgttgatatccaacgaaaaatcatttcctgtcatcacccagtatagttgtggggaaatcatacgcgtaagggggatttttgccgaagcaatctggccctggagctgatcctgcgcccctcctttccatgcatccatgaaaggagaaaggtagttttccaactccggataggaagtcaggacggtgaacaggtccgaataaggcttgttcagtaattccaccgcatgcgggaacgtacaataaatcccgttcttgtaaatcttcaaataccagattattgcagcaagcagaatgatgggggattctacaaaaaagtcaccctgcttttcaatccaggtgcgattgaggttgagcattatcgtatagctcgcctcgtacgcatcggaaatgtccgtcataaattccggattgataggattgcatcggtgagacctgcgcggatcgtcgaaatttatgacatagaaccggggcttgacctcgtacttgtccatattcttcaacaaagaattataggctatggtggacaggtcatcaaacttgtaatcgtagatgtaaatcgcaaagcccttggctataagctggcgtatgtaactgttgactatcgcataggacttgccgctacctggtgtcccgataaccatgcaggcacggaaaatattgacaatattgacaaatccgttattccagcgttttttataatagaatctcgttgggagatttaccgaatactcattctccatcagtcgggtttcctgcatgaaactctcattttccatattgaacacatcttccatgaggttgtgcctgtaaaggcggctcatccatagccccgacatcagcagggcgagatagcctgccgtaagagtaaaaatatagaatgcggtatttgccgcgtgcggcaatggcagctcaagcaaccaccagtttagaaagaacagtgcgcatcctgccaccagcgccgcataaattttaggccaggttatcttttcacctttgactccgtgcgtacccagacaggaaacggccagcagaagcactgccaacagtttgctccagagaatgcagttgaaaatcccggtcgtattattgaaattcaccagaatcctgtccatcaccgcaaggttcaagtgccacgtggtgatactcggataacaatacacatagacgtgtaccaccaaaagaaaaatactcacggccctgccaaattccatgatcttggcaagcgccctcaaatcgtcttcctgctgcataagaattgtatataaatgggttgatacttgttttgtctaaatgccacgtttgcgtccggtcttcttctttttcttcatgcggcgtgcaaaggcttcctcctcatagtcacgcgggttggtttccatcgaaagtatgcccgccgccagttcgagcgtgctgccggattcgtggcggtgatgctgccgaagttctgtagcggaatgtccgccccgttccttttcgggtatgttttccaaccatttgaaatagtcgttgaacacattggcggaaaactccttgcccatgcgtgaaccgttgaacacttcccgtcggtcgtggtcaatgaaggtgacaccgtagatacgtccccgctcattctcacggaacaccacatcgatatttttttgccccagcagttccacaaaccgtttccgtgaatccgcctgccgcaaggcacgggcgatgtccgcctgtatggagggtgcccattttccctctttgagagctttcagattcatcaacatccgcttttccaacagttcattcccgaagcgttttccgaaacgtgaactcttgaacggcggactgaccaccttgccggtatcatccgtggcagaatagacaatgccggtgtagggtatgccggtgtactcccccctgacctgtttcgcctcgatgttgagtgtggaaagcagtgcgctgtattccccgaaagtctggaaacggtagctttccagtacggctttaagggtgttgcctacctgatggcggacatcccccaaggaagcatccaccttttttagttccgctttcggattccgcctttccgtgtccgctccgttgcgcaagccgaaatccgtttccagttcccgacaggcggtcatggaacggcggtgctcgtaggcgtcactgatcttttttccctgtccgtctacacagacactgacgatatgaatgtgggcattatgggtatcggcatgtttgtaggctatgtacggctgattcccatagcccattttctgcatataccgttccgccaactctaccaattgcccatcagtcagctggtcttccggtgccggagaaagggagatatgcaggacgggcttctccgtattgcggtttgccagcaggtagttctcaaaagagagcaatgccagacgtatgtcctcactgggcaatcccaatctgtcggaaatcatgcggttgcccgaaagaatctcggcggtacctgccgttaccttgtcgtagttataggcaagtgctccgtaaaggcttgttccgtgacttatttttgcaaccatttccgctcgtattcctgggttagcaccatgacttttttacatacaagcatcagttcgatgctcagtttctccaacctgtagagcaatgccatcgcacgtttttccccgaaattgttcttcaaggtccggacaacctgattgtagttgtttccgacggcctgaaactgcctgtggaattcggtcagtttgatgtagtagtccattgtcgccttgtcgattttcacaactttaatctgtcccgaaaagatggatttcttgatgaacagcgtgcggtccccggctcccgaatccgccagcaatttttcaaatcttgtgttctcctcggcgttcaggcggaagctgtacttgcggtccgccggatcactcttgggctttctgcccgtccttgtccctgttgttttctccatgcacatgagatttttggtttgtacttttttctcttccggaatccgcgactttggagcggattcccccggcttttagccgggctagttgtttttgtcggacaaaagactttttgtcggacgaaaacacaacttgctctgttcgcttgaacagagaaccctccttcgtcggattgctgcgcgacgttcacggaacgctgtgatccgacgaagtcagttcttttccatcgtctgattccgattttgcaaaattagacagtgataaccgattggtaaacagcgtttgatatgacatttgatgacatctgatgacatctgatgtcaggtaggggaaatgttggtggaagtttcaaaaatagccgctacttttggcacagtgcatgagggcatacattgaaacattgtcctgtaaggggtattgcttgcctgccacaggtggtgcatggtgtgaatgcggcatcatccatatatgtgcaatgccatatatgctgcacgacaatcctgcatgacggaatacattgcatccgtgcaatgcagtatgggatacattgaaccccatattgcatgaatgcaatgcaccttatatggcaatgcccatcggcaaccggtattacactggtgcaatatggtatgcaatgtattcatgcaaaccggcaaacaatgcgtcattgccgtataccaacggatgcattgccgtgtgatgaaacgaaaaaatccggacagatatgaaacaaattatacactctaaattcaagcctatgaagaaagaacctttatttgtcgctttgagcaaccagaaaggcggtgtgggaaaatccacgttcacggtattgctcgccagttacttccattacctgaaggggtataacgtactggtggtggattgtgattatccacagcacagcatcagtaccatgcggaactgggaagtgggaaacattgagaagaacgtgcatctgcaaaaccagctggtggaacagttcggagcaagcggtaggaaagcctacagcatcctgaactccactccggaagaagcccgggaaacggccggacgctttcttgaaaaatcggagctggattatgatcttgtcctttttgaccttccgggtaccgtaaatgtgcccggtgtattccagtccgtaatcaatatggattatgtattcacccccatcacgcaggaaagaatggcaatgcggagcagcatgtcttttgtccttgccatccgggaatacatgcaccggcataaggatgtacccttgcgtggtatccatatgttttggaaccggatggacaaacgtgtttccaaagacctgtataacggctatactgaaattttccgttcgctgaaattgccggtactggaaaccgtcattcccagtgcagaacgttacaaaaaagactccggaatgaaagggcctctgttccgcagcactttgttccctccatcttcctccgcaatgaaaggaagcagtctggacctgctggcagcggaaatagaaaccatactgaaacttcaataaaaacaattatgactaccaaaagaagaacggattaccaagtggatgaggaggcattgaaacgcatgatggcaggagatgtgaccgctttggaaagaacggttcctccggaagaggagccggaaacaaaaagtcaggctggaccttgttcggagaaacaggagaagaaaagcggttcttccagacagcaaataaaaaaagcaccggatggagcggctgattcagatgaataccggagccggtttctgaaagtgaaactgtcgggagcaagaaggcagacctatattaacgatacattgtacagaactgttgccaaagtattgccggtcattgcaccggaaatgtctgtccccatgtttttaggaagtgtactgtcagaccatctggaaaggtatcagcatatcatcaatgaaatatataatcaagaagcaactcaaaagccaatagaatggaagaaatagtttatttatcaatacggttcggctgtaccgcttatctgttatataaggtatggaaacaaaaagagagaataggtaaaatctgtgatctgctttgtactcctcgcaatcggccacaagcagaaaaagacaacggtgaaccgggaaatgcacaggatgtgatgggagctacccgctttgtctatctggacgagaatgccgggaagaccgtcgccccttacatgagccagcaactggaaaccggaagtgattttatcggagcggataaggatattccggaagatgaagtggaatgcaaactgcctttggaggagatgagaatgctgaaagatgaacaggaggaactggacagccgctctcccgaaacggaagccattgctccgatggttactcctgctgacctgctcaatgtaggcgacgtgctgcttaacctgaatggcgccggctcggacgagaacaaatcatacagggcggccatgacactgcattccatccgggaaacggacatgtttgaactgttctcctcccaggtggagaacaagaagctgattgaggaactgatggggaagtatgtggataaggaagggaatgcgttgcctttgaaaagagagaggaaagaaagcaaacatgttactgactggaggaatctagtctgaaaaggcaatatttatcatgttcggaaaatcctgtatgcgttaaagtatatgggattttttatatgatgtacccatttaacgaaaacatgcaacaggcattcttccaaagtggaggaaacctgttttttctttttcatccgttgtacggcaaagacatctgatgacatttgatgacatctgatgacacctctgaatcatagcgtattatccccatttatctttgttgtcgaattcaaatttatgtcttacccaaacgattcgacaatgaaaagaagaatccttttttctgtgatgtgtgcggtcatcgccgcaaacacctttgcgcagggccagggccttgcgggtatcaacgaggcaaccagcctcatgacctcgtatttcgatcccgccaccaaactatgctatgccatcggtgcggtgcttggtctggtaggcggtatcaagacctatggcaaattttccagcggagatcctgacacttcgaaaaccgccgccagctggttctttgcctgtatctttctgatcgtagccgccaccatcttacgttccttcttcctctaaagcctatggaatatccggtaaacaaaggtgccggcaaccccgtcgagttcaaaggactcaagtcgcaatacctgttcgtctttgccggagggcttgcgatggtgctccttatggtagtctttctttacctgacgggggtggaccaatggatatgcttatccttcggaatcctgtccggcagcctgttggtgtgggtgatattccgtttgaatgcccgttacggtgaacacgggctgatgaagctgctggctgaaaaacgacatccacgctatctgattcaccgcaagagagttttcagattattcacaagaagaaaaaaacaacaatcatgagaaatgtattaaaggcggaaacgctggaacgcagattccccctgctatcggtagaaaacggctgtatcgtgagcaaggatgcagacctgaccgtggctttcgaagtggaactgcccgaactgtacacggtaacggcagacgagtatgaggccatgcactcctcctggatcaaagccatgaaggtattgccggaacatagtgtcgtctgcaaacaggactggttcgtcaaggaaacctaccgtccgaagaccgatgacggagaacagagcttcttgacacgcagctatgagctgcatttcaatgaaagaccttacctgaatcacaaatgctacctgttcctgacgaagacaacccgcgaacgcagccgtcggaagagtgacttcaataccctttgccggggattcctgttgcccaaagagataaccgacaaggatgctgccgcccgctttcttgaggcggtggaacagttcgagcgtattatgaatgattccggacatataaggcttcgccgtctggaaacagacgaaatcaccggtacgaaggaacgtcccggactggtggaaaaatacttttccctctcgctgaaggatgagaccgccgtattgcaggacatctgcctcaagcccggcaggatgcgcatcggtgacaaacgcctctgcctgcataccctttccgatacggaagacctgcccggcagactttccacggacatgcgctacgagaggatgtccacggaccgcagcgactgccgcctctcctttgccgcacccgtaggactgctgctgtcatgcaaccacatatattcgcaatacgtgttcatcgacgacgcacaggaaatcctgcagatgatggagaaaaactcgcgcaatatgctctcgttgtcaaaatacagccggagcaatgccattaaccaggagtggacggagatgtatcttgatgaggcacataccaaaggagtgcttcccgtcagatgccactgcaacgtcatcgcctgggcggaggatgcggaagagttccgccgcatcaggaacgacacgggcagccagctggccatgatggaatgcacgccaaggtataacaccattgacacaccggtcatctattgggcgggaatccccggaaatgcaggcgactttccatctgaagaatccttttataccttcctggaacaggccgtatgcctctttgccggagagaccaattacaggagctcgcccagtccgttcggcatccggctggcagaccgccagaacgggataccggtgcatgtggatatttccgacctgcccatgaagcgaggaatcatcaccaacagaaataagttcattcttgggccttcgggcagcggaaaatcctttttcaccaaccaccttgtccgccaatactacgaacagggagcgcatatcctgctggtggacactggaaacagctaccaggggctgtgcaggatgatccatgaccgtaccaacgggaaggacgggatttacatcacgtatgaagaggacaatccgatatccttcaacccgttctacaccgaatccggaaaattcgatgtggagaagcgtgacagtatcaacacgctgatactgaccttgtggaaacgggaggacgagtcgccgaaacgttcggaggaggtcgctctttccggagcagtgaacgcctatatccgaaagatttcggagaaccggaacatcagaccggacttcaacggtttctatgagtttgtcgccgatgactacagaagaatgattgaagagaaaaaggtgcgtgagaaggattttgacattgacggttttttgaacgttctggaaccgttctaccggggcggagattatgacttcctgctgaactccgacaaggaactggacctgacaggcaaacggttcatcgtattcgaactggacaatatcagcagcaacaaagtgcttcttccagtggtgacactgatcattatggaaactttcatcgccaagatgcgcaggctcaaaggtatccgtaagatgatattgatagaggaatgctggaaagccctgatgtccgccaatatgagtgaatacatcaagtacctttttaagaccgtcagaaaatatttcggcgaggctgtggtggtgacacaggaggtggacgacatcatcagctccccgattgtgaaagaggccatcatcaacaactctgactgcaagatcctgcttgaccagcggaaatacatgaacaagttcgagcacatccagcggctgctcggtctgaccgagaaagagaaagggcagattctttccatcaaccaggcgaaccatcccgggcgcttctaccgggaagtatggatagggcttggaggaacctgctcggcagtatatgccacggaagtgagcgaggaagaatacttcacgttcacgaccgaggagtcggagaaactggaagtacaacggattgccggaggaccggagggcagtctggaaggagccatccgccgtctggcggagaaaaagcgagaggaacagaaacaggtatcaaacccgaaatgaaaacgattatgagaaacagaccccttatgaggctggcggtatgtctgataagcatggccgccatgatattacagagctgttcggaaagcggtatcgaccgcgacaagatctgcggaacgtggaccagcgtggaaggcagacctgacgtgctggtatacaaggaaggagaatgctataaggtgacggtgttttcccgtagcgggagaacccgaaggctgaagccgcagacttacctgctggtggaagaaaacggaaacctgtttgtcaatacgggctaccgtgtcgatgtgtcctacaatgaggcagtcgacgtgctgacattctcaccgggcggagactatgtaaggaaggaggaacgggcatgaaggcaagaacgcttctgatcggaacggcatttgtactgggcgttaccggagcacgcgcccaatgggtggtgacagatcccggcaatctggcccaaagcatcataaacatgtcggacaatatcgcccatacctcaaagacggcagtcaatacggcagaaagctttgccgagacagtaaagatctatgagcaggccaagaaatattacgaccagctgaaatcggtcaacaacctgatacaggatgcccgcaaggtgcgtgacatcatcctgatggtgggcgacgtgtccgacatctatgtaaccaacttcggcaagatgatgaacgatgaaaacttctcaccgcgcgaactggacgccatcgccttcggttacacccgcctgctggaagagagcaacggcgtgttgcaggatctgaaacaggttatcaatgtcagtaccctgtccatgaccgacaaggaccgtatggacgtggtggacaactgctattacgagatgcgccgttaccgcaaccttgtgagctattatacgaacaagaacatagccgtaagctacctcagggccagaaagaagaacgacctggaacgtgtgatgcggctctatgggaatgaaacctccaaatactggtagccatgatgccgttgtcgatagattttgccaacctgcacaccatactggcaaccctgtatgacgagatgcttcccctttgcgaggacatgatggacgtgggcaagggacttgccggactgggtgcgttgttctacgttgccgtccgtgtatggcagtcgatggcacgtgccgaaccgatagatgtttatcccctgctgcgtccctttgccataggcatctgcatcctgctctttcccacgctggtgctcggcacgctgaacaatattctcagtcccatcgtgcagggcacacacaagatgctcgaaggacagacgatggatatggaacagtaccggatccaaaaggaggaactggaaaaggaggccatgctccgcaatcccgaaacagcatatctggtaagtgacgaggagtttgaccgtcagctggatgaactgggctggtcaaccatagataccgcctcccggctgggcatgtatgtggaagtcgggatgtataatctggaaaagaaaatccgggatgcattccgcagcctgctggagctgatattcgcagcggcatcgctgctgatagacaccgtgaggacttttttcctggtcgtactctcgatactgggaccggtagcgttcgccttcagtgtatgggacggattccagtccacgctcggacagtggttcacgagatatatttccgtttacctgtggcttccggtcagcgacctgttcagcaccctgcttgccaagcttcaggtactgatgcttcagaatgacattcaggaactgcagaacaatccggactactcgatagacaactcgaacagtgtctacatcatctttatgctgatcgggattatcggatacttcaccgtgcctacggtagcaggctggatagtgcaggcaggcggtgccggaaacttcagccgtaacctgaaccgtacagccaccaagacaggggggcttgcagccggagcaggcggtgccgtattggggaatatcggaggcaggctgaggggcaaataaaccctgcggagcctccttcccatgagtcgggcaacccaagatgacgggtccggtgacttgtcggaacgggatgtcccgtcataccggaaatatttattcattcaaaccagacatcaaaaaaatggaattcaagtcattgacaaacattgagagcagcttcaagcgcatccgcctgctgctggcggtctttgcctgctgctgtgcgctcgttaccggatatgcgctgtggagctcataccgctttgccgagaagcaacgcgagaaaatctatgtgcttgacgggggcaaatcgctgatgatggccctttcgcaggacctctcacagaacaggcctgccgaggcgcgggaacatgtaaggcgctttcacgaactgtttttctcgctctcaccccagaaggatgccatcgagcacaatatcaaccgtgccctgcaactggcagacaagagtgcctatcactactatgtggattttgccgaaagagggtattacaaccgcctgatttcaggcaacatcaaccaggtggtgcatgtggacagcgtggtgtgcgactttgccgcctacccttacaaggtgcggacatacgcccggcagctgattatccgtgaaagcaacgtgaccgagcgcagcctcgtaacttcctgctcgcttcaaaacacaggacgttcggatgacaatcccaacggattcattatcgagcagtttaccgtgctggagaataaggacataagaagtgcggaacgatgaggggaaaacgcggattcttcggccatgcggacagccgggtacggctgttctgccggcggctgacaggaaagcagcgcatccttctggcaggcacggtctcgttcctgcttgctgcctcctgtctgtactcgattctctcctgtgtatcccgtttcggggagccgggccaaagaccggcaatgggacatatccgttccgtcgtgttccggtcggaaagaacaagaaacattcattcaaacatccataaacatgaaaatggactttcagaaaatcagggaacggctcggagtgtcaaatgacaagccgctgactcccgaagagaagcgccggcgcgcaaagtatattgtctatccgtttctctgcctgctgtgcatggggttcctcctgctggtattcagtccgtcggaaaaggagaaggcggaaatggaaaaaggcaagggtttcaacgtggagatgccttcaccggaagattcggaaatggagggcaacaaggtaagcgcctatgagcaggaagcactggcaaaaaaggaaaaatggcgcaggggaaccttccaggagatgtccgaactgctcaacaagggcggtcaggatactgccggtcttactgcaggaaaagcaaacatggaacttccgccggaaccggaaaaggggaaagcccccggctccatccgttcctctgcagaagcctaccggaatatgaaccgttcgctgggcactgtatatacccggaatgaaaatcagccagatgccgatctgctccgccgtattgaggatctggaaaaagaaaggaagccggcggaagaacaggcggaaggccagaccctggaagaaaagatggctctgctggaaaagtcctacgagctggctgcccgctacaacgggaaagagcctgatgcttcctctacggccaatgccccaaacagccggaaagaacggacggctgtccggcctgtaaaacgggtacagaaccggatggtgtcatcactcgcccagcctgcaggcaatgaagacattgcttccggatatgcaggcgagagaaataccggcttccacaccccggtaggcaaaatgccatcttccggcaggaacaccatcgccgcctgtgtgcatggcacgcagaccgtatctgacggacaggcactgcgtatccgcctgcttgagccgatggcagtggacgatctccttatccccaaaggtacggtactggtcggcggtacacgtgtcgagggggaacggatgggaatcctgatcgagacagtggagtacaggggcacgctgtttccggtggaactcgaagtgtatgacgctgacgggcagcagggaatccttgtaccgaactcgatggagtatgatgccgcacgtgagattgccgccggcatgggcacctctataggaagcagcatcaatatctcaacggatgccggagcgcagattgcctcggatgtgggcaagggggtgatacagggtatgtcacaatatgtgggcaagaagatgcgcacggtgaaaatcaccctgaaggccggacaccggctgttgctgcattctcctgaaaaatgaaggaggaaaggaaatcaaccatttattcaccaatcaaccaagaaacacacatgaagaagattctgatgatgcttgccctgattgcgggcacagtggctgcatacgcgcagcagagcagcggggattattatgaaggactgagccgcaagatcggattcagccggatgattcccccacacggtctggaaatcacatatgacaagaccgtacatattatttttccctctcccgtgagatatgtggacctgggttcgcccaatctgatagcgggcaaggcggacggtgcggaaaatgtgatccgtgtgaaggcaacccggaaacatttccggagtgagacaaacatgagcgtaattaccgaagacggcaacttctatacattcaacgtcaagtatgccgacgagcctttgctgctgaatgtggaaatgtgcgacttcatccatgacggagaggccgtgaaccgtccgaacaatgcgatggaaatctacttgcaggaactcgccggggagtctccccgtctggtacggctgatcatgaaatccgtgtatgaacagaacaaacgcaaggtcaagcacatcggctgcaaacggttcggagtgcaatatctgcttaaaggactttatgcgcacggcgaactgatctatttccataccgaagtgaagaacgccacgaacgtgcctttcgacgtggacttcgtgaccttcaagatcgtggacaagaaaatcatgaaacgtaccgccatgcaggaacaggtcatctatccgcttcgtgccttcaactatgtgacccgtgtggacgggaagaagaacgagcggacggtgtttgccctgcccaagttcaccattcccgacgacaagaagctgatagtggaaatgtatgagaagcaaggcggccggcatcagtcctttgatgtagagaatgaggacctggtacgcgcagaaaccgtcaatgaactgaaagtcagatgaacgccatgaaaagaaactccctctttattaccctcctgcttgccctctttacggggcaggcagaagcccaacgccgcctgccgggaatgaaagccgtccgcttcaccactgaaatggccgacggattttacagccgggcaaaccgtcacgatgcaggctatgccttctcgctggctgtatccacctgtaccgggaacagaaaccagtggatgtttggcggtgagatgctgaaacgtaacatcccttaccggagtacgcatatacccttgtcgcaatatacgggggaaggcggttattaccatacgttcttttccacccccggcaagtccttcttcctgaacctcggcgcttccgccctgttgggctatgagaccgtgaacgaaggagaccggctgctggatgacggagccgttttgcagcaatgcgagtctttcatctatggcggcgcggtaacgctggaagcggaaggatacctgtccgacagggttgtcctgctggtgcgtctgcgtgagcgtttcgtgtggggcagcgcctcgggaatctgccacttccagtatggaatcggagtaaaatacattttctaaccttaaaagaatacatacccatgaaaagaaaaatccttgattttatgctgacagcctgctgtatggcattctcctttcttggtcttgtcgcttgtgacaatgagctggatatcaaacaggaatacccgtttgcggtagaagccatgccggtagcggatgagattaccgatggggagactgtggaaatccggctggaaatcaagccggaagggaactttaccggaaccgtctatacgctaaggtatttccagccggatggtaagggcagtctgaagatggaggacggaacggtactgaagcccaatgaccgttatctgctgaacgaatggaaattccgtctttactatacttcgcaaagcggcaaggaatcccagaccatagacctctatcttgaagataattgggggaatctgcaacaattgacatatgattttaatggaaaggatacggatgaagaaaataacaaggaggctgcatgaaaagaataccggctgttatgatctttctgttacttgtcttgtacggcaaggcggaaaatcccccgtctgacaaagataaggcggtagcctgcatcaagcggtgggaaggctggcaccgggggaaaatgccttacatcggttacggacaccgcctgcttccccacgagacgctgaccgagaacctgagtgaggcacaggcggactcacttttgagatgcgaccttgaacggtgtttgaaggtattccgaaaatatgggaaagattcgctccttttaagtctgttaggctttaatgtaggctgttaccgtctgatcggcaacggcaagatacctaaaagcaaactgattcagaaactggacagcggcaaccgggatatttacaaggaatatgtatcgttccgctgttatcgggggaaagtcattccaagcatagagagaagaagaaaagaggagtttgaactgttctatataccgtagattgcttgttgataaaggtttggttgttacgagacgaccgaatcttttttatttgtccggtatgaacatatccctaacaggtgttgtattttaatgtaaccgaaagacataaaatgtgttattgagcatatggtgcataaaaaatgctctttgaacattgtctttcttgattttttgctaagtttgagatgtaatgtcaaatgcataaaacaagtcgtcatgaattcagaaataatattggaaataaatggctacaaatgcaatctactaaagtataaatactgtttttcccgtaatatagaccgtaaaggaagacctgtaacaggaatgttaggaggaaacatatatatagaaatggaatctaatggcagcaattgtattttggatatgatgcttgttgatacggatcggcagcgttccgctttcttttctcatgcagaaccttttccggtttgggggaagatactgcatagcatagacgatatgatgtttcgtgaacttttacttcgtatcgttatatcattgaaaagtttacggatacaaaaaacgcctaagctatcacctaattgtggcaatttgcgatgaaacctttctgaaagtaagtgtaaccgcaaagaatgcttttcttcgtctttatactcgaattgcttttcaaacataatctgattgttctgttctcctttgacaatgatagtggcttccttaccattgtgggcttgtacttcaattgaaattattgttctgttcatacttacaaattttctttattctatatataaaactttgggaaagatatatgagtgacattttgtcagaatagagatataggcatacctcttgtacatataaaagtgtcccctaatattcgtagtatcaggaggaaaaggattcgtttaacactgtaaaattgaacaaaatatggtataaatattggattgaatttaccccatagggaataagacaaaagcttatttggttagagaagtgattggtaataaacttgctcttaccgcacccgattatactcgtttatacttgggtatgtctgaagttgaaaagataacggactgtaatgtgttatttaaactgggaaaaatagatttttaaatattggaatatgaaagaagaaagatttattgaagaagattttgaaggttttctggaggacttgataaagtctggtcgtttagatgacaaagaagctggtatagctaaaaggatgttggacaaaggatatgacaatttatctgataaacaaaagtatgtctttaataagatgattaggaataacagcgttgaggaatgtcaaagatgtgcttgtgatattccttggtctgaaatgcttgaagctcttgataatggcggttattgtaactactgtcagcatatgatggagaaactggaaaacgagtaagaaaataacgggaatagctatcaaggttattcccgttaatgtttaatcagttattataaatcagacaagcctatttagggtattgtcgtaaatactcacctcatataaataataaataaggacatttttcccaaccatattatgattatatgaacgaaaaccataaagacacattacatattgaaagtattcagcaactaaaaaaacaagaatcctgatttagttgatgcttttctggaaggagatagtcttttatttagagtgcactataatcaaaatttaattccatatacttaccctgttcaagttaaataacgagcaaatagctgcttggataaaatgacttgaatagtcaaattagatacatttacaaagcgggcagagtcataaaatgggaaagggctaaaaacagaaacgccacaggtatgatgtgatatacatcaccttgtgacgtttctgtttttttaagatgtatttgtctgctattcttacttttgaagcaagtattcccctattgaaagataccggtctttgattgtggcattttcattgaatccattcagacaatggagcaaggctttctccaaagtggtgtatctgcggttaaaacattgcggattgtccaggcaataggcattcaaggcatatctgtatggggcatattcaggattatcctcttttgtgattttcacatgccaaggaaagtgtatccgcagagtgaatgaccgtgtttccccttttgtaatccgttcctcttcctccagcatttttttcacgagggacctgtccagcaacggatatccatattccctgtaatgtttgatatggcagcaatactccgttgcgtattgcttcaattcttccggtcttataccatagtgcttcccatagaaaagcagcacttccctgcctgttacgataacgggctttccgtccgcttcatgtttaaatacctgccgttccatcttttccctgtctgtcagcaaggcaaaaccgaaacattccgtaagggtgaaactttccctgccgggaacggacagcccaataaggctttccaatgtgtggcagtaaaagaaaataccgtcatcggccataccggtgtccggtgaaagcataattcttacatccttgacctgaccgctgtccctttggacaatccggcaatttgcgtaatgtggctcacaagcattctctttcttgaacctgtggtatttctccaaaatttcgttccggatttcctccttgtcggtcagggcaactcccaatccgcagttttcgcaccacccgtaataaaaagcttcgtccgtgaagtggtcgaactcttttgtgttggggtttaccattgcctcacacctgacattggccgatccgcatctgctgcacactatattattttccattgttcttctgctttacgggcgactcacggccgcccttgtcatacaattcggttgttattctcttaatttatctttacccggttcatcagctgtcccgaaatttcatgcagttcccggcagcgttctggctgctgttcccttgcaaaggcggtgattccctgtgtcagtttccatagcgtggccccgcctgtaactccgtcgtcaggattgttgttcatcagcagtttctcgacctcacgtccctcgtttttcaacaaggctcctttctgcaccagattcttcagttccttgtcgaaatccacgtctatctccgatgctccttgaatttcgatggccttctgcatgatggtgtctttgctgtacagtcctttggtcaggtcggaaacagccgatacggtggtctgcgtgtccagttcgtaggtcttttgggagagggacagggattccggcagtcggcctccaaggtgtatctgccgcatgacggactccctgaccatcccgttcaggcacgccccgttgagcaggaacgaccgcatatcgaccgatccgttgccatagtcggatgtggagaagcgtgctcctgcgaagatgatgaccgttccgttcttacgggtgggtatctctatcggagtgggcaggattgtttcacaccatactttcgtgtcgttcatataggcatcggacacgaccgctccctgtcctcccgcctcacggatgaaagcggtcagtatatccaccgagttcagccgacggtaggagtccgacaatacgccccggacttccattcctaccgcccgtatcagtacccgtgtacgctcggtccatcccgaatgctcgttcaggatggtggcgcacaactgtttctgccaaacatccccggcggaaagctcgcgcaggtatttggcgggaatgcccatcttctccgaaatctggcttatggcgttgccgtgcaggttgaagttcccttcgggcattgccatctgtacccttccttccgctttgaaagagataacggggcgttccttgctacgttggcttaccccgatgggagcgatgaaatcctgcgcgatccgtccctcactgagcagacggttaatggtgtccatgacaccaccttgcctgccttctatcatccgctgtaccttgttaatgactacctggttgaggccctgctgcttctgtaccgatgcagctgccggcattactgttgtttccataatactatgtttttaatgttgatgaatcagaatttattcttagagcttgtcttggttgttttagcatgtcccatgtatttttcttctgacaaacggatataatcctcttcgctatatccggtcagcccgaacagttcataatatccggggaaagtttttttccccgcttccggtatatgcatgctggttcccttgtggcagcagatgatatgccggacaaagcggtaacacttgcaaagatcagccacgacggtatattcgttgtccgtatgaggttcgtaatatccacaggaaagattgatacaggatacttccagaccgttccttttcaaagccgccacatctgtattcagtccctgtgccggcttgtagccgtacttccggacatctatagctgaaatgaactcgttggagcagagcttcatcccattgatttgtgttaccatatccccgttccctttccggtcacactgaatcacgaaacggcaatcggaaaagaaggacatatcggcatggctgctgcctatgcatcccacctcctcctgtacgaagaaggcacatttcaccgtcttgcaatcctccaggcatttcaggcagatccagatgccgttcttgtcatccgcaccgattccggtcatccgtttacgcttgtgatcatagccgacaatcatcgagtccgccacaagatgggctgcataagagcctgtcttgcgccggtgtacctcatccatgtgcgccacgacacaggggtagctttcccggttgcctttgaccgcatagatgtttccgtacctgtcttgccggaaaggaatctccatccttttgagttcctctatgatgaatttagccatcttcccctctctgccagagggggaagaaatgccgtaaagagccattagtttttccatgataatgatattttaggaaatgaacaatttttcgatttgcaggtatcgtctgaattccggtacgggacgccctttacgaaagagaaaagacggatatttctttcctttatattccactgataatcctttcaggactttcccgaatacggtagatacatagtacatatcctgacagttcttgcagaatgccgcatccgggaagatatgtatcttcccgcatttgggacatacatattttttcctgtttgcacacccttccgtgctccggcaggtggctatgctcgtgtcgccctccgtatttctcagttccaggttaccgtccgtcagatgaaggctgtagaacgtgtcgaggtaaggcacccctttcttgtgccacctgcaggcgggcactttcaccgtcaaagagacctgtatattatctccggccgcccattcctgcccctcaatgggattcagtacggtgaaatccgtcgtatgtgtataatcgttgtatctgcgtcgcaacaggatgcctgcctcctgcgcctgcttgcggatcagttcgacgacgaatgcgtgtgaggaatagatacgatccagcagggaggcggcaatcggtgtgtttattgatttccacaatgttatctcgttccatacaatggcccgtccgaccacattgctgctgtcatcccttgccacgagtattttggctcctgcgaaattggcatagaaatccgctgcattacgggccttgtcttcatatctcatacaggagttgtgcaggctggattcgctaccgtcagatatgggactatagttgctttccagataagcctccataaaatcgttcatactgtcatgcagtctgattgtgaccttgctgtccagtgagatggcgctgcagaaatagttgatttcatcgggctggtacggtcccagatttttgaacagctcgataaacgtggacggttccagatctgtccggttctccggaaaccagggtgcctgcggattgttccggtccgggaaattgggatggcccaagtctttgttgcatgccgtgaacacgatccggattttcttgaacgtgccggcttccgtccgtttgcgtttggtggagaaaaaattgtaggacccccgtatgacttcttccaccggtacattcttttttacttccgaaaggatatctttggctatcacacttccgttttccgccgcatgggtcaggcgggatttcaattcgttgctaacattcagtttcataatcattcggtttattgtttataaattctgttgtttatatggcaattgtttcttgccaggctgcatttggcgcaatttctctttccgctttctgagcaggtcaacggacatgttcctgcttgtccgatattcctcctcactcatccggcgaatggagggaatgcccgtccgggtcagcgtatggtttaccatccagccgtccatgaagttttcggggcagaggctgtcatggtggatgacctcacctatgcagccatgtacgagcatgttgcaaacggtcatcaggcaacaggtacggctgacatcctctgcaaccagataattacccaggtggcgtacatgatatgccagcagcagccttccgcttccgcatgtcgggtcacagatacgttttcctgtcgctgtctcccccgaatcggtacataagaccatcaggtcgcagatatccggcggagtgaagaactgtccgttcacctgccgaccgcttttggaggatattgccatgaagaggtcaccgaacgcatcaaaccatccgccggattgcaattcccgctgcatgagccgtatccatccggtaagcatttccataaaatgcctgttctgctgccgtttgtatttccagtccataaggggcggtgcgccgggagagaacccgtgaatgacatagcgcaggaaatcgttgaaaacggatatcggatcgtagccgttcgaataggcgaaatcacagaccattttctcaagcggacgtatcgcctgcggtgtgttgtatggtaccatattactctgattttttatagattgttactatatgtcttttatggtcagtctgtatcctgacgggagaaatgccaaggaaagagagatgggtgtccgctttcagcatgttccattcccatgcgggaagttccttccattccatacggtatgcccagagtatgaacagaccgggacggaatccgttgaaaagctttccgtgcagaatcccgaccagccgttccagttcttcccgcgagtaaagggtgaatgcctcattccgatagacaaaggcatcagccggttcaatatccggctgacactcgatgaggtatctcttccattcttttgtggtgtactttccgtacagaggatcgggttccgtgtatttccatgccctgacgaatgtgtggaagaggacggcaccgttcctgtgccttccggtatgcccccacatccggaactgtttgctgcgtatgccatcgggaatcagcaattccggaccggttgtaacccaagggcctccttcggtattgtaaccggtacacttttcattttcatggcaaaaaggtgtctgtgggagaaggcagatatgaacttcccggtcatcgcccctttcaatgtgtgcctgcggataatagtcaccgccacgggtgatataagtgacaacgtctcctgcagtcggtaaaccggctctttccctgtcctcccgcatccttgaaatcagccggttcaccttctccacatcacattcctttatggagcaggcacacccttcatgcctgttgagcagagtcagactttccaggtcataaaaattaccgtacttcatattgagatcgtttttgttgatacaatttgacctgacgggcaaccatgtcgcagaacttctgtccgttctccttctcgcttctgaaataggcaatcatgtcccagagattccgattgaagtagccggtccatttttcgtaatagtgacctccatagacctttccgaacgtttcctcgaaaagtgcaggagtcagcccttcatccccgtggtggttgtattgccacagggagacaagcagcagctggttataatccagtgtttccatatctgttcttttttaagtaaaacatcggcctacatgggtaggcatttttatttcttgatgtctttcctgtctgttttccggggattgcggcaaggcttggcgaaagaaaataccgcagcgaagcgaggatgattttctttcagccaacccagcccctgaaaggggccgccttgcacaatcagcccggaaaacggctatctttacagcaagaaatgaaaaagcagacctcggattctctgttctgaagtctgcttttcggtcattgtcaagtttcatgtttttcaggtatgtatctgccatccgtggaacggctgcaatgttacggcaaacgacctgtcaggtattccatgatagagcagacctcccacgatacctgtccttccgtcgggatagtgctgtgtgaagccgaacgagtacggggcatggtcatagtagagtgagatttcgcagggataatcaggattcccttcccaactcttcaaccgttccaagcacttttgaagtgaggtgtcaccgatggattcggcatagcgctttacgttctcgaaatgttcttcattcaggattttcataacttttgtatttttatcagttaaacacgtccggctccgggagccggtatttttatttctcgcctgcctgacagtcccgtggccgtacccgcaaggtttggcgaaagaaaataccgcagcgaagcgaggatgattttctttcagccaaccccgcaggggcctgaccttgtacgggtacacaggacacgggactacctttgcagggtgggaaataaaatatacggttgttttttgttgtgggattttgtgtggattccttagataatcttcctgatttgttcgccattgccggacaaatgctgtatttttgcaatttctaatttcaggattatggaaaactatgtaaagaaagcggcggatgctttccttgtggagcgtccgtacggtatgcgtgtggattacaggaagaaaggattcgtgctgtttaaccgtaacctcaatgtgttgggaaatgcggaacagacccgtctggaagaactacctctggagcggttcaatgtggaggagattccgttggagggtgaagtcgtggaggaacacgcgggatttaccgatgtattcttctataccgatctgaccaatccctatgccggatatgtactgaatttgcaaaagcttaaagcctataaccggttgatgtttccgctggcaatggcgctgaaccgtgaattgtgaggccggaagccggtagcggtaacagctgcatggagcagaccgttaccgccccggatttaattatttgccctctttttctgttatgaacgccagatagacggacacggccttatggcatccggtaaagtccggagtccggcagcccttgattttccggaaactgacggttccgttcctgtcaatgcccctcacatgcctgttgaatgtccctttggttctgatatggatgtcaaaaccgtcccttccggtgatttcaaggaacatttctcccgtgatccgttccccgtccaggaatttctgtttctgttcattgagcagccgctgatgttgctcttcctgcactttgcgctcttccgcctctttctccttctgctccctgcgtttctgctcctgtattcttttatattcctcacgggcttgcaccaagggggtggtgtcaagtccgagagcttcgaacacgcggacggagatcaaattgacgaaggctcctctttccgcactttgaagcgtatccgcaatccagttcctgcaataggtggcggcttcctctctgcaaccttctcccttgaggaaccggcgtgaatactgcccgctagagaaataaacgttttcaatccggcagaccacatggaaacagtcatcgtcttcattcccgtattcgttctttctcgacagggagagatatacattctccgcgtacggctccagttccatataaggagccacgacggtattcccatcagacttgtacttgaatacttttgctttcatactatcgttcagtttgtcggttgttgcatatttcatctataatctctttcccgcttctttcacccttcaggaaggcaaggaagcgcctcaaaaagagccgggcacagtcagttcccagctggaagctttcaccgtctttggtagcacatacagcaaaacgccccagtccgaaactgtcctgttgtggtacgatgtggtaagacaagtcctcgcttgcgttgatgtgcaacccacgacggaaaacatagaaagttttcgggattcttctgtcggtatcgatttccatacgcttgtaaccgtgatgttccaataatcggcccagttccctgtttgtcggaattgtatgtccgatccagtccggccagcttatattttctattgtgtgtccgtaattgtcatataatatgttgaactgttcctggtattcatcgtaaaattccccgttcccgttgcacatttcctccaacgcgatgccgtttttacggacaagggcaaggtcgcccagtccgcacgcgatttcattgagcagcgtgcgttcctcatccctgttctttgccgttccgtaaattctaagccgggaatatcggtgtagcgccgaacgggacggcatatccagtttttcccatattccatcgtttcctatagcctgtctggtgtttcccggaagtccgtaccaccacttgtccaaattgtttgtatccataatttctgaatcagattgttttcaaattctgttttgagtaccatgcctgatacgcggcggcatactcctgacgttcccgttccagggaatttctcatttcaggggtgtacccgagcaggcggatgtatcctccgttatagccggtgggttcgcactttattccggcttcctccagtttgtcgatgcgtttttgggccatttttgcgcttgaatattccttcggccaaaaatagacttcgccccgtgagccgaaacagtcttcccccagaattatttccccggcatacttccggctttcgatgatgccgaaacgcgctttgcccaatgcctggcgcattgccttgtgtgccggaccttccggatgcttgaatacctccggcttgtctttgctgccgagtttgggcggttccaccttgtacggctgtttgtaacttccgattccgagcgtcaggtaaaagttggtatgaaaatagtccgtcatgggggcgctgtcatcgaaattgtacgacatgacgaaatcgcagatattcatcattacatcctttgccctgtccgtcaatgatttgtctgaatggatatgatggtggttgacatcgccttgaacttttccggactctttggtgaacgcctcgaaatccgctttcatcaaccggatatggatggagtggtaattctcccgtctggcagagaacttgtatcccggataggtctccttgagccatgcccgtaccagtcccacgatttccggagcgtgctgccccttgtaattgcggcctttccagcggtattcgttatacacatacccggtgtattcctttgccgtggctcccggatagtcatattcatatccggttgaggtcgagggaatatccggtttttctttccaagcctcaaaaagccttccaaactcggtggtcacctgttgcatgattgcggtgtcaccacccttgtccgggtggtgctccaatgccagccggcggtattctttcttcaagtccgccagagagtgtatgttctgaaaataagtcatagccataagttttttatgcccctgcgaggcggttgataaaatattcccggtagtcaagctcaaaaccgaggttgagacaggccgtttccatgtcatcttctctcaggtcgtccgcctcctgcaattcgcgcaggtaccgtatttcggagtccaggtattcctgtgcttccgtttgaccgcaaccgcatgagttgcagatcagactgataatgtttccctgcatgctgtttgattttttatgtttctgttcctgtttctgaggcctcgtccgtcatatatcgagacggcccgttccaccagaatcctgcggttgtcttccgagagttccaggtagaaccgttccgccgcgccgaatgtgcccttgtctgtcgccacgcaccatttttcccagaaatgcgggtacatgccgccatacacggctttgcattcctcctcgctccaggcgttccacatgtagtagaagaaactggagacggtattttccgcttgatatttcatggttcttctatttgtgattctacattgtttgtttctctcagttgatgccacacagcctcatacatctcatgaagccagtctatgttctttgcgccgagttcaaacgggctgtgacactgcacctcgtcaccgctttctttctcttcggcaaggacggtcaggctgtccgccgttacccggagtcctgtcaccctgcattcatatggttctccgttcttgccaaaccatatcacccagaccggatcataatcctcttccggaagacgaatttctttcatgcagtgagcatggagcaactgccgtatcgcgtcgatgatgtccccccgcagttccttgatcctgccgctgaaatcaacggcttctgacggtaaacttccttttccgcctctttcctgcaaggagagaatccgcgtgtcgggatggatacagaaatcccactccaacacttcatcgtcatcgcgtgtcgtgtggatatcgccgcccaaaacaagaccgcaatcgtcatttaccattctttttgcttcatcgcggtcttctgccgctaccgtgtaagtgccctcgaaggaataccttactcttatgtcatatcttttcatgattctttccatttgattgttgataccagattcattgcccggaaggattaccggatattcaatattgcgctaaagacatgtgggtcaagcctgtaaaacgtcggaaggttaagtgtgaccatcgggtagcttacccagccgctctgacgtttatagcctgtatcctcagccaatttgttggacagaaggaactccatggcatcaggattgttgttgatgtccacgaatgccctgtcaggcagtgagaatgccgccttatcttccaggttaaccgtcaggaccgtgtatatctcatgggtcacgggatctttcagagacaatgccggccagccgttatggtatatttcaatcacgattgagagacggctttcctgatacaggaaagtctcttccatggacggatggtcgcatttgataatttcaaaatcatcctcccctttggtaaatgtcaccatcggataggatacatcgacaaaacattcctcttcccggtaacagagatgttcttttccctctgaacggattatagccaatcgggtgttcatattcgtaactggttttaaaattattgacttgcaagttaattggtcggaattcacctgcttgtttctttaaacgtgtgattgtcaccgcctgcggacatttgggagagttgctgtctcaccgccttgattttcccgatcagttcgtcctcccttcggaatgagggggtacatttggtacgcctcatcccggctccccaggggatgccgccgcatacttttctcaggcgtgccttttcgctttccaaggccgactccagacgggccaacctgcgtcgcaacgattcttcggtcacagttctcatgatctcattgtttttttagtatggtgacggatcggaaagacagtcaccataccgtcgttatgtgtcacgttatattttagctttttcccttttgatgcctctcaggacgtacaacaggtgtaggaacagctccctgtcgtaaatccggaagaagaacggctcgcctgtttccctgaccgttccggtaaacgacacggactcccggttcacgggatattggaagaagttgccgtttgccagcagggtgtgctttttcttcatcacttcgcctaggaacctgtccatatcgtcgtttccctcatagccggagaagtagaggaaatgatgacggcgcaggcttcgcaggattttggcggtttccagcctcacatccctgcctgacgattcgtccgttcctctcatcaggttgcagatgaactttttctcgccatttatgtcaagaaacagataaggaactataattatagaggcatgccgtgcgtggccggagatgaccatcggcttttctttctggatgtctcctttgaaggtaatgttccggtaatggttgtccatctgccgttccagctccttccttggcgtggtaacggagcggagtcccgtgaagtagcgtccgcccgcccggaaacagaaccggtagatgtccgcatgataaggctctcccaggaaaaagaaattccgggtatggcggatggggggcaagacatccatgtagtcgaaatatctttcttccgtaatctcactgaacggggcgcagagggattgcaggtggatgcgtatcattttgcggacggtatttccggacacggctgtgagacacgggttcttttccctgtctctcagttcctccagtgtctcatggtggtagtcgccgtgtattccgtcagacatggtggtcacgcagctgccgtcaaaactgcgtgaatcgactacgaatttcagtttgtcgttattcatggttcagatgttttgaaggttcaacactcttttggcggcactgagggcattggaggtgagctgccgttgccatgccttgtttttgggtgaccagcggaatccggaggatttcagttcctttcgtctgctgtcttcaggaatcctgtcaaacaggatctgaaggcggtcttccccatagttccatacaagtgtcccgccctcgaacggcacttccttgttttcccggctttgcatcgctttcagcttttcgcgcatccgttccgccagttccggcaattggaagaatttgtttctcggtgtgatgacgggtttcttcacccttgcgttatattcggaaatgaagtccacggccctacggacgatttccacttccccgtgattggccaaagtggataccttgttcaggatgctgctgacaaacagggcacggctatagccccggcattgtccggtatcaatcccgtggatggtatcggcactgctcttgatgtcgcgtttgagcgtctgccatgccttttcctgtttctcttcctccggtcgtgcggcttcctttttccgtctgacggtttcaagaacttttttccgccaattgcggaattcttcgtaacggttctgatagcttctgttcgttttttcctgcctgtagtaatcaaatccgctccgtcccgtcaccatcgggttggcacagcgggagaggaccgagagctgggcggacaacttctgccggtaggcggcgatgtatgtatcccgttcctcttccggcatgagttgcaggtcgttgtgcagcccctctccgtaaatcatgatgtccgtctcgccgcgaatctccggattgaaggaactccaggcgtatgcgtcgcaagcctgtttccacatatcatccaaataggcaggatgtttgaatgctacggcttcccagtctttgaagtccttggaatgcaattcattgtgatcttccggatttccgtacaggtgtacatagttgcccgttccatgatgctcctttctgaaatggaacggtacggggggatagtccgtaccttttttccggatcatcgtgaccctgtgtgcattctctatggtaaggtctgctacttgctcttcgcagacctttgctgttgtttcattcataatcattacttttttaaatgtcagccgtaaatcatttcttccagttcatcgtccgtcaacaggcggatctcttcgtccgaacaatagtaagcgatttcttcgtccaaatcgaatgctgtcggatcaaggcttctgatgccatccagcagttcctgttccagtctttctacggaaaccagatagttcccatctttgccttgcacttcccgtgcaggatagctcatttcccgataaaccaacatcgtcatttccggattggcttcctgctgtcctttgcttgtcgtctttctgttcatacctttatttttttaagtttgacatgatcggctccatggagccggattttcgttttcttacttgcctggctgtcttttgtcggggattgagcaaggcttggcaaaagaaaataccgcagcgaagcgaggatgattttcttttagccaaccagcccctgaaaggggccgccttgcgcaatcaacccgacaaatggctatatttgcaggtaagaaattgaaaggacggcaggatattgtgaattatagattacaaaaaaagccatccctagggggacggcttaatgactgaatttgtatacttattgtgcaagacgctccttcacgttgttcattgcttctttcaggctgctgttcatgacccgtgcataatgctgtgtcatacgtgtggaggcatggccgagcatgacggaaacatcttgaagaggcacattgttggcaagcgtgaccgtagtcccgaaagtgtgacgggcaacgtgcgtggtcagattcttcttaatgccgcagaaatcggctatttccttgagatagctgttcatcttctggttgcacatgacgggcaaacagcatcctttcttaatgcaggtcggatgttccttgtatttctccaatatggccaggggtacgggcagcaatggaatattgctgatggaagaagccttcctacggtgttccaatttgacccttccttttcttatccaccagtctccgagattgtcctgtaccagattctctttgttcagactggcaacatcggagaatgccagaccggtgaaacacgcgaagacaaagacatccctgaccagttcaagccgtggaatggtgaatttctttttcattacggtctgcaactcgtcataggtcaggaataccggatcggtctcgtcctgctccatcttgtaaccgtaaaagggattcttgcgcatccattcctttgccaatgccatattggtaaatttcttgaagcatttcatataacggactatcgtgttccggcacagtcccgcctccgttttcaggtagatgtcaaacgcacggatgaactccggtgtcagctcatggaaagtgacatcctcctttccgtaataagaggggatgagcagctgtaatttcttcaccacgttcttataccggttgatcgtgacgggagagtagtctatacccgccagtatttccatttccttgatgccttccctcatggtgccgagcagtgtacgcatttcggtgtctttcccgaaaacacgtttaagaatcagttttggggtaatcagggcctgttccaataccagttccttgtgtttttccaaggcgcgtgcgtgcagttcggcaatataggcgttcagtgccactgatgccctgtccctgcctttactgcatcctttggcggcgttccataagttcaggggtacgcttctttggatacgtacatcgtcatagtctccattgatggttatccgcatcaataccggtgcctcaccgtttttcaacaatttcgttttaagcacgaaaaacagaatgttcattgttccttgtttcatcacttttgttttttgaggtgttacattcaattgtttcgtcaaaaccggatggcatgaggacgtggagcgaaatgttaaattcggtggtttttttgagggacttgtggaaaagccataaaaatcccatttttctcaggttcgaattgccttttgtatcccgggttcgattccttttttttatcccgatgggaaataccgaatttttaaatttctttcactttttcgacttcatccggtcatgtgtgcaaaattactttttcacaccggagattggaattgtcaaacagctgaaaaacaatgaagtatggtgcgtatttatggctttttcaaaagccttaaaaaaagccactgaattggcgaaatccaacttcacaaatatgtagcggaatgcgtagtgagggtaaaaaaagaacccttgaactatctctaattcaagggttttcatgtgtgaaaagcatttatgtactttctttggtggtgccaccaggaatcgaaccggggacacaaggattttcagtcctttgctctaccaactgagctatggcaccatgtttatctcttttgcggttgcaaaggtagtgaaacttttggactatgcaatagctttcatgataaaaaacgctgataattggctatatggctaattatcagcgtttatgatttgagaaaaaatactgaaaaagttttatagttatgctttttccgcttcttcttccttcaaaggattccatccttgtgctttgagttcaaactcttgaccgtcacgggtaattagggcgcagcctaattccggtttggtgatatggccaatcagcttgacgccttccatttcggcaaccttttcatggtcggcaatggggacggtgaacaataactcataatcctcgcctccgttcagtgcacaagtgctcaggttcatattgaattcttctgccattacagccgtctgatagtcgataggaatatgttcttcgtaaactcggcaacccactttgctttgggtacagatatgcagtaattccgaagaaagtccgtccgatatatccatcatggaggtgggttgtataccttcttctgccagtttctgaatgatgtcacggcgtgcttcgggcttcagttgacgttccagaagatactccttccccgagaagtccggttgcaagtctttgtcacctcctttgagcaccgccttttcgcgttccaaaagctgtagtcccatgtaggcggcacccaagtcgccgctgacgcaaatcaggtcggtttcgcgggcaccattgcggtagaccacttttcctttctcaccctcgcctatgcaggtgatgctgatggtaagcccagtataggaagcggaggtgtctcctcccacgatgtcaacatcatattcttcgcaagccaaacggatgccggcatagagttcctccatgtcttctatactgaaacgcttggatatgcccaaggaaacggtaatctgcttcggtgtgccgttcatggcatagatatcagagaaattgactacggccgatttataccccaaatgcttgagcggtacatacacaaggtcgaaatggacgccttccatcagcaagtcggtagtaacgagcacttccttttcggccgggtaggagaggacggcggcatcatctccgacaccatatcggctcgactcgttcttcagttcaatgccttcggtgaggtggcggatgaggccgaattcaccgagggtagctatttctgttctcatgctttcttatgctctattaatcaattcacgcataatctctgtcattctcggttgcgcctcgtccgcagctttctgcacttcttcgtgagaaacttctacgattttaccttctacccccaagtctgtaatgacagatacgccgaacactttgattccgcaatgatttgccacgatgacttccggcacggtggacatgcccactgcatcggcacccagaatatggaacatcttgtattccgcaggtgtttcgaatgtgggaccttgcgtaccgatatagacaccgtgctgaaccttgatgcccttttctgccgcaatggcgtcggccttacgaatcagctctttgtcataagcttcgctcatatccgggaagcgaggaccgtaaggtatgtttttgccacgcaatggatgttcggggaagtagtttatatggtcggtgataatcatcaggtcgccgatcgcaaaatccggatttgtgccgccactggcattggaaacgaataaggtcttgatacccagttcgcgcattacacgtaccgggaaggttacttccttcatggaatagccctcgtaaaaatggaaacgtccctgcattgccatgatgtcttttttgcccagcttgccgaagataagttttccgctgtgcccctctacggtagagacagggaagttggggatttcttcgtaccttatctcatacttttcagtgatttcaccggcaagactgccgagtccggtaccgaggatgattgctgtctcaggctgggtgtgcatctttcccttcagaaaggctgctgtttcttgaatgcgctctaacatagccaataatgttttggttaaatatatattgttgattttgtaagatttctatttctatcggcagcacgtagatgtacggctttagtgtttcgtccagtgcgggatggagtttcaaccttgccgcatctttctccgtggtgattatcagtcttttccactcttccaggtgctggaattgttcctttatttgcaataaatccttgggagtaaagtcatgatggtcatcaaatgccagcaatttgacgtgtggcgtgtaagattccacttctttctgtaagggggcgggggaggcgatgcctgtcaccagcagtacttgctcgtctccggtgagggaggagagcactttccggctgttcgttttctcgggaaatagcggtgtcaacattccatagcggaatctggagaaatacagttgttggtatggatagaggtggagccgtttagctatgatgttgaagtctatcggcttgatatcatccggacatttggtaacgatgaccatctgtgcccggtttttaccgcttgaaggttcgcggagtcttccggcagggagcaaggcatcatcgcacagtaaccggtgaaaatcagttagtagaatgttcagcccagcttttacatggcgatgttggaaggcatcgtccaggatgatggcttctacagtgggattttccagtttcagcagttgctcaatgccgtggcaacggttttcgtctaccgctacccgtgcattggggaatttatttttaatttgatacggctcgtcacctatttggcgtacattgctcttgtcatcggccaatacatagcctcggcttttacgcttgtaaccccgactgagggtggctacatttactccgtttttttgtaatagctttatcagatattcggtatgtggcgtcttgccagttccgcccacagcaagattgcccacgcatattactggaacgtcaaaactctttgaccggagccagccccagtcaaagagtttatttcgcaagcatacccctatcccataaagccatgataggggatatagccaatgatatatcttgataaagttttcctccatttattgaatattcagttcaaaggggacacgtgcttgtatacggtcacatttgtcaaaattctccaggacgctgaactgctggtatatctcgcccattgtgcctttcagcatacgtgctttgatgtagttacccggattggtgttcatcagactttcaaagaaactttcctttttcggatagctcatcacggtataggcatctactccggcctttgcaatggcaatgtccaaagctttgtccaaaccacccaattcgtcgactagtcctagttccttggccttgcttccggtccatacacggccttgggcaattttatccaggtcttccttgctgatgcctcggccatcggagcagcgggtgaggaagaggtcatatccgttgttcacatacatttgcatcagccctttttccccgtcattcatcgggcgtgtcagcatgccgaagtctgcgtatttattggttttcactacatcaaaatttaccccgattttatcagtcagcccctttgcgttggggaacatgccgaagatgccgatagaacccgtcagtgtggtaggctcggccacgatggtgtctgcattacaagaaatgtagtaacctcctgaagctgcatagtcacccatggaaacaatgactggtttctctttcttcaattcgctgacggcataccatatctgttctgaaccataggcgcttccgcccggtgagtttacgcgtaatactacagcttttacatcttcgtcatctttcagcttgcgcaggtctttaatcacctttttagagtcgatgccttcttcgctggaggcagaagatgaaccaccgtcaatttctccataggcatagtatacggcaatcacatttccacttttgtctttgggaacattcttctttacgttaatcatgtcctgcaaaccaagtacgggcatgcggtcgtctttgtcgatgcctaccatcgctttcaggtagttgcgcacatcattcttatatattaatgtatcgaccagtccgcattgcacactttcttctgcgggatagaacatcaacatgcggtcggcaatggcgttcagtgagtctacagatattttgcgtgattctgcaacatcattggtcacttgtccccagatggaggtcaggtaagcgtcgatttgttcacggttggcagggctcatttcggtagagatgaaaggctctacagccgatttgtaggtacctactttgaatatctgcatttctactccgattttggccagcaaatccttgaagaacatgggggtagcggccaagcccctccactcgaccataccttgcgggttcagcaacaccttgtcggctacacttgacagataataaagaccttgggaatagctgtcaccataagccacgatgaattttcccgattccttgaaatccttcaatgcattgcgtatttcttcgcgtgaagcaaatcctgcacccagcgaagtcgcttctatatagatacctttaatgtcgtcattctcttttgcttttttgatagaagagaggatatcatccaggccataagtcttataattgtctcccataagggcatcgaacggattgtcttggctgcgttcagccagtgcaccattcaaatccagcatcataatggagtttttgcgtacttgcgtttctgactccgaagatgataccatgctgaaaaccaccagaatactgctgaaaactaaaacaacgactgatacgatgatgccggtaatggtggcaaacgtaaatttcagaaaatctttcattgcactttattgtttttagtatgctaacttttaaaagctaacaaagataaataattaggttgatatttaccctatctgtcgctgagtttttcggtttgtcacagtattatgggagatttcattctcttttcttttatctttgaagtatttcatttcgttctttatggatagttagtttctaaaatgccagatataattgctatctctttactttctgagtctgtttctctaaaaactaatcttaccacagcagtgctcttttcttaccacagctgtggaaagaaagaaacgcgggtgtggtaagaaagaaacatatctgtagtgagaaaagttgttcagtagttctcgtttagtatccgggctttccggatgtagcctttcgcaggtttattgtcagttctctttgggctcctcaagcgtggtgccggccgttcagtggtctatgtcaaggggtgaacttattatattccgatgcgcgcgcgtatatatataatgtgtccccttccttccttcctttctttccctttaaaaaacatgctttaaaacatatctatcaatcagctagttatgaaaaagttcacgtaaaccctcaaaaaaagcttgtatatattttgcagatgtccgtaaaagcgctacttttgcatccgctttcgggaacgaaggcggcgatgttttgacattctgacagtaaaacggagcggtaagcttccatttttctcttctttgccataggtttctttcggaacttcggtcttggaaaagaaaaatgaaaaaaaacttccgaaacatttggaagttatgctttaaagttcttacctttgcacccgcttttgaaaacgaaagcagcgcgagttgacattcttctttcaagaaacggtgaccgggttttttttcttcctttttctttttgcctccctttcgacaagagagacgacgaggaaagagaaaaaagaaaaaataaaaaaaacttccgaaaatatttggaagatatgctttaaagttcttacctttgcatccgctttctgaaaagaacagcaatcgtgaaacgagcgatctttgaacagatttacataaacaatacaagtagtacaagagcaggtgcttcgcaaattaataaatggaaactaatgattaaggcgcgtcgtacctgggtaaaacaaaagaaccgtcaatatctgttttatataaataggtaaagataaactttttgaattcgagcgtcctggacagataattaagctgccgcattttaatttttaatttgcgcagtcaagatacttttacaatgaagagtttgatcctggctcaggatgaacgctagctacaggcttaacacatgcaagtcgaggggcagcatgaacttagcttgctaagtttgatggcgaccggcgcacgggtgagtaacacgtatccaacctgccgatgactcggggatagcctttcgaaagaaagattaatacccgatggcatagttcttccgcatggtggaactattaaagaatttcggtcatcgatggggatgcgttccattaggttgttggcggggtaacggcccaccaagccttcgatggataggggttctgagaggaaggtcccccacattggaactgagacacggtccaaactcctacgggaggcagcagtgaggaatattggtcaatggacgagagtctgaaccagccaagtagcgtgaaggatgactgccctatgggttgtaaacttcttttatacgggaataaagtgaggcacgtgtgcctttttgtatgtaccgtatgaataaggatcggctaactccgtgccagcagccgcggtaatacggaggatccgagcgttatccggatttattgggtttaaagggagcgtaggcggacgcttaagtcagttgtgaaagtttgcggctcaaccgtaaaattgcagttgatactgggtgtcttgagtacagtagaggcaggcggaattcgtggtgtagcggtgaaatgcttagatatcacgaagaactccgattgcgaaggcagcctgctggactgtaactgacgctgatgctcgaaagtgtgggtatcaaacaggattagataccctggtagtccacacagtaaacgatgaatactcgctgtttgcgatatacagtaagcggccaagcgaaagcgttaagtattccacctggggagtacgccggcaacggtgaaactcaaaggaattgacgggggcccgcacaagcggaggaacatgtggtttaattcgatgatacgcgaggaaccttacccgggcttgaattgcaactgaatgatgtggagacatgtcagccgcaaggcagttgtgaaggtgctgcatggttgtcgtcagctcgtgccgtgaggtgtcggcttaagtgccataacgagcgcaacccttatcgatagttaccatcaggttatgctggggactctgtcgagactgccgtcgtaagatgtgaggaaggtggggatgacgtcaaatcagcacggcccttacgtccggggctacacacgtgttacaatggggggtacagaaggcagctacacggcgacgtgatgctaatccctaaagcctctctcagttcggattggagtctgcaacccgactccatgaagctggattcgctagtaatcgcgcatcagccacggcgcggtgaatacgttcccgggccttgtacacaccgcccgtcaagccatgaaagccgggggtacctgaagtgcgtaaccgcaaggagcgccctagggtaaaactggtgattggggctaagtcgtaacaaggtagccgtaccggaaggtgcggctggaacacctcctttctggagtgacgtctcgactcgatcgttggttcttgaagttatgcttccataagaacctcttgtactgcgcgtacttgtttattaaaatatacgagaaaagtagaagccgagccgtaaggcgagggtttgactgacagtcctatagctcagttggttagagcgctacactgataatgtagaggtcggcagttcaactctgcctgggactacttcaaagttgaaaactgaaaattgacaactgaaaatcgggaactctccggattttccactttccactttccgttttccacttataagaagggggattagctcagctggctagagcacctgctttgcacgcagggggtcaacggttcgaatccgttattctccactccgttttgattattgttttataattgaaacaccgttctttgacatgatgtgaccaaaaaaaagtaaagttaaaagctgaaagtatatatcgaccatacgtgatcggtaagacaaaaagtaagtaagggcacatggcggatgccttggctctcggaggcgatgaaggacgtgataagctgcgataagctgcgggtaggtgcaaatgacctttgatccgcggatttccgaatgggacaacccgatactttgaagaagtatcatcctgcattgcaggaggctaacgcagggaactgaaacatcttagtacctgcaggaaaagaaaataaacaatgattcccccagtagtggcgagcgaacggggaatagcccaaaccatccatgttacggcatgggtggggttgtaggaccacgccgtggcaagaaagttggtgagcagaatgttctggaaagtacagccatagagcatgacagctgcgtatgcgaagccaagcgaagcctagtggtatcctgagtagcgcggagcacgaggaattctgcgtgaatctgccgggaccatccggtaaggctaaatactcccgagagaccgatagtgaaccagtactgtgaaggaaaggtgaaaagcacttcgaacagaagagtgaaatagttcctgaaaccatgtgcctacaagcggtcggagcaccttctggtgtgacggcgtgccttttgcataatgaacctacgagttactttttccggcgaggttaaggatttcagatctgcagccgaagcgaaagcgagtctgaacagggcgtatagtcggaaggagtagacgcgaaaccaagtgatctacccttgggcaggttgaaggatgggtaacaccatctggaggaccgaaccaataagcgttgaaaagcttctggatgacctgagggtgggggtgaaaggctaatcaaacttggagatagctcgtactccccgaaatgcatttaggtgcagccttgacttatactggcatgaggtagagcgactgataagatgcgagggcttcaccgcctatcaagtcttgacaaactccgaatgcgtgtcagttctatgtcaggagtgagggcatgggtgctaaggtccatgtcctaaaggagaacaatccggaccaacagctaaggtcccgaaatgaatactaagttgaactaacgaagtcagattgctaagacagctaggatgttggcttggaagcagccattcatttaaagagtgcgtaacagctcactagtcgaggagtttggcgtggataataatcgggcataagtattctaccgaagctttgggatgagaaatcatcggtaggggagcattccactcggcgtcgaaggtgaggcgcgagccttgctggagcgtgtggaaaagcaaatgtaggtataagtaacgataaggcaggcgagaaacctgcccgccgaaagactaaggtttcctgatcaacgctaatcggatcagggtaagtcgggtcctaaggctcagccgaacggcgaggccgatggcagaaccggttaatattccggtactacctgtgggagtgacgtggagacggagtcgtgacagcgccgcggactgacggaatagtccgttgaagggtgtagatgctgattgttccaggcaaatccggagcaagagtcgaacctgatagtatggagcgttcttagaacaatccaatagtgcgtgtaatcatacttccaagaaaatccgctaaacttaatcctgcaggtacccgtaccgcaaacggacacacgtagtcgggttgaatatactaaggcgcttgagtgattcacggttaaggaactaggcaaactgaccctgtaacttcgggataaagggtcctcgcttaacggcgaggcgcagagaataggtccaggcaactgtttaacaaaaacacagggctgtgcaaaattgaaagatgaagtatacagcctgacacctgcccggtgctggaaggttaagaggagatgtcatcgcaagagaagcattgaattgaagccccagtaaacggcggccgtaactataacggtcctaaggtagcgaaattccttgtcgggtaagttccgacctgcacgaatggtgtaatgatctggacgctgtctcaaccgtgagctcagtgaaattgtagtatcggtgaagatgccgattacccgcgatgggacgaaaagaccccgtgaacctttactatagcttaacattgaatttgggtaattgatgtgtaggataggccggaggctttgaagcgggcacgccagtgtccgtggagccgctgttgaaatacggccctttgattatttgagttctaacccgttgttgcggggacactgtttggtgggtagtttgactggggtggtcgcctccaaaagtgtaacggaggcttctaaaggtgccctcacgacgattggtaaccgtcggcagagtgtaatggcataagggcgcttgactgggagacttacaagtcgatcaggtaggaaactagagcatagtgatccggtgtttctgtatggaaaggacatcgctcaaaggataaaaggtactccggggataacaggctgatccctcccaagagctcatatcgacggaggggtttggcacctcgatgtcggctcgtcacatcctggggctggagaaggtcccaagggttgggctgttcgcccattaaagtggcacgcgagctgggttcagaacgtcgtgagacagttcggtctctatctatcgtgggcgcatgaaatttgcgtggctctgacactagtacgagaggaccgtgttggactgacctctggtttaccggttgtgccgccaggtgcattgccgggtatctaagtcgggattggataagtgctgaaagcatctaagtacgaagccagccacaagattagatttctcagggtcgttgtagactacaacgttgataggatgcaggtgtacaggcagcgatgtcatagccgagcattactaattgcccgtccactttttgccttccgtgtatggaggtatatacgttcagcaatatatggacactttacttttttctcatcatgtctgccttattcaggtgactacagcaccggggttccacctcttcccattccgaacagagaagttaagcccggtcacgccgatggtactgcgtaacagtgggagagtaggtagtcgccgttttcagaagaagcctccgtgtctgataaggatacggaggctttgttcgtttttggcggtctcataaacttttcttatatttgcgccgaactaattttatatcaacgtttaaagcaaattgaaagtatgaagactaaagttttattggctgccgttgcggtagcgttttctttcgcagtgacatcttgtggcaacaaaaaggctgcagattctaatgcaactgaggcagattcttgctgtgctgcaaaaacagaacaagtatgtgactctgcaaaggcatgttgccaggctgctgattcagcagcgtgtcctaaggctgcatgtgatggtgccaagtgtgacaaaccttgtgagaagaagtaattcagaacttgtattgaactgaagaataaggaaaggcgtaccttgaggtacgcctttttttgtgatatatttcagcgataaatgaacacaaagggtcaacgtaacaatctgaggtattttatatttaagcatataatttagcaagtctatataagaaaaaagctctatctcttactcctctgaactgtgctctaaatgctttgattttagcattgaatgactctgctgcggcattggttgccctcctttcaaaaaaattgattatattcagataatgtgtttgtatagaacgtgcgacccttccaaaggtgaggaaccctgatttatctacttcatcataccaccttgccagccttgtcaaagcaatatccttaaacttacactgatgatagattaagcctaaccgcatagacagataatatcctttctttatatcgggatattccttgaaaagaatttcagctcgtattctttgagactgagtccataaggattccttcttgtaaagcagataaatgcttctcgctaacaactgctttcttgtatctccattagcgaaaacaggtgcatgatacatctttccacaggcctttgcataagcaatctgagtggactcttcatccaaagcctcccagcgagcttttacacgcatctcctgcaccgcttcataagctaacttctgtacgtgaaagcgatcggtaacacgtttggccgcaggaaagcagatgcgggcaatctgctccatgttaggagccatatccaaagtaatctcgcgcacttggtaacggcggagacgggatagcttaagcaggacagaagtgaccgtatgaacgtccgtacctttaatgatagcaatcatactacctttaccaccgtgagcttctttattgatcagtacagtatagagttctccacgcgagagggctacctcatcaatacagatataagcaccgatattcttttcgaatagtagccaatcctctgcatgaacaagttggtcccaatggagataaccacttagatggttacggtattgacgctccaataaatctccgtcaactccatataaaacacctaagagcttacaactgatcggatagctatcaatatagttcttttaaaaaagacgcaaaatcttgcgtcatacgagtaccttcagccaccatacgccagttacgagagatatactcattatgcttctttaagatccagcgacgacgacgaatattaaggaagaccttcttgccacgaagaggaaaatcctgaacaataacaggatcataaaagcctttactctcagtatcctgatctgcatacttctcaggaacgatatttttttcctcaaggtagatcacaacttcatttacgctttccttcacatcaacaagagcaaagtactctaaagtgccttcaggaagaagaaggcgataaccgtttaactccataagctatgaatttggagacaaagataataatttataaatttactcctcaggtttttacattgacccaacacaaacttataaaatgatattttttatcggaaaaaagtaacgaatttgtttgtgtggtacgaaataatatctacctttgcaacgtcaaaacaaaaaagaagatgattcagaactttacatatattctactgtgtggtattattattctactggcaaagtttagtggaagtgagtgctgtgcgtgaatatatatgtaagatgcaatgatatatgaagcctttctcacttccaagtgtgaaaggctttttttatggaacataaattaaatacaataaagcaatgagtgacaaattatttattttcgacacaacgctccgcgatggcgagcaggttccgggatgccaattgaatacagtggaaaagattcaggtagccagacaactggaagccctgggggtggacgtgattgaagccggatttccgatttcaagtccgggagatttcaattcggtcattgagatatcaaaagctgtgacatggcccaccatctgtgccttgacacgtgccgtacagaaagatattgatgtggcggcagaggctttgcagtttgccaagcataaacgtatccatactggtatcggtacatctgactcgcacattaaatataaatttaattccaatcgcgaggaaataatagagcgtgcagtggctgccgtaaagtatgcacgtaagtatgtggatgatgtagagttctatgccgaagatgcaggccgaacggataatgaatatttggcacgggtggtagaagctgttatcaaggcaggtgcgactgtggtgaatattcccgatacaacggggtattgcttgcctgatgagtatggcgcgaagataagatatctgatggaacatgtcaacggtattcataatgccattatttctactcattgccacaatgacttgggcatggctactgccaatacaatggctggcgtactgaatggtgcccgccaggtggaggtaaccatcaatggtattggtgaacgtgccggcaatacttctcttgaggaagtggcgatgattatcaaatgtcacaaggacatagaaatcgagaccaacatcaatacacagaagatttatccaaccagccgtatggtgtccagtctgatgaacatgccggtgcagcccaacaaggctattgtaggtcgcaatgcttttgcccattcgtcgggtatccaccaggatggtgtgttgaagaatgtacagacttacgaaatcattgacccgcatgatgtgggtattgatgataattccatcgtattgacagcccgtagcggacgtgcagccttgaagaatcgtttgtcgatattgggagtacaactggatcaggagaagttggacaaagtgtatgaagagttcttgaaacttgccgataagaagaaggatatcaacgatgatgatattctggtattggcaggggcaaaccgtacgcagaaccaccgtatcaaactggaatatcttcaggtgaccagtggggtgggggttcgttcggttgccagcttgggattgaacatctctggcgagaagtttgaagccgccgccagtggaaacggtccggtagacgctgctatcaaggctttgaagaagattattgaccgccatatgacattgaaggaattcactatccaggctatcagcaagggtagcgacgatatgggtaaggtacatatgcaggtggaatacgataatcatatttattatgggttcggtgccaatacggatattatcgcggcatcagtggaagcgtacatcgactgtatcaataagttcaagatgtgattttaatcgtaaattgtaaatagctaaattgtacataaagagatgaatacattatttgataaaatctgggatgcccatgtggtacagaaagtggaagacggtcccacacagctttatattgaccggctttattgtcatgaagtaaccagcccgcaagccttttcaggattgcgcgaacgtggaatcaagtgtttccgtccggaaaagattttctgtatgcccgaccataacacgccgacgcatgaccaggacaagccgattgaagacccggtttcaaagactcaggtagatacactggccaagaatgcggaagagtttggattggcccatttcggcatgatggacaagaagaacggaattatccatgtagtaggtccggaacgcgggctgaccctgcctggcatgaccattgtctgcggtgactcgcatacttccacccacggggcgatgggagcagtggctttcggtatcggtacgagtgaggtggaaatggtaatggcctcgcaatgtatccttcagagccgtcctaagacaatgcgcatcactgtcgacggcaaacttggcaagggagtgacggcaaaagatgtagcattgtatatgatgtcgaagatgacgaccagcggcgctacgggatatttcgtggaatatgccggagaagctgtgcgtggtctgactatggaaggccgtctgaccttgtgcaatctgagtatagagatgggtgcccgcggcggtatggttgctccggatgagaccactttcgagtacatcaaaggacgcgaatatgctccgaagggtgaggcatgggacaaggcattggcctattggaaaacattgaagagtgatgaggatgcagtgttcgacaaggaagtccgttttgctgccgaagatattgaaccgatgattacatacggtaccaacccgggcatgggtatgggtatcacacaacatattcctactaccgaaggcatgggagaagctgcccggacctctttcatgaagtctattagctatatgggtttccaaccgggagaacctttgctgggtaagaaggttgactatgtgtttttgggtgcctgcaccaatggacgcattgaggatttccgtgcatttgcctccattgtgaaaggccgtcggaaagccgagaatgtagtggcatggctggttccgggctcctggatggtagatgcacagattcgcgaagagggactggacaagattttgaaagaggccggttttgccattcgccaaccgggttgttctgcttgcctggcaatgaacgacgataaggtgcctgccggaaagtatgcagtgtctaccagtaaccgtaattttgaaggacgccaaggaccgagttcccgaacactgcttgccagcccgcttgtagctgcagcagcggcagtgactggagtaattactgacccgagaacgctgatttgatgtacgattggacgatttacgattaaaattacttcgtaaatcaaacatcgttcaacaaaggtaaatcaagagtattttcaatcgtaaattgtaaatcgtaaatacaaagatgaagacaaaatttgatataataaccagtacttgtgtgcctcttccattagagaatgtggatacagaccagataatccctgcacgttttctgaaagctactacccgtgaggaaaagttcttcggagataatttattccgcgattggcgctatcatccggacggttctctgaacaaggactttgttttgaacaatcccacttacggtggacagattctggtggcgggaaagaacttcggttccggttccagccgtgagcatgctgcatgggccattgccggttacggtttccgcgtggtggtatcgagtttctttgccgatatacacaagaacaatgaactgaacaactttgtgcttccggtggtggtaagtgagccgttcctgaaagagttgttcgactctatctctgccaatccgaagatggaagtggaagtgaatctgcccgaacagaccatcaccaacaaagctacgggcaagatcgaacattttgaaatcaatgcctacaagaaacattgcctgatgaatggcttggatgacatcgattttctggttgagaataaagataagatagaagcttgggagaataaaaatgaagcataatcatccgaagatagaaatcatggacactacgctccgcgacggtgaacagaccagcggagtctcctttgtgccccatgagaagctgatgattgcccgtttgttactggaggaattgaaggtagaccgggtggaggtggcttctgcgcgggtatccgaaggagagtttgatgccgtaaaaatgatttgtgactgggcggcacgccgtaatctgttgccaagagtagaagtgcttggctttgtagatggccacacgtcggtggactggatacatgcgaccggttgccgtgtcatcaatctgctgtgcaaaggctcgctgaagcattgcacctaccagttgaagaagactcccgaagagcatatcgaggatattctgtccgtagtggattacgccaacgagcaggatatggtagtgaatgtctatctggaagactggagcaacggcatgaaagattctccggaatatgtgttccgtctgatggacgccttgaagcagaccaatatccgccgctatatgttgcctgacacgttgggcgtattgaacccgctgcaggtcatcgagttcatgcgcaagatggtgaaacgctatccgcatgcccattttgacttccatgcccacaatgactatgaccttgccgtgagcaatgtgcttgccgccgtacttagcggttgcaagggactgcatactaccattaacggcctgggcgaacgcgccggcaatgctccgcttgccagtgtgcaggctatcctgaaagaccacttcaatgccattaccaacattgacgaaagccgcctgaacgacgtaagccgtgtggtggagtcctactcgggcatcgtcattcccgccaataaaccgattgttggcgagaatgtatttacccaagtggcaggcgtccatgccgacggtgacaataaaagtaacctctactgcaacgacctcctgcccgaacgctttggtcgcaagcgagagtatgccctgggcaagaacagcggtaaagccaatatccggaagaatctggaggacttggggttacaactggatgaagatgccatgcgcaaagtgaccgaacgcatcattgagttgggcgacaagaaagagctggtgacgcaagaagacctgccctatatcgtttcggacgtactgaagcacggaatggcagaagaacgcgtcagccttaagagctatattgtgaatctggcgtatggattgaagccgatggctacgttgaagatagaaattaacggaaaggaatatgaggaaagttccagtggagatggccagtatgatgcttttgtgcgcgccttgcgcaagatatataaagtgacactgggtcgtaagttcccgatgctgacgaactatgccgtgactattcctcccggtgggcgtaccgatgcctttgtgcagacggttattacctggagttttgaagatacgatattccgtacacgcggattggacgcagaccagacggaagcagccatcaaggcgacggtgaagatgctgaatatcatagaagacgaatacgaatcataaaaaatggatctcatggagaaaaagaaatcgttttttgagaggcgtccttatgtatgctatgcgttgtatgcaggcttgctttttgctttcaacctctttctgcgttggtggagcggcgagttggatgcggacgagtatcttatgtcagccatcaatacccttatattgacagctggttttgtgtggggtgaccggtatcgccgcaagaatcttgcaaacaaaaagaagatagatgaacttttaaataataaagaaaacaatggattttaaaattgcagtgttggccggtgacggtatcggccccgaaatctctaccgtaggcgtggatgtgatgactgccgtgtgtgagaagttcggacataaagtgaactatgaatatgccatctgcggtgcagacgcgatagacaaggtgggtgacccgtttcccgaagccacttatgaggcttgtaaaaatgcggatgctgtattgttctctgccgtaggtgacccgaaattcgacaatgaccctactgccaaagtgcgtcccgagcagggcttgctggctatgcgcaagaaactgggactgtttgccaacatccgtcccgtgcagaccttcaaatgtctgctccataagtctccccttcgtgcggaactggtggatggtgccgatttcctttgcatccgcgaattgaccggtggcatgtacttcggtgagaaataccaggacaacgacaaggcgtatgatacgaacatgtacacccgtccggagattgaacgtatcctgaaagtcggatttgaatatgccatgaaacgcagcaaacatcttacggtggtggataaagccaatgtgcttgcctcttcccgtctttggagacagattgcccaggagatggcaccacagtaccccgaggtgacaaccgactatatgtttgtggacaacgccgccatgaagatgattcaagaaccgaaattctttgacgtaatggttacggaaaatacgtttggtgatattttgacggacgagggttcctgcatcagtggctctatgggattgctgccttctgcttctacgggagagagcacgccggtattcgaacctatccatggttcctggccgcaggcgaaaggcttgaatatagccaatccgctggcgcaaattttgtctgtagccatgcttttcgaatacttcgacctgaaagaggagggggcgttgattcgcaaggcagtggatgcttcactcgatgcgaatgtacgtacaccggagattcaagtagaaggtggcgacaaatacggtaccaaggaagtgggcgcgtggattgtagactatcttaagaagtcttgataacagtgtcccattaccgttctgtccatcagtaacttctcactgcaaagttctgcaaaccttttgcagtgtcactgcaaagctgttacagccgcgctgcaaagcagttgcagtaccactgcaaacctatttgcagtaacgctgcagctcgtttgcagtactactgcaaaaagcatgcaccatctttgcagtggggagtcgctgattgtcagatatggttcttcctccccatccttccttcttcaatcgtttcatatcctttcatcccctttattcgtgttaagctttgatagatggcagtataatctttcctttcccgcacggtttatttcttggaatttccatatctttgtcagcatatccatgttacaataagtgtgtacgggaagaatgtattagacagtgagattatggcgaaaattgcaaagaacctgacggagttgattgggcatactcctttgatggaattggctgaatacagccgtaaatacggattgaaaagaaatattgtggctaagctggaatcttttaatccggcgggaagcgtgaaggaccgtgtggcatttgccatgattgaggatgccgaggcacgcggggctttgaaacccggagccacgattattgaacctaccagtggcaataccggcgtgggactggcgatggtggcaaccatcaagggataccatttgatattgaccatgccggagaccatgagtgtggaacgccgtaatctgttgaaagccttgggtgcggagattgtactgaccgacggactgacaggtatggccggctccattgccaaagcgaaagaactgagggatgcgatacccggtgcggttattctgcagcagtttgagaatccctccaatgccaaggctcatgaacatactacgggggaagaaatctggacggacacggatggcaaagttactgtttttgttgccggtgtgggcacgggcggcacggtctgtggagtggcgcgtgccttgaagaaacataatccggatgtctatgttgtggctgtagaaccggcctcctctccagttctggaaggaggcgaagacgcaccgcatcgcatccaggggattggggccaattttattccttccatttatgatgcttctgtagtagacgaggttattccggtgcccgatgacgaggccattcgtggaggacgagagctggcttctacggaaggcttgctggcgggcatctcatccggtgcggcggtatatgcggcacggttgctggccgaacgccctgaatttgcggataaaatgattgttgccctactgcccgatacgggggaacgctatttgtcaacagaactgtttgctttcgatacctatcctttggaataaatactgaacgattatatgaagaaatttattttttctttccttttgtgtggagccacgatgtttcctgccttttcacaaacctatcaggaactgagcgaacgtgcggttgcagccacggagcaagacagcttgtcattggccgaaaaatacattgaacaagctttgaaaatggagcccgccaatcctcataatgctttgctgttctccaacttgggtacgatacagcgtcggcagcaccggtatgagcaggcccttgactcgtatactctggctttgaacattgctccgcgggccatacctgccctgatgaatcgtgccgctctttatcttgagttggggaaggatgatttggcccggatagactattctttggtgctggatatagagagcgataatcaggaagccttgctgatgcgtgcctatatctatatgcggcagcgtaactataattttgcaaagtctgattatgaacgtctgctgaaacttgccccccggagctacaatggccgtctggggttggctacactagagcagaaggagggtaaatacgaagcggcactttcgatattgaatgccatgattgcagaaaaaggaggagaagctacccggctgactacccagcaatatgctgtgctttacgtggcacgtgcgggtgtggagcaggatatgaaacatgtggacctggccatgatggacttggaagaagctattaagctggatccttcacagacggaagcctacttgatacggggacaaatttatctttcccaaaagaaaaaggagttggcaaaacgtgacttcgaaaaagccatttcgcttggcgtaccgcaaggtgacctcagggagttgctgttgcagtgtaaataatattcaactatatttccgtatcagatccacaaactcttttccgtatttcttcttcttatattcaccgataccgctgatattaccaaaatcttctatggtggtggggcgggaggtgctgagcaggtggagtactttgtcggacagtacgatataggcaggaagtgcttcctggtcggcaaggcgtttgcggagagtgcggagagcctcgaaaagttccccactttctgtattgggcaatcccaatggcaattctttggttggaactgtagccttgcgtttacggccttttgtagcttgtacagcttcctcgcggcggatggtgacaagcagggcgcgtgctctgccaaacaagacatctgttccgctttgagtaattttcagatggttgttttcattgtaggctatttcgaaatagccgagttgcaacatttgcagcaggtagtcatgccaatctctggcaggtacttcacgcccggctccaaaggtcttaaggcgatggtatcccctttctgtaacttcagaactcatgtttcctcggaggatgtccactaaaataccggttcctatctgttgctcggaacgcgcgattgcactaagtgccttttgtacgattattgtaccatcgaaacgttcggggggatttttgcatacatcacagtttccacagtcgcaggtcgtattttcaccgaaatagcttaacagaatgcggcggcggcagatatctgcttccgcatattgctgcatgcgttgcagtttttccaggttgatgctttgttgtccgctgtccgttgcgaatttagtgagcagaatgaggtcggccagtgaatagaacaaaagggtgtcactgggcattccgtctcgtccggcacgtcctatttcttgatagaaactttcaatgcttttgggcaaattgtaatgaattacccagcgcacattgcttttgtcaattcccattccaaaggcaatggtggcgcataccacttgcacgcgatcattgatgaagtcgtcttgtgcttcatctcttcgtgccgacgacagtccggcatgatagactgctgactttatcccttgtttttgaagcatttgtgccactgtttcagtcttgctgcggctcatgcaataaatgatgccgctctctcccggatggcgggcgatgaagtcgaggatggctttgcttttttccttctgctggtaacctctttttacggtgagactcaggttgggacggtcgaaagatgaaatgaaaattctcggttggttgaggtgtagctgtttaataatatcttcacgggttattttatcggctgtggcagtaagtgcaatgatgggaacctggggaaacagttggtgaaggatgcccatctgtgtatattccggacggaaatcgtgtccccattgtgagatgcagtgagcttcatcaatggcgaaaagggaaatatgcatatcccttaacagatagttggcttccgccaataatttttcaggagaaatatatagcagtttcagcttgccttccatgcatgcacgtcgtagggaagcattctctgtttcatcattattgctgttcagtgcaccggccgcgataccgtttgcacagagcgtttccacttggtccttcatcaaggaaatgagcggagaaaccactaccgccgtgccttcactcaatagggcgggaagttggtagcagatggactttccacctcccgtaggcatcagtaccaatgcgtctttacggtccatcagatggcgtatgatgtcttcttgtaaggggcggaaactgtcgtaaccgaaatatgtcttgagcgtttgtagcataatctggcagtatgtatttcttccggcaaaggtacactaattattgcatatactacaaatggaaagtcatcaagattttgtatcatatgagtttctgcaaaaggttaaagtttcttattaatggctgaattgacctacttttcaacctttttcgttgtttatttatcaaaaatatatacgggaaaagttgtgtattaaaaaaaaatgtctgacttttgtaaagtctaaggggctaaccctttggcttttccgattttaaacaaccctaaccagttaattcaatgagtgatttagaaaacaatgcccaggaaaaaggaacgaagaaacgtccttacaacttgcgcgaaaagaaagaaaaggatgctgcctaccgttctttgataaggccggaattggcagatgagttgtatgacaagatattgaatatcgttgttgtacaaaagaagtacagagatgctgattattccgctaaggatttggcgaaagaattgcagaccaatactcgctatttgtctgcagtggtgaattcacgcttcggcatgaactattcttgcctgctgaatgaatatagagtaaaagaagcgcagcatttgttgacagacaaaagatatgctgacaagaatgtagaggagatcagtacgatggtcggctttgcaaaccgtcagtctttttatgctgctttctataaaaatgtaggtgagactcctaatggatatcgtaaaagacacgcagaaaaagaagctaagaagaaataattctgtatgactgaatgaataaaaaggaaatattccggaacagttgtttcgggatacttccttttcttcttttttaataccaatccatatactcccgacacatgaagaaacaactaatttctatggtgactgccctttctctattgacggcttgtggcggaaatccgaaaacaactgctgaggcagaaaaatttgactatacagtggaacaatttgcagatttacagattttacgttaccgcgtaccaggttttgaggatttgtccctcaaacaaaaagaattggtttattatttgacggaagcggctttgcagggcagagacattcttttcgaccagaatggcaagtataacctgacgattcgccggatgctggaagctgtctataccggctataagggagataagaatactcctgatttcaaggctatggaagtgtacctcaagcgggtatggttctctaacggcattcatcatcactatggcagcgaaaagttcgttccgggatttactcccgaattcttcaggcaggctgtacagagtgtggatgcagctacattgccgcttgccgaaggacagactgtggaacaactgtgcgaggaagtgttccccgttattttcgaccccacggtgatgcccaaacgggtgaaccaagctgccggtgaagatttggttttgacttccgcatgcaattattacgatggcgtgacgcagcaggaggccgaagatttctataatgccttgaagaatccgcaggatgaaactcccgtttcctatggtttgaatagccgtttggtgaaagaggatggcaagattcaggagaaagtatggaaagtggggggcttgtatggacaggcacttgaaaagattgtctactggctgaagaaggcagaaggagttgccgagactcccgagcagaaggcggtgatagccaaactgatggaattctatgaaaccggcgatttgaagacattcgatgaatatgccattttgtgggtgaaggatttgaactcacgcattgactttgtgaacggttttaccgaaagttatggtgacccgctcggcatgaaggcaagctgggaatctctggtgaattttaaagatttggaagctacccagcgtacagagttgataagcggcaatgcacagtggtttgaggaccattcgccggtagacggacaattcaagaaggagaaagtgaaaggggtgtctgccaaggtaatcacggcggctattctggccggtgacttgtatcctgcaactgctatcggcatcaacctgcccaatgccaactggatacgtagccatcatggttcgaaatccgttacaatcggtaacattacagatgcttataacaaggcagctcatggcaacgggttcaatgaggagtttgtgtacagtgatgcagagcttcaactgattgataagtacgcagatgtgacagatgaactgcatactgacctgcatgaatgtttgggacatggttccggtaaattgctcccgggtgtggacccggatgcgttgaaggcatatggttctactatcgaagaagcgcgcgccgacttgttcggactctactacgtggccgacccgaagctggtggaactggggcttactccaagtgcggatgcttataaggctcaatactacacctatctgatgaatggtttgatgacacagcttgtacgtatcgagccgggtaacaatgtagaagaagcccatatgcgcaaccgtcagctcatagcccgctgggtgtacgagaaaggtgcggcggagaaggttgtggaattggtaaagaaggatgggaagacgtacgtcgtgataaacgattatgagaaagtgcgtgacttgtttggccggttgcttgccgagatacagcgtatcaagtccaccggtgactatgccggtgcccatgatttggtggaagcctatgccgtgaaagtcgatcccgctttgcatgccgaagtgctggaacgctacaagaagctgaatcttgcgccgtataaggggttcgtcaatcccaagtatgaagcggtgacggatgccgacggtactataacagatgtgacagtgacttatgatgaaggttatgcggaacagatgttgcgttatagcaaagattattctacattgccttctgtcaataaatgatgaactatgatagatactaaagagcagctgcatcagcggctgaaagatataaagacacagctccgtctctcaatgaacggggctgtatcccaaagtatgcgtgagaaagggctggtatataagctgaacttcggcgtggagttgccccgtatcaagggtattgctgccggttacgagaaggaccactctctggctcaagctttgtggaaagaagatatcagagagtgcaaaatattggcgggacttttacagccggtagagagtttcctgcccgagatagccgatatctgggtggaagatatccgtaatatcgagattgcagaacttacctgcatgaatttattccaacatcttccttatgcgcctgccaagtccttccattggattgcaagcgaggacgaatacacgcaggtttgcggcttcctcaccatagcccgtctattgatgaagaaaggggatatgaacgaacgggttgaaaatgagttcctcgaccaggcaataacggcttttttgtcgggctcctatcatgtacgcaatgcagccatgactgctatctgccgctttatgcagcaaaatgaggaaaattcttttcaagtttgccgcagggtggagggtatggacaattcttcttctgatgtagaacaattactatacaatcttgtaaaagaggaggtttgttagattagttctatggttatagagactgatgcggtaagggaatatttcccttatcgcaatttttatctctttctcgtttgctttccacaaaaaaggattaactttgttggctgtaaaactgcgccgtcaaatggaaagtcagaatgtgaaagatacagttaggcagatattcactgaatatctgaatgcgaacgggcatcggaagactcccgaacgttatgctatacttgacaccatttactccatagacggtcattttgatatcgacacgctctattcactgatggccgaccaggagaacttccgcgtcagccgtgcaacgctttacaataccatcattttgcttataaatgctcgtctggtcatcaagcatcagttcggcaactcttcccaatacgaaaaatcttataatcgcgatacgcaccatcaccagatatgcacccagtgcggaaaggtgaccgagtttcagaacgaggagttgcaacatgccattgagaataccaaactgagccgttttaatcttacgcactattccttatatatgtatgggttgtgtagcaagtgtgaccgggccaataaacggaagaaaaagaataataaccataaaaaagaaaaatgaaagtagacgtattattaggattacaatggggcgacgaaggcaaaggcaaagtcgttgatgtgttaactccgagatacgatgtcgtagctcgtttccagggcggaccgaatgccggacatacactcgagtttgaagggcagaagtatgtgctccgttccattccgtctggaatattccagggagacaaggtgaatatcattggtaacggagtggtgcttgatccggctctcttcaaagcggaagccgaatcattggaagcgtccggccataacttgaaggaacgcttgcacatttccaagaaagcacacctcattctgccgactcaccgcatactggatgctgcatacgaagcagccaaaggcgatgcaaaggtaggaacgaccggaaaaggcatcggaccgacttacacggataaaatcagccgtaacggtgtgcgtgtaggcgacattctgcatgactttgacaagaagtatgcagcggccaaggcccgtcatgagcaaatcttgaaaggcttgaactatgagtatgacattaccgaaatggagaaggcatggttcgaaggtatcgaatacttgaaacaattccagttggtggatagcgaacacgagatgaacaatctgctggctgccggcaagtctgtattgtgcgaaggtgcgcaggggacaatgctggacattgatttcggttcttatccgtttgtcacttcttctaatacggtctgtgcaggtgcttgtaccggtctgggtattgctcccaacaagattggtgaggtatatggtattttcaaggcctattgtacgcgtgtaggtgccggtccgttcccgacggaattattcgacaagaccggtgaccagatttgcacgctgggtcatgagttcggttctgtgacaggacgtaagcgccgttgtggctggattgacctggtggcattgaaatatgccattatggtagacggggttaccaaactgattatgatgaagagcgatgtgctcgattcttttgaaaccattaaggcttgtgtagcttacaagatggatgaggaagagattgattacttcccgttcgatatcaatgagactgttgaaccggtttatgtagagctacccggttggcagacggatatgaccaagatgcagagtgaagatgagttcccggaagaattcaatgcatacttgtcattcctggaagaacagcttggtgtgcccatcaagattgtttctctgggaccggaccgtgagcagaccatcgaacggtatacagaggaataataaaacaaacagataaccttagacacggattacacggatttcgcggcttcatctgaagaaccgtgggtgtccggataatccgtgccttttttatttattgccatgaaaacacgtcttttgtcttttttactgttgtttcttcttgtgtgctccgcacagtcgcagacttaccagccgacggaggagaacctgaaatcccgtcaggagtttcgggacaatcgcttcggtatcttcctgcattgggggatatacagtatgctggctaccggagaatggaccatgacgaacaagaaccttaattataaggagtatgccaaactggcgggaggtttctatcctgccaaattcgatgctgccagatgggtgtcagccattaaggcgtccggggcaaagtatatctgctttacatcccggcatcacgatggcttttctatgttccacacacgcttttccgattacaatattgtggatgctaccccttttaagcgggatattctgaaagaattggcggacgagtgccacaagcaaggtattcgtctgcatctctactattcgcacatcgactggtatcgcgaagatgctccgtggggacgcaccggacgtggaacgggacgaccgaatccgaagggcgactggaacagctactataaattcatgaacaaccagctgaccgagctgctcaccaattatggaaaaataggtgccatttggtttgatggctggtgggaccaggaccagaatccggattttgactggcaactgcccgggcaatatgccatgatacaccgcctgcaaccggcttgcttggttgggaacaaccatcatcaagcaccgtttgccggcgaggacatccagatattcgagcgcgacctgccgggagagaaccgtgccggtctttccgggcaggatatcagcgccttgccccttgaaacctgcgagacgatgaatggaatgtggggatataagattacggaccaggattataaatctaccaaaacgctgatacattacctggtgaaggctgcgggtaaagatgccaatctgctgatgaatatcggtcctcagccggacggtgagctgcctgctgttgcattggagcgtctggcagaagtaggggaatggatgaaggtatacggtgaaaccatctacggaacccgtggcggctgcattgctccgcatccttggggagtcactacacaaagagaaaataaattatacgtgcatattctcgaattgcaggataaggttctcttcctgccgttggaaggcaagaaagtgaggaaggcagtggggtatgccgaccatcttccagtgaagttccgtaagtgtgaaggaggggtgatgctctacttgccggaggttccgacggatattgataaagtgatagaggtggatattgaaaaataaattataaatcagaaatctttaattcttcctaaaagataaaggaaacgctggcattgctcaccgtttccttttatttttggcagactatttgttatacaataagaaacgactgatttattcacaatttaaagaaagaaaattatgggaacaggaatgatatggattatttttatcggtattgccgccgttagctggctggtacagatgaatcttcagaacaaattcaagaagtactctaaaatccctactggcaacggaatgacgggagcggacgtggctttgaagatgctgcacgacaatggcatctacgatgtgactgtgacgcatactcccggacatctgaccgaccattataatcctgccaataagacagtaaacttgagtgagagtgtttatagcagtaacagcatcatggctgctgccgttgcagcccacgaatgtggtcacgccgtgcagcatgcacgcgcatatgctccgttgacaatgcgcagcaagctggtgccggtggtgtcttttgcttcacaatggatgacgtggttgctgctggcaggtatcttgatgctgaactccttcccacaactgttgctggcgggcattatactgtttgcattgacaactttgttcagcttcatcaccttaccggtggaaatcaatgcaagtaagcgtgcgctggtatggctcagcaactccggcattacgaattcatataatcatgcgcaagcggaagatgcactccgctcggctgcctatacgtatgtagtggctgctctcggttcgcttgctaccttgatttattatatcatgatattcctgggacgcagagattaaacacatgatgcagacataaaaaacagaccatctgttcacccgaaacagatggcctgtttacattaaatagatgatgtgtctctgccggatgcatcatctgtttttttattcctgatagggcgactgccagaaccaggcatcgtcattgaccacgtacttggcttggaagaagttttctgcattagggtctgaggggcaaagcagtacatcgtctgcttttatgctatagagattcttggccatatagctgtctaaataatattctttggtaatcttctgctggttattccagttggcttcttcatttaggattaccggacgaccgtctcgcagacgttcgcgcacttcttgcacgcttagcatgatgccgttttcatccatcacccaggcattgttggtggggtctacccatatccatttatccaaggtattggaataaactacgtcaatggaatggcattcgccaatgtatttttggggtaatccgctgatgtggcgtgccttaaatcccatggacagataacaatccttcagtacatgggcaagacctccgcaatgcagacctcgcgcaccgcctttgcaagcttctgcccattttatgatgttgctgcctgccggactttcatggtttccgtcatgttttatggtattgtgtatataagtcagtatgttctttatttttgataattcgtcgcctgcgcctgccacactgtccaacttgaagtattggcgtacctctactaaatacttgttgttgggattgatgtattcgaagcgcgggagtgtatcagggcgctcattgtgggtgtatcccggtgctttttgaagaatgtcgaggtactcacccactttcttcactttggcaagcactgccttgaagcgtttatcgctgcgcaggttgtctaagtcggtatcattcatcatgtggttgtaatcttgaaatccattgtcgtaggccagttctaaatttttgatggcttcaccttttttctttaacaaggattggaagcaggctaaattgtagtaataggactgtatgagccagctgtactttttctgagtgttctcgtcttgttctttgaacagagttatcaaagccttaccgttcttttcggcttctttatagtttttctcattgacggcttgttgcagcttttgtgcgatggcttcttctttttggtcgaagtctttagcgttgtcggattgtgcccggctaacaccgatgccgcatagcaacaacatgcagaataaaatcagtctctctttcatagatgtgtaagtttgaagtttgttttggtcgtttttatgcgacggtaatgatacaaaggtaaacattctcttttcttaatcaataaaatactgtaactttgtcgtccgatttttaaaataattgaactgattatggcagcaaaaccaagtattccgaaaggaacccgtgacttctcgcccgtagaaatggcgaagcgtaactatatattcaatacgattcgtgaggtgtatcacctctatggcttccagcagatagaaacgccctcgatggaaatgctttctaccttgatggggaagtatggtgaggaaggcgacaagcttttgttcaagatacagaattccggtgattacttttccggacttacggatgaagaactgttgagccgtaatgctccgagacttgcctgcaagttttgcgagaaaggtttgcgctatgaccttacagtaccttttgcccgctacgtggtgatgcaccgcgatgaaataacttttcctttcaaacgttatcagatacagcccgtgtggcgcgccgaccgtccgcaaaaaggacgctatcgtgagttctatcagtgcgatgccgatgtggtaggcagtgattccttgctgaatgaggtggagctgatgcagattgtcgatacggtatttacccgcttcggcatccgtgtttgtatcaagattaacaaccgtaagatattgagtggcattgccgaaatcatcggtgagtctgacaagattgttgatattactgtggccattgataagttggataagataggtctggacaatgtcaatgccgagttgaaagagaaaggcatcagtgacgaggctatcgccaaactgcaacctatcattttgttgagcggaagtaatgaagagaaacttgcaactctgaaggaagttcttgctgtcagcgagaccggactgaagggcgtggaggaaagtgaatttatcctttccaccttaaagaaccttggcttgaagaacgaaatcgagctggatttgacattggcccgtggcttgaattactataccggtgccatcttcgaagtaaaggcgctggatgtgcaaatcggcagtattactggtggaggacgctatgacaacttgacgggtgtattcggtatgtccggtgtcagtggtgtcggtatctcgttcggtgcagaccgtatctttgatgtgctgaaccagcttgacctttatccgaaagaagcggtgaacggtactcagttactgtttatcaactttggtgagaaagaggccgcattctcaatgaatgtattgactgaagtgcgtgcggcaggcatccgtgccgagattttccccgatgcaagcaagatgaagaaacagatggggtatgcgaactccaaagccatcccgtttgtggccctggtgggtgagaatgaaatgaatgaaggtaaggtgacattgaaaaacatggagaccggagagcagaaaatggtcactccccaagagctggttagcgaactgaaataataaaaactgaaatacatttaaaaaggagcacaaaattgctcctttttttgtatatttatggcacaaatataggtatttgtaatagtggcgtaggaaaaatgaaacatcctgcatttatctttgtactgacaaaaaaggaggttcttatggtttctgttgagcttaagcaagaaaaacacaatgccctcgtcagtttcttgatgattgtcatagcggcattgttcctgctctatatgggcagttcattggtacattctacaaaagcgttctgggaaaattattccatagaagagttgctggaatagaaggaattcaagtcaaatcactacctttgtcggcaaaacatactgccgatgatactttattttaccgcaaccggaaactcacgctggattgcagaattgcttgcagaggctatgcatgatactgccgtcagcattgttgattgccttaagcaaggctcgatacccgcagggctgtcgacagctgacagactgggcattgtttttccggtacactcatggtatgcaccccgtgtcttgattgattttttgtcgcagctccggttgccggactgctgttaccgttatgccgtgtgtacatgcggggacgatatgggaaagggaatgaaccgcctggcggaacattttccgttggatgcagcctggtctgttgcaatgcccaatacctacgtaccgatgttcgacttggacgatgaggcgctttgccgtaagaagatagagaacgcacggcatgctgtcgcttcgattgccgaagatgtcattgcacggaagagggtctggaatgtgcatgagggcagtgctgcctggctgaaaacgtatgttgtgaatcctttgtttgtccgttttgtcattggtacaaggagtttccatgtagatgaaggctgtatctcttgcggaatatgcggcaaatcttgtccggtaggtaatatccggttggtggatgggcatccggtgtggggaaagcagtgcattcattgtatggcttgtttgcatttttgcccccggaaagtgatacagtatggaaaagcgacacagaagaaggggagataccggttggaagattatctttgccgcttcaccactcccacataaatcagcagaatgacgttcatcatcagtgcgtagataatagcaggtattgcaatgatgccattgttgaatacaaacggactactggcaacagcaattgcttgtgcggcattctgcataccgatttctataatgagtgtacgttgttctttccggttgaggcgcatggacttcgatagcactacgccgcctcccatagccagcaggataagaatggagatgcagaggcccagtttgccgaattggccggtgatggcagcatggtgctgtatgaagaagatggttgccagcaggataagtgcgggaaaggctgtcttggacaatatcttatgaatcctttctgccatttgcggacggtagcgcttcgtgaatatgccggctacaatgggaagaagcatcagaaccaggttctgcatgataaggctgcctacggggagatggatatctatgtccagattgctgtctacaaagtgtgtggcgaattccataatcacggagatagtgaacagcgtaataatgctgctgcatgccgtcagtgacacggacaatgctacgtctcctttggctatcatggagaagatgttggatgagctgccgcctggcgagcaggctatgagtatgatgccgataaagaacagaggttcgagctggaagacatgtcctaaagcaaatgccagcatcggcagtaggatgatttggcctgccagcccggcaataatggggcgggggcgtttgcggaacagtttaaagtcttcggtttgtaatgtcagtcccagttcaaacatcaataaggtaagaatggggaggactatccatattgcgttcataagtcaaatcatttttgaggctgcaaagatagcaaatattgttgtatactttgccattttgtcagcctttgtctgccaaacaatcagcttgttcgtttggcacggttttcgtaagttgtttatcgcttgtttaaagcaaaattaccattataacaaatgtataacatataaaacaaaaagattatgaacattaaaccattagcagacagagtgctgatactccctgcacctgcagaagaaaagacaattggcggtatcattattcctgatacagcgaaagagaaacctttgaaaggtgaagttattgcagtaggcaacggaacaaaagacgaagaaatggtgttgaaggttggtgacacagtgctgtatggcaagtatgccggtactgaactggaagttgaaggaaccaagtacctcatcatgcgtcaaagcgatgtgctcgctgttttaggttaatttgtaaattgtaaatcgttaaaatgtaaatatagttatggcaaaagaaatattattcaatatcgatgctcgcgaccaattgaagaaaggtatcgacacactggcaaatgcagtaaaagtaaccctcggccctaaaggtcgtaacgttatcatcgaaaagaaattcggtgctccccacatcacgaaagatggtgtaacggtagctaaagaagtagagttggcagacgcatatcagaatactggcgcacagctggtaaaggaagttgcttccaagaccggcgacgatgcaggtgacggtactacaactgctactgttttggctcaggctatcgtagccgaaggtctgaagaacgtgactgccggtgctagcccgatggatatcaaacgcggtattgacaaggctgttgccaaagtggttgattctatcaaaggccaggcggaaacagtgggtgacaactatgacaagattgagcaagttgcttccgtttctgccaataacgaccccgttatcggcaagctgattgcagacgctatgcgcaaagtttccaaagacggtgttatcactatcgaagaggcaaagggtactgatactactatcggtgtggttgaaggtatgcagttcgaccgtggttacctctctgcttacttcgttaccaatacggagaagatggagtgcgaaatggaaaaaccgtacattctgatttatgataagaagatttccaacctgaaagatttcctgcctatcctcgaaccggcagtacagaccggtcgtcctttgctggttattgcagaagatgtggatagcgaagcgctgacaactttggttgtaaaccgtctgcgttctcagttgaagatttgtgcagtgaaggctccgggcttcggtgaccgtcgcaaggaaatgttggaggatattgcagtgctgaccggtggtgttgtcatcagcgaggaaaaaggtctgaagctggaacaagctactatcgaaatgctgggtactgccgacaaggtaactgtttccaaggataacacgaccatcgtaaacggtgccggtgacaaagagaacatcaaggaacgttgcgaacaaatcaaggctcagattgttgctacgaagtctgattatgataaggaaaaactgcaggaacgtctggccaagttgtctggcggtgtagctgtcctttatgtgggtgctgcttctgaggttgaaatgaaggaaaagaaagaccgtgtggacgatgcactccgtgctacccgcgctgctatcgaagaaggtatcgttcctggtggtggtgtagcctatattcgcgcattggatgcattggaaggcttcaagggtgacaatgtggacgaaaccacaggtatcgacatcatcaagcgtgctatcgaagaaccgttgcgtcagattgttgccaacgccggtaaagaaggtgctgttgttgtgcagaaagtgcgcgaaggcaaggcagacttcggttacaatgcccgtaccgatgtttatgagaacctgcacgcagccggtgtggtagatcctgccaaggttactcgtgtggctcttgaaaatgctgcttctattgccggtatgttcttgactacagaatgtgtaattgtagagaagaaagaagataagcctgagatgccgatgggtgctcccggaatgggaggcatgggcggaatgatgtaagattgttttccctgattgcttaatcaaataggagaaccgcagtgtctttttgatagatactgcggtttttttgttctatttaccttcttgattattaataaaaagcgtgtaatattacaaaagtgttacaaaaatgattagttttcatatcttttgctcgtttttgttgttggtaaaataaaaaatcatatctttacccttcgtaaagataacctaatcaacaagaactattaacctttttaattgaagagaaaatgaacaaaaacgaaattggactaaatgctgggaaagtttggcagttgcttagcgattataccagatggagctacggttctttaaagaggaagtccgggctgaaggacaaggatttgggagccgcattggggtggcttgcccgtgaggacaagattgaaattcatcaggaagaagatgaactttatgtttcactaggggtaaatgtttatatcggataaaggaaaccgattgaatggattgattgaggagcacagatttcgcagtgcggaagcattttccgccgggggatgaaatctgtgctcctttgtttcttcatgttgcagaatattctttcctttgcacattcttttcaatgaacaaaaacagaaagactatgagaagttttgcttcagacaataattcaggcgtacatccgttggtaatggaggcgctgaatcgggccaaccgtgaccatgctgtcggttatggggatgacccttggacagaggaggctgtccgtaaaataagggaagcgtttacgccggattgcgaaccgttgttcgtattcaacggtacgggcagtaatgcggtggctttgcagctgtgtacccgcccttataattccattatttgtgtggagaccgcccatatctatgtcgatgaatgcggtgcacctgcccgcatgacaggttgtcagattcgtcccatagctacccctgacggcaagctgacgcctgatttagtccggccttatttgtgccatttcggcgaacagcatcattcgcagcccggagccatttatgtttcgcaatgttcggagctgggcactgtctataagccggacgagttgcgggctttgacggatttggcccatcggcatggcatgtatgtccatatggacggagcccgcctggcaaatgcttgtgcagccttgaatcttggctttagggaactgacaatggattgcggaatagatatcctcagtttcggcggtacgaaaaatggactgatgttgggagaaagcgtggttgtctttaacccagctttgaagaaggaagcttattttgtgcgcaagcagtcggcacagcttgcatccaagctccgctatctgtcctgccagttcactgcctacctgacggacagtctttggctgaaaaatgccacgcatgccaaccgtatggcaaagattctttacgacggattgaaggagttgccaggtgtgcattttacgcagaaggtggaaagtaaccagcttttccttacgatgccccgtccggtgattgacgagctgttgaaggactatttcttctacttctgggatgaggccatccacgaaatccgttttgtaacctcttttgatactacggaagaagatatcgagcaattgctgcaatcggtaaaaaggcttctctgaaatatataaaagctcctaaccttcacaggctgggagcttacttcgaaactttcccctcttgggggcaggggaaggtttactgaaaacaaaccgattgaatatttaccttaaatacctttgtacgataacctttttaactaaccttttcaataaatccttgttagagtatgcttatataccgacagcctcgcggaccggtacaaaagtgtagccttttcgtttcagcgtcttaatcattttgtccagatagccattatagaacttgtctgtgcggcggtcgtccgttccgaagtgtatcagcatcaagtgtccgttcagaccttctttcttttccacctccataatcttgtcgtagatgaatttgctgctccggtacttctgtcccatgtccggagtggtgtagtcggcattgctcatggtaccaggggtatagttgataacttgaatacccatattctttgcccaggcggatatttccttgttatagtattcgtaaggaggaatatagacgggagcgtccttgtattcgatacctgccttgcggagggtctcgtagcttttcatcatatcgttctcaaactcttctcgggtgaccagcagagaatcacggtcttcccacggcatgtacaaaagatgtccgtaactgtggctgcctacaaaatgcccttcgtcgagtaggtgtttcactacatcgggatagagttcatagaactctccggtaaaaaagaagctgcctttgatgccatgcttcttcaaggtgctgatgatggcatcggcaccgtctgctttgtcggcggcagtgaatacgagggtgatttgcttttttgagggatcggtgcggataatgcctccgtccacatatacattcttgtcatttgggataccggcttgcttcattccatccttctgcatggcagagaggtagtacgtgaggcaggcggttccgtccatggtaggctcattggtggaatagtcgtggatggcgtcgtgatataccatcaggtctggctggaagcgttcatagtcttgtccgggagttccgggaattcccgtcatgttgacaccgcgcaggctttcgaagatggtacgatagacaggaccgtccaccagtccgccggtagtattgcccacgcctgcattcagcagtgaggagtggggttgcgagggatagtctccgtaaaggggaagttccacaatcatgctggttccccaagggttacagccgaacagccagtcgcgcagggaggcttccatttcggcgtatgtgtcatcgccggtggtttcacggtacagccggcattgggtcagcatggcggtagtcagattgttggaacaccagatgtagggtataccgtgcagaaaggggctttctaccgctttctcgtacgtgcgttcaatgcccgtacgcatgttgcggatgaattccttgctgatgcggctgttgtccactttggcaagatggtagtgccccatgttcatgaacggataccattggtagtggcgtgcactgtcggcgcccatccaaggagtcaccggttcgcgacgtccgtattcaagggcttgggccaggtatttgttgtcgccggtggctttgtacagttccatggctcccagttccatatcgtccacccagttgtcctcttcgtaaatgtagggagacaagacagaggcagtctggcatgctcccggtttctttacgccttcctgataggcggcatcggccttggcttcgatttctgctgcaaatttaggatagtagtctttcagtatcttggcgcctaaagcgaagcaggaggcaaacttgccggcagtgcttgccactccggtcgttgcattcttgaactctccacgtacttgcggttcgccactgcaaaagtaaacggggcgtcctttacccggtccgtagccgtaatccaccaggtctttgttaggtaggcgcattccggcatggtcacggtcgtcggctatctggttgtacagctcgcccggagcaggattcatccggttcagccagtccagtccccacttgatttcgtccacgatgtcgggaatgccgttggctcccggatgtccggctgcatcataggcgtcaccgaatgattccggattttcctgataggcaaacatcatctggtagatggcattggcggaggtggtggtgtattgcagatagtccgtagcatcgtgccagcctccgcggacgtctatatgttgtccggttttggtgggatgatagacgatgtagccgtcgtgcacgtggcagctgtctttcaggaacggattatagccgcagcgttgctgccgcatgtagtgcagcaggtagtctgcggtaccgttgtagacttgtgcattgatggggaaacggggggagaccgctttgcctgctttcagataatacgtgcccggttctgtgaaatcactgaagttcaaccggtaggtactcttcatgcctcccatcttgccggtggccttggccgtgttgaaggtacgcaccacctttccggtgaaagcgtcaatcaatgaataattttctacgtttgttccttcctcgctcatgaatacagcgactttgacggattgcggcaaatagccgagttggttgattctgatccattcgcctgctttgcccggcagggctacgagagcgaatattaccgttaggagccaataattacttttcataatgggggtttttaatctaaggttggggattatatataaaacaaattttccttattacaaataaagcattttctgtcaattttaggaagatttaggatgaataattagacgatattaggtgtcgtttacactattttggtattttatagacgtgaaataagtgtctggttgaaactaaatgtttgtttatcacgtaattattatgcttgatgatgctttttaattttcgtttacctattttagtaatgcgtaaaacaaattggcgtgttatttgttttatggtatttagacaataaaactaatagactatggcttatattgattactatcaggtccttggagtggacaaaaaggcatctcaggatgacatcaagagagcgttccgcaagctggcgcgcaagtaccatcctgacttgaatccgaacgatgctacggccaaggataagtttcaggctatcaacgaggcgaatgaggtgctgagtgatcctgaaaaaagaaagaaatatgatgaatatggtgaacactggaaacatgccgacgagtttgaagcgcagaagcgggcacagcagcaagccgggggcttcgggggatttggcggtgccggttttggaggttccggtgcgggatttggtacggacggaggcggtacgtattggtattcttccgacggccaggaattttcgggcagtaatgccggtggtttctcagacttcttcgaacagatgttcggtcatcgtacgcgcggcggaggcggtgccaatgccggtttccgcgggcaggattatcatgcggatttgaacctctcgcttcgtgaggctgcgaagacccataaacagatattgacggtgaatggcaagcaagtgcgtattaccattccggccggtgtggccaacggacaggtcatcaaactgaaaggctatggtggcgagggcatcaacggaggtcctgcaggtgacttatacatcacgtttgtgattccggacgactcggtattcaagcgtttgggagatgatttgtatgtggatgtgaccgtcgacctttatacagccctgctgggtggcgaccagttggtggatactttggatggtcaggtgaagctgaaggtgaaacccgaaactcagaacgggactaaggtacgtctgaagggtaagggcttccccgtatataagaaggagggacagtttggcgatctcatcgtgacttattccgtgaagttgccgacaaacctgacggaacagcagaaagagatgttccgtaaaattcagagtatgaactaatgaaaggagaacggattatgcagaacgaatggattgtcatcagcgaatattgtgacaagtgtcatatagagcccacttttattgatatgctgtgcgaaagtggactgatagatgtggagcaggaaggtggagagcgttatctgcctttctccgagttgccggatgtggaacggtacagccgtatgtactacgacctttccatcaatatggaagggattgatgccatccaccatctgctggcaaggatggaagagatgcagcgggagatacactcgctgcgcggcaggatgaggctgcacggagagtattaattttcctttcgtctctttgagaacttttgtccttttaagaaggggcaagcaggaggaagtatttcagaaaaaacaagcgggcaccggagtagctaaactccggtgcccgctatatttgccttgtccaagcaatgcgtttatttgcggtagctttccagctcttctgccttgaacttacggatgaagttaaagtgtttttccacttcagcttctgcgtagttcacatacaccagagccgacttgccgaacagttcgggagcctttgtcgcgtcctgaatgatgaggtgcgacatgatacataccgcagccatctcatagaggcgacgtgccacgaagtccagcaattcctgattctgtgcctctttcaccgcattggtgcaggcttcgaacttgttggtcatctctttgatgcggtccatcaacggttgcatttcttcgctgcacggcacttgctcgtagtcgcgcaaggtggcagagtatgagccgtttgttacatagcggatagcagctacggtctgcaactgagtagtaccttcgtagatagaagtgatacgtgcatcacgatagatacgttggcaagcatactccagcatgaagcccgaaccgccgtgaatctggatgctgtcgtaagcattctgattggcatattcagagttcataccttttgccagcggagtgaaggcgtcggcaagtttggcatacttcttttgttcctggcgttcttccggagtcagtttgcgttcgcgagcaatgtcgtccagcgctttgtagatgtcaacgtagcgggaagtctggtacagcaaggagcgtcctgcatccaacttggctttcataatagccagcatgtcatatacagccgggaattcgatgatagccttgccgaactgcttgcggtctttggcataagccagaccttcgttgtaggcagcttgtgaaaggcctaccgactgtgcggcaatacccagacgggcaccgttcatcaaagccataacgtatttaatcaaaccaagcttgcggtcgccgcaaagttctgcctttgcattcttgtaaaccagctcgcaggtgggagagccgtggatacccagcttgttctcgatgcggcgcacgtctacaccgccttcattcttatcgtagatgaacatggacaagccacgtccgtctttggtaccctcttctgaacgtgccagtacgaggtggagattggcgtcaccgttagtaataaaacgcttcacgccgttcaggcgccagcagttgttggcctcgtcataggtcgctttcagcattacgctctgcaagtcggaaccggcatccggttctgtcaggtccatagacatggtctctccggcgcagacacgcggtataaaacggctgtgctggtcttcgttaccgaattcgtagagcgtttcgatacagtcttgcagtgaccagatgttaccgaaaccggcatcggcggcggcaacgatttccgcacacatggtgtacggagtaatcgggaagttcaagccaccgaaacggcgcggcatggtcataccgttcaatccggcttttaccatggcgtcgaggttctgcttggtgccgctggcatattccacacggccgttggcacagtggggaccttcttcgtccacgccctcggcattgggagcgataatctctccagtaatctctccggtgatttcaagtaccttgtcaaaagagtccatagcatccgcatagtcctgcggggcatagtcatacttgtctttgtcttggtaaccgcgttctttcagttcgcagatacgttccatcatcgagttgttcagatgatacttcaattcgggaacttcggtataaaaatttgccataatttcttggttatttaggtattctgaagtataggggtatggtgaatttcactcgcttggcctctccgtcctgatagccgggcgaccagcggtagacgtcggcaatggcctcgaaagcgcgtatggcttctttgtcgatgtcatagcgcacggactggagaatttggggatgggtcatcttgccttcttcgtctacaacgaatcgtaggattacccttccttctgccttttgcttccaggcgtcttccggatatttggtaacattggccaccagtttcatgaggttctctattccaccggggaaggatggaaacatgaaatacggctgatgttccatttcagttccgtgctcgtcgaacatctttccaccggtacactgattctctgaatagtgttcctctctacggagtttcccgtcgggatagtactgcaggagtgttccgtcaagtttaccatcgctgtagctccgggccagatgtatggcaccgtcgggataatacaccatggtctgcccctccaggcggttgtctctatatacttctgtcaggctgtccttgccatttgcatagaatgatgtatgcaggccttcccttatccttttgcggggattgcttttgtattcggagaaatgccagacatccttcttttgtccttccaaagcatactcttccaccttgatgcacttcttgtttatcttggaaacaagagcatacttgactgcctggatggagtcgtccgtccattggtaattcttgtccaaccagagcttttcttgagcgatagcggaagatatacctgaaagaagaacaaatataagaatcagccctttcatgattacctttattgttatttactgtgtgatttataatattttatcatcttcgggataacctcttccaccgtaccgttgatgacatagtcggcaatcgtattgatgggagcgttctcgtcattgttgatggagatgataataccactttcctgcataccggcaatgtgctggatttgtccgctgatgccgcaagcaatatacagtttggggcggacagtgacaccggtctggccaatctggcggtcatggtcggcataaccggcatcgacggcagcacggctggcgcctacctctgcatggagttctttggcaagctcgaacaacatgtcaaaaccttccttgcttcccatgccgtagccgccagcaatcacgatgggagcgcctttcaggttgtgttttgccttttctacgtggcggtcgatgacttttaccacataatccgtctcgggcacgtacttggcaacgtcgtggttgatgacttcgcccttatagtcagcgtccagtatctctttcttcatcacaccttcgcgaacggttgccatctgcggacggtgctcgggattcacaatcgtggcaacgatgttaccgccgaatgcgggacggatttgatacagcaggttctcgtaaaccttgccttccttcttgtcttcgtggttgccgatttccagtgaggtacagtcggcggtcagtccgctggtcaaagcggaagaaacgcgcggaccgaggtcgcgaccgataacggtggcgcccatcagacagatttgcggcttttcttctttgaacaagttgatgaggacagaggagtggggaagggaagtataggggaacaagcccggagcgtcgaatacgtggagtttgtctactccgtagggtaatacttgcttttcaatgcctgccagattgcttccggcagcaactgcctccagttggcagcccaactgattggctaatttacgacctttggtcaagagttcgagactgacgtcggcaactgttgtgccttctatctctaaatatacaaatacattattcataatcttatcctatcgtatggttggctaacagttcaacaatcaaatcttccacatccttgtcgctgcccgtcagcgttttgctttctttggcctggaatgagatgttctgaatggtcttcaccttggtaggcgaaccgctcagaccgcattgtgcaaggtcgccgttcacgtcggcaacactccattccgtgatgttcagatagggatatttctcgtagaggccggcgtaggcaagctcagcgccttccttggtgatggcagctttttcctgggctccgagggcgcgtttgtacttctgcaccagtttggcattgcgcgggcggcagggagcggcacttccgtttacggtgatgactatgggcaggggagcctcaacggtttccacaccaccgtcaatatgacgtttcacggtaatcttcttggcggctttatccacgttcagaatctcttctgcgtaggtcacttgcgtcagccccagcttttcggcaacctgcgggcctacttgggcggtatcaccgtcgatggcctggcgtccgccaatgatgacgtcatagtcgcctatcttcttgatggctgtggcaagggcatacgaagtggcaagcgtatcggcacctgcaaaggcgcggtcggtcagcagatagccgttgtcggcaccacggtaaagtccttcacgaataacttcggctgcacgtcccggtcccatggtcaggatggtaacggtggagcccggatgttcatctttcagtcggagagcctgttcaagagcgttcaggtcctcggggttgaagatggcagggagtgccgcgcggttgatagttccgtcggctttcatggcatctttcccaacgttgcgtgtgtcgggaacttgttttgccaatacaacaattttcaaactcatgctattaattattagtattagtatttctttgtatgtcagtaccgggaataggagtagtagaatcctgctactgaaattggccggttaactcattatcagcctgcaaatttacggaaaatctctggaatatccgccgaattgcagcagattaacgcaacaggatttgataattagggagttagaagaaaaacgcagaagttgggcagacagttgaaaaccgtcttaaagcagattaaagcaaaagaacggtttcctaatcattacccgatgaaagtgcagatttaacaatccctgtttcattttgcggcgttctgcgcagctttgcttatcaataggtaactcgttgatttatagttttgcaaccaaaaagaaacgagtatggcaagaagcacattcaaggtgctgttctacgtgaacggcagtaaggaaaagaacggaattgtccccatcatgggacgagttacaatcaacggaacggtagcacagttcagctgcaagcgagctatcccgaaagagctttgggatgccaaagggaacaaggcaaagggcaagagtatggaagcgagggaaaccaatcttgcgcttgacaacatcaaggctcaaatcatcaagcattaccagcgcatatccgaccgtgaagcctatgtaacggcagaaatggtacgcaatgcctatcagggattgggcggtgagtatgaaacgttgctcggtgctttcgacaaggaaaatgaagtgttcaagaagcgtgtcggaaaagacaggggcagggcaacctatatggcaagggtacgggcaagaaaccatgtggcggcattcatcaggtcacattacaagcggaacgacatctccatgcctgaacttacgcccgacttcatcaaggagttcgccgtgttcctttccaacgaagccggactgcacaacggttcgatatgggaaaactgcatgtggctgaaaggtgtggtgatgcgggcgcatttcaacggacatataccgaggaatccgtttgcccagttccatataagcccgaacacgaaagagcgtgaatatctgacggagaatgagttaaaaacattgatggaatttcagttcaaagaccccaagaactcctatctccgtgatatttttgttttcgccagttttaccgccctctcattcgtggatataaaggaattaagcaacgaccagattgtggaagtgaacggtgagaaatggattatttccaaacgacacaagacgggtgtaccgtttcaggtgaagctgctggatattcccttgcagataatcgagcgttacaaggcttttcaggaaaacaatcttgtattccccaatctcaactattggtcaatatgcaagcgtatgggaaagatgataaaggaatgcggcatcaccaagaaaatcagctttcattgctcaaggcacgggtttgcgaccctggctctcagcaaagggatgccaatcgagagcgtcagccgtattttggggcatacgaacattgagaccacgcaaatctatgcgaagataaccgtgcagaaattggataatgacctcacgatgctgggcgacaaactgagcaaatcattcggaaacgtgaaaatggcagggatatgaaacgggaaataatcacaacggacagctatggtagaattaccataccatccgatacaggtaatatatggatgaatgaaatggagctggtagagctgttcggggtaatcgccccgacgctccgtgccgccattcgtgccgtgtacaagtgtagagtttttaatcctcttgaagctgaaaaacgtatcaagctgcccaacggctattatgcggacatgtatgccttgccgatggtggtggcactcgctttccgcattgacacgtcaggtgccgcaacggttcgcaatgcactgctggaaagattgtgccgccgaaaagaaaaacaagtcctgctggtgtcaatgaataacaggatgtcgaatgaatgttagaatgaactttttatgttcagccatttgatgattaacggtttaatctgacgtagtgacgacatgaagtcattaaatccgttaatcagtgcgtcagtcaatctgtaattatctgcaacaaccagtccccgaagaagtgcatattccacgacttcgggcttttttatctccttttacctgaaagagccacccgtttatactgcattttctttttgcatgacctgttttgcgccgttccgcatagatttgcgtatcaagattttaccgacacttccgtagctttgcaatcatgtttaacccgttgccgacagaatgtaggcagcactaaaacctgtatcaagaacatgaagaaaaaaagaaatcatttgcgtaggtacaactctctacaagattgtaaatcgggattgtcattattcaccgataagaggaataggacgttactacacaataaacaaaacacaactggaaaaattctgatattttgatgaaatgatgaaagtatatataaacataaagagaaacagcaacttacgtcttcatcaacctttcaacaagagaatcgggctgatgaaaagagaaaggacacaccgcactctacatcacttttcttttggcgagcggtttgatgaaacaatgatgaatgtatatcattatggttatcagtctattatcctatcaactcatcaattcatcggatttttatccaccaacaagtctgccggacatacgaacggaaggaaatgccactatccgcaggctggtctgacatccgacctacctgctgtccgaccagccgacaaggaaaggcgtatcatatcaaaaggtctgcctataccgctggtactctcacaggcttttgagaacagaaaagccatagctcattagggcattttctttacgcagtgcaagcacagctaaaaacgccccaatgagccaacggggttacacccctctggacacccccgtttgccatgcggcatgaccgcagcagacgggaaccaacaaaccaatttgtcaaacctgaaaacgaaaaacaagcatgggatatataagcattcaaatcaacaaagcgaaaggctcggctgacacgggcgcatccgaccacatagaacgtaagaccatacccaagaacgcagaccctacacgtacacatctcaaccgtgaactggtggagtttcccgatggagtgtccgaccgtaccgaagcaataagccaccgtatccgtacggcaggcatcaaacgtaagataacccccgaccaagtacgggcaatcagaatcgtgctttcgggtacgcacgaggatatgatgaaaatacaggacgagggcagacttgacgaatggtgtgatgacaaccttcaatggcttcatcgcaccttcggcaaggaaaataccgtttcggcagtcctgcacatggatgagcacacaccgcacattcatgccactgttgtaccgatagtaacaggagagcgcaggaaagccaagaaaaagcagacggaaggtaaacgctcgtaccgcaagaaagccaataccgtgcgcctgtgtgccgatgacgtgctgacacgtgataaactcgttgcctaccacgacagttacgcaaaagcaatggagaaatatggcttgcaacgtggtgtgcgtggctcggaagcacgccatacgacaaccgcccaatactaccgtgatttgaaacggcatacgggagaactggaagccaacgtgcagcagttgcagaccgaacagcgacaggcggaacaacagcttgacgaagtgaaacgggaaatcaagtcggagaagctggaagccgccaagacggaagctaagaccgcacttgtggcaaaggtcggctctcttttcggcagcggcaaactcaaggagttggaagccgacaatcatgccctgcaaagcgaggttgcagcccgtgacgagagaatagaactattgcagcaacagattgagtggcagcaggaggaacacaaccgccagcttatggaaatgcaagccaagcatcggaaggaaataacggacaaggaagcggaacaccaaaagaaggtatcatttttgaaatccatcatttcaaaagcccaaacatggtttccgctgttccaagaattggtgtatatggagaagttctgccttaaagtcggtttcaacgagaggcagaccgctacgctcatcagtggcaagccgctattctacgagggcgaactctattcggaggaacacaaacggaagttcaagaccgagaaggctggcttccaaatggtgaaagacccgaaagacagctctaaacttgcacttgccatcaacgggcaattgattggtgaatggttcagggagcagttcgataggctatacgcatccatgcgaaagactgtcatatcacctcgaagcaggaaaagtcttcgacaataagagttaatttgcttaaacctaacgggaaaggaatagtctaataattgattaggttattccttttcgctatttttgtcatattatcaatgtatcgtgtcatgaaaagattcttcgccttcatacttttacttgcgaccgtctgtgttgtccaagcacaagaaaacaccgttcagggagacacgcttgtcttattggaaaacaaaatctggcgggcaaaattgccggacgaaaaacaatatgtcacggaaatggagtttcgcgaccatgtttggaggtctacattcttgtacaaggggaaaacagacacgattgaaacctcctacgggatatgcggtgataccatcaaaacgtatgaccgtaaacaatataaaatactcgaactcacagacagtacactggttatcctttacttgccggaaaggatgacaataggtgttggggcggtgaaatacatcaatatcgttaattcgcctgcaaagatgcgtgagaatgaaaatcggctggacagtatctggcgcaaagaggacatctggaacaagggcattgcctcaatatccggaaagccaatcaaagacttgtcaaccatagagcctccccgatgggcgaaatgggattacgatttggagaaatattacacttcccaaatggtttatcccgaagagctattgaagaagaaccaagccggatattccgtagttatgttctctatcgatacattagggttatcgcgcggcattaatatattgaccaccatacataaaaaattcgacaaagaagttatccgactgacaagggaattgccgcattgcttaccatgcagggataaggacggcaagcggatggaatgtttctatacggtgtatgtgcctttcttgccccaacactatagggataggataaaggcggacagcattgcggaagaagaattgaaacagtgcttcgttgaatgggaaacagtcgcttatttccaagaagcgaagccgtggtctgcacaagagtatatcacccaacggctggtatatgacccagcgctgttgggggacaagaagcaggtgagaggcatctatacggtgcggattaactcgtatggggaagtatatgaagccaaaaccctgcgaagctgtagcattgaagattgggataatcaagtattgaacatcatcagaaagatgccccgctggatgcctaccatcaattactacgggaaaggagaatatagggaatctgtatggactatacctataatttttaagaaggacaggtgtttgattgcccacacaactgaagaacgtcttgaggtcgatgtccctatatgctatttgaatgaacaaggcgataccattgtgccatacggcaaatacaaattctgcgaaacagacactatacgggacatcggttttgtgtatgagaacaagcaggacgcacggattgtttgcataaacaatcaaggccaagaattgttctctgtgttcaaatgcgataacggacccgattatatccgtgaaggacttttccgtatcacggatgagaacgaactgataggttttgccgattctttgggcaatgtagtcattgaacctcaattcaaatttgctttcccattcaagaacggcaaagcaaaagttacatttacaggagaagagaaagcgatatttgacggagagcatcgcgaatgggtaagtgataaatggcaatatattaacaagaaaggagagattatacaatgagaactataattttagtagcaatgttatcaagtgccgtttgcctgagttgcaccaacaagcggcaacagttccagccggaagcaacaccggacaaagaattggctatcattggaggaaacgatacggttacaagcatccaagttgtatcagcggataaagacaccgtcatctatgatacgccagagtgttacctttggtatgtcgaagatttgtcggacaagtacaaagacaaaccagtttccatgtggacggaatgttctgtttatggggagaatgtacaaatcgttaatgtgttcgttgcaaacccgacacctgtttcgctgatgtatggaagaggttggaaattagaacaatggaacgggaaagaatggggtatagctaaaacaaaaggtgacagaagttggtttgatgatgggtttaacaagcaaaaagcacctttattgtattgctttcgtttccccgtcggcaggtactattatcttcccaaagggaaataccggatatgtaaatcgttctccgcgaaaagagagtatatagaattaagtgcagaatttgaaatcaaatagctttatgaaaacaagattatcagtattcattatcagtctattggcaaccttttccttgcaagcgcaaaccaatgaacggtacattgaagtgacaggtacatcggaaatagaaattgtacccgacagaatccattatctgattgaaatccgtgaatacttcgaggaagaattcgacgggaaatcgaagcccgaagaataccgcaccaaagtgcctttggcagagatagaacaaggattgagagaagccattgcccaagcaggcatcccacaaaatgctatccggacagaagaaatcggcgattattggcggcagcaagggcaggacttcttggtttccaagaagtttgatattacactgaccgacttcaatcagataaatgaaatcgtcaagcacattgatacgaaaggtatccacaccatgcgcatcggtgaattggagaacaaggatatacttgcctatcaccaaaaggggaagattgaagcactgaaagccgctcaacggaaagcaacctatttggtggaggcgttgggtaagagactgggtaacgtgatacgtattgtagaagaagggagcagcaataatatgttcccgtttgcacaaagcaatgtcctgtcatccgatgcttcttcattcgacaacttccgcaccatcaagaaaaaatattccatgctggtacgttttgaaatcattgattaaatgtaaggcggacgaaaggaaaatgccatattcttcttttcgtccgctttatttgtgtatatttgcatccgtaagagttacccaaacaagcaaagcgatgcagaccacggcaattagaacggttgccaaatcattaccccaaaacaaggtaatccttctaacttgtttaatatcaaatagctatattccttatacagatttacagaaagagttgggtttgacaagaaaatggggtgaaaaatgcacaagttgagggattttgcgcaaatatcagttggctctatatctgtaaaaaaggtaataaaaccggtaatttatctacctttccgttcccgtttcctctgtacttttgcagcgtccggatgaggcctgcacgacgggcggcatcggataaacaagcatcgctacttaaatgttattatagaatatgtatattgaaaaagtaaattcccctgctgacgtgaaaaagttatcagtcagcgagatgaacggattaggtggagaaatccgccaggtgttgttaaacaagttaagctctcacggaggacacgtaggtcccaacctgggaatggtagaagccaccatagccctgcattacgtgttcgattcaccaacggacaagatagtctatgacgtgtctcaccaaagttatacccataagatattgacaggccgccgggcagcgtttatgaatgcggacgagtatgacgaagtctccggatattccgaaccgtcggaaagcgagcacgacttcttcgtcattgggcatacctctacctccgtcagtctggcaagcggacttgccaaggcgcgtgacctgaagggggaggcgggtaatgtgattgccgtcatcggcgatggctcgttgagtggaggtgaagccttcgaaggattgaatgtaggtgccgaactgggcacgaacttcatcgtcattgtcaacgataaccagatgtccattgccgagaatcatggcgggctataccgcaatctgcaacagttacgcgaaacggaggggcaggctccctgcaactattttaaggcaatgggatatgattatctctatgtgaaggatggcaatgacgtggagcaattgatagaggctttccgtgaagtgaaggacaagaagcatccggttgtggtacatatcaataccttgaaaggtaagggatacaaattggcggaagagcaaaaagaacgtttccattacagtgttccgttcgaccttgagaccggcaatctgaccggtgagcctggagaggatgaagactatgccgaccttaccgccgattatctgttgcaggagatgaagaaagacccgactgtggtaggcatcaccgcaggcacacccacggtattcggctttacaccggagcgacgcaaggaggctggtcgccagttcatcgatatgggcattgccgaagagcaggctgttgccatggcttctgccattgctgccggaggtggaaagccggtattcggcgtctacagcacctttatccagcgcgcctacgaccagctgtcgcaagacctctgcatcaacaataatcctgcactgattcttgtcttctggggaagcttatcgagtatgaatgatgttacccatctttgtctttttgatattccggtcatcggtaatattccgaatatggtttatctggcacctacttgtcgtgaggagtatatggcaatgctggagtggggcatccgtcaaacggaatatccggttgccattcgcgtgccggccaatggggttgtccgcaggaatgtagaaccggagaaggattacggcaagacgctgaaccgttatgaggtgtcccatcgtggagagaaggtcgccatattgggactgggctctttctatcagttgggcgaagccgtggctgcccggttgaaggaagagaaaggagtggatgccacgcttgtcaatcctcgctacatcacgggtgtggacgaggctttgctcgatgacctgaagcgcgaccatacactggtcattactcttgaggacggagtgctggacggtggctttggcgagaagattgcccgttactacggtccgtcggatatgaaggtactgaactatggtgtgaagaaagagtttatcgaccgttacgatgtggaggagcagttgaagaagaaccggttgacggttccgcagattgtggaagatatctgtaggatttggtaagaattgaaaaaggagatgcatcaaactgcatctccttcttttatttatttaatacccagtttcttggcaatatccttaggcagtgcatccttgtgcacaatgatgttcattgttttatagcgcacgaaagctttggaagcataccacagtcctttgtactttccggcttcaccccaagagttctttaccatatagtattcgttgccttcctggtctttggctataccgtaaatcagcataccgtggtcgtcagtagtttcccagttgtcgtatgccagctggcgctcttcttgtgtgcaccacttctgcggttgaggcttgctgttcagtttcttttcttcgggtttcattttcagccagtgtgccatgtccgaaccgctcagttcttgcaccttttctgcatcgggcattacggctataccgtcgcgtgtgaagccttgttcgcttacgtcactaccccatgcaatggtgtaacccttattgatagcgttgtcaaacacttccatcaactcgtcgataggcaagttgtaggaagaagcccaacgccagttgtcttgtatttccaggacgaacggctggtagaagggatggtgggtataggaagtcagtgagatatagtcatctgcattcagtccggtagattcatagaaagacttcggagtatattccttgcctttgtaggtgaacttctcgggacgttcgcccagatagatgtcgtggatggcagtgatggccttcttccaaagcgggttattttccttgtctgcttgcaggctgcggtgtcttcccttggcaatggctgccactacggcatcagatacggctgtcaattcggtgtggttgctcagcgtgtcgccatacataacgcccggacgcatttcctcttcgggcaccagaccgaaagttttcataccataaattacatcgtagaacgaaccgccttgtgagaacgaaacgtcaccatgtgtacgcactgccttgtcggcacggtccagataggtgttgtgtacgataaacatttcagaaaagtcgtattcgcctttgcccatgcggagcagttcggattcgatgaatgccagtccggaatagcaccagcatgtaccggcacggttttggttcttaacagaagtgataggattttcttttacggttgtaaaaatgaaaccttcctctttcggagtgtcttgtgctattgtgtttaaacttaataaacccaatgcagccatcagtattgatttcttcatcataattaaaatgttatagatttatagttgcaactgcaaatatagatagaatatcgtaaacaaaagctatctttggagcgttaattctgacacttatggagaaaataatacgtatcgacgaccatagcggtcttgttttggagggcggcggtatgcgcggcgtcttcacttgcggtgtgctcgacagctttatggatcgtggcattcgctttccctataccatcggcgtcagtgccggagcctgcaacggactttcttatatgtccggtcagcgcgggcgtgccaagtacagcaatatcgacttgctggaaaaatacaattacatcggattgaagtatctgttgaagaagcggaatatcatggatttcgacttgttgttccaggagtttccggaacacatacttccctacgactacgaggcatactttcattgtcccgaacgctatgtgatggtaactaccaactgcgagacgggcgaagcgaactattttgaggagaagcggagtaaagagcgcgtcattgatattgtgcgtgcttcgagcagtctgccgtttgtctgtcccattacctacgtggacaacatcccgatgctggatggaggtattgtggacagtatccctttgatgcgtgcccgtcaggatggatttaccaataatgtggtggtgttgacgcgcaatcatgggtaccgtaaggaaattcagggaacgaaggttccaccttttatatataagaaatatccgctattgcgtgaagccatcaaccgccgcagcattgtctataatcaacagttggagcaggtggaacggatggaagccgccggggaaatcgttgtgatccgtccacagaagccggtagtggtagaccgcatcgagcgtgacatcaagaagctgacggagctttatgaagaaggataccggtgtgcggaacagtttgcttttcgtttttgattctgagagagtatactatgagagctggtgcaattagcatctgctcccatattgttttcattcttttctattaatttgctgctaaagctaaagtttatttagcaaaaaacacgcgtagaatacctttagaaaggggatgtatcaaaaataccacctttcgtaacatttgttataggtgcaaatcctggtttcgcttaattttgctgacacaaaactcaattgcagaattggtttattattaactttaaattaatagatatgttgaaaagcattagtctcaggctttgcacactaattgtgcttctttttgtgggcattctttcctttgcccagcaagttcaggtaaaaggtactgtcgttgaaaaatcgagtggtgaatccattatcggtgcttctgtcatggaagtaggttccaacagcaatggaacaattacggatattgatggaaatttcacgctgtctgtaacttccggtgccacattgtccgtatcctatataggatataaaaccgttacagtaaaggcacagcccactttacgcattgagttgacggaagattcccagttgattgatgaagtagtggtgaccggctatatgtccgagaagaaggccagtttgaccggttcggtggctgtggtcaagatgaaggatgtagcagatattcctacgggaaatgtgttgtcgagcttgcagggacgtgttgccggtatgaacattacgactgacggcacaccgggcggtggaaatacttctacattggtccgtggtaagtcatctttccgaaatgatgccaattccccgctttatgtcattgacggtgtgatgacccgtgagaacatctcgtctatcctttcttccaatgatgtagaatccattcaggtcttgaaggatgccgcttccgcttctatttatggtgcacaggctgccaatggtgtgattatcattactaccaaacgtgccaagaaaggggagacccgtgtggattttgatatgtcgttgactttgcagacctatcaatgtggctttgatatgttgaatgcagatgagtggggccaggtttattggtcggcttataagtatgccaataatggagctacgccaagcagcgaaatatatggtaatggtgcaactccccaacttcaagactatatcggcctgaatggagctaaagtacatgccgttgatacggattggcgcgatgtggtttatcgcactgccttgatgcagaattacagtgcgacactttcaaagggctctgacaatggtgccttctcgttagcgttgaactatctcgaccatgacggtctggtagagaatacgaatttccagcgtatcaatacccgcatcagttctaactatcattatcttgacaatcgcttgcgcatcggcgagaacgttgctatcaatcgttggacacagaccctcagtccggccggtgtagatgagaatgccatcaaacagcatcctgccaagacggtttatgatgagaatggcaattataacgatgccatcaatgatgttttgggtgatgcccccaatatggcacgtttgttggagaatgaaaaacagaacaaacatgattactggcgtatctttggtaatgcattccttgaaattgaaccgattaagaacctggtgctgaaaaccaatttcggtatgaattattatgatgaaaccaacaaaacttttgagccggcatgggcacgcgatgaggtcaataagctgactcaatcatccaacaaaagactggattgggtatggaccaataccgtgacttatagcaaagcttttggaaagaacaatctgactgcacttcttggtacagaagccaagaagaaccattcggaatccatgttcggttatggtacgggactggctgtagaagatgaagattatatttatctcgacggtgtgactgccggtaagaatgtaggtgccggtgcttccaattatggcatggtgtcttactttggtaaagtgaattatgattatgaaggacggtatctggcttctgttacggtacgccgtgatgcttcttcccgcttggcaaagggtaataatgtggattacttcccttcagtgtcggcaggctggcgcatttcaagtgagaagtttatggaagcgaccaagaattggttggcagatttgaaactacgtgcttcatggggtatcaatggtaacgatattattgataatgagtccccctatactaaatacttgattagtctgaaggatgcaagctacaacatgaacggtgatggaacgactttggctcccggtggttacaaagtgaggtctaccaatcccgatttgaagtgggagagtacaagacaactcaatattggtgtggacgccgctttcctgaatggacgtctgagtgcttctctcgattattttgataagaagacaagtgatatgcttgtagagaaaccgtatattgctgtcattggcgagggtggttactgctggtataatggtggtacgatgaacaataaaggtttcgagatggcattgacctggaatgataaggtgaaggatttccagtataatgtagcatttaacctttcatattacaagaatgaagtgacagagctgtcggaagaaatttactatacttatggtggcggtaatggtgttgacaagaccttggttggtcaaccgttcggttcatggatgggcttcaagacagatggagtgttccgtacccagcaggaggtggatgagtataaatccaaatataatgtacagtttggcgctcccggagtaggacgtattaaatacgtggatgctgatggtaacggtacgattgatacgaatgaccgtgtatggttggggtctgacaatccgaaagtgattgcaggtctgaatcttggggcatcttggaaaggctttgacctcagcatgttcttcaacggtatgattcgtgatgcctataacaactccaaatattatacggatttgttccaatgctggaccggtaatcattctacccgcctgctcgatgccatgcatgcctacgagaactttgaaaagacgggtgtttacaatagcagtgtacctgctttaaccacccttaacagcaacaatgagcacgaagtttctgagttctatattgaaaatggttcgtatatcaagctgaaaagcctgacattgggttacacgcttcctaaagcagcgctcgacaagatgaagatgcgtcatgcgcgcatttatttccaggctcagaatttgtttacgattaccggttatacgggtgccgaccctgaaggtctgggctatccttatccgttgccccgtacgttctctttgggattatcatttggtttctaaactttaaaactatactattatgaaattgaaacatttatatatgcttggcgcagtagcgctgatgactgcaagctgtaatgaagaccgtttcctggatttgaagccccagggtagcttgaacgaagatattatgacttctacagaaggtgccgaccttttagtgaatgccgcgtatgcagctttgggtggtcccgagggacagagttggagtgtatggtgtcatcctacttccaattggacttatggtgaggtgcgttcggataatgcctataaaggcggtggtggtgtcggtgaccttaatgaagtgcaccgtatggagacatttgatatggatgcaaccaatggattcttggacagcaagtggtatcatctatattgcagtgtacagcgttgtaactctgcattgcgcgtactgaatactgcaacagatgagcaggtaaacggacgtgtatcccgcattgcggagatgaaagtgcttcgtgcccattattattttgaattaagccgccttttcaacaagataccttattttgatgagaacgttgagatttcccaatatccggatattccgaacaatgagtttacccgtgacgagattctgagtatgctggccaaggagatgcttgatgccgccgaacagcttcctgcatcacagccggaggtagggcgtattcataaatacatagcactggcctatgcggctaaaatcaagctgtaccaggcgtatcagcaagatgagattacgcatgccgtaacttccatcaataaagagctgctgagggaagtcgtttcgctttgcgaccaagtgactgccagcaaccgttacggtttgcttgacgatttccagggattggatttagtaactaatgaaaacggtaaagaatctgtttttgccattcaatattccatgaatgacggtaccgaaagtgccggccgcatcaactggagcaatctgttgaattctccgggtggaggcagcccttacggaggtgacggtttcttcctgcccagtcaagatctgataaatgcttaccagacagatgcaaacggtctgcccgattttaattatcagtcaaagtctgattatagttgggcggtattgaacaatggggtttatactttacaaaacacgactcccaatgtagacccgcgtctcgattttgttgtgggccgtcctactataacttggaaaacttatccggacaagccgtgtgagggatgggtgcgtgataaggatacttatggctataattgcgcgaagcgcttctgggtttctccggaaagtagtgatatgtttaatggctggccttggggggcttcacagttgaactggcagattatacgttacgcggatattcttctttggaaagctgaggctcttattgaactcaatgaaggcaatggactcgaaactgcccgtgatttgattaatcagatacgcaatcgtgcccggaacagcgcctatgtaaaggatttcaacgaccattccaaatatgcggccaactaccttgtcaatccttatcctgctgatgtctggaatcaggattatgcccgtcaggccctccgttgggaaacacgtctggagaaggctttggaaggtgaacgtttcttcgacctagtccgttggggcatagtggaaacaaccatgaacaactacattaccgcggagtcggacaatcgcatttattatgccaatgcgcactttacgggtggaaaggatgagtattatccggttccgaacaatcaatacggattttctggaggcaagtatgtacagaatcccggttatgctccgttcaactaattatattttgaaataaaaacgtaagggaggggaaacgtttgtttccctcttttcctttaaacaatcttttattatgaaaaactttgcctattctatattaggctgtctattgctttctttgaatgcagcttttgctcaaaaaacatggtcgtttgacgggcaggaccccttactttcctgtgacggtaagtcattgttgaatttgtacactataaaggaaataccagaatttgttaccggagtcgaaggtaaagcccttcgtacagacgggtattccacttggatggatacaaccacggaaggagatgtttcgtcgttgtccggatggtttgctctggaatcttatccgacggatactgctgcctttatgggaatcagagacatggcaggaacatctgtagcggtatgtgtagaccgttatggtgagctgctgttgggaatggggcagaatggttcatactcttactgttcattaaagacaaaagtcgaccgtttcaagtggctgcatgtggtccttgatttgagtaatgaatcggtttgcctgaatggacagaggatgagtgcagaggtatggccccggaacttgcaggatggtgaaatgatgtttcgggtaggtaaggatttcagggaaaagaaggtttggatgtacgatgttacggctataaacgggttgattgacgggataagcctcactcccttttccgatgattcgtctgcatggagagacgagattgccttaggattgaagaagactccggttttggctattccggaaacccgttttgcgaaggacttcaaccgtccccgctatcatctgttgccggctgccaactggacgaatgagacgcatggtttacttctttataaaggtaaatatcatatattcaatcagaagaatgcttctgcaatcttcctgggacagataaattggggacatttcagcagtcccgatatgcttcattggacggaggaaaagccggctttgactcctgatgctgcttatgacaagaatggaatatggtccgggcatgctgttatcaatgatgacggtatcccccagctgatatacacagccggtggagacaagatgggagtgggtattgcttttccaaaagatactgcgttgatagaatgggagaaatatgcgggtaatccggttattgccgagaagcctgccggatatacccgtacggacatgcgtgaccagtatgtttggaaagagggtgatatctggtatatgattatcggtttcggcattgagcagaccgatacaccccacggggctttgctgctttataaatcggcggacttgaagagatgggattttgtacatttgctgtttgagggcaatccggaagtggatgactccggtattttctgggaaatgccggtctttaagaagatgggcggcaaatatgttcttttggtgaatagggttcctcataaaggcatacctgcgcgttgccagtattggataggagatttcaagaatgaaaagtttataccggacaacccagtccctcaaaatctggaggtcatcaatcgcttgctgtccccctctgttgttgagactccggaaggggatgttgctgccattgccattatacccgatgaaataggaggggaggccacttatgaacaaggatgggcacatctctacagtatgcccagaagatggcagctgaaagatgggaaactatgccaaacaccccatcccgtgatgaaacaattgcgtgaacaaccgacggtttattccagacaggcattgactgctgcgaaaccgtgcattgtgagcagaagggaacatcagcttgaagtcaaggcgactttttatcccggtgacgcaaaacggtttggatttacattgtgtaagaatccggataatagcgaatatagcctgatttattatgatgtggagaaggaggaacttattgtggaccagacgcattcttccttgcgtgcacacattcctttgaagattcgtaaggatcattatcggttggatactgctaaaccggtggagattcgtttgtttattgacggttctgtagtggaaggatttattaataacgaagatgcgttcactacaagaatcttccctttgaaagaaaatagtacgctattggagctattctctgatggaaaaacaacggaagttgctgccgaagtttggaaactgaaagatgtaaaggtaaagatgaacttttaatgaaaatacagaaaatgaagataccagctatattgggtgcacttttattggcaggaacattgtctgccggtgcacaaatgaattcagacagtttatacaaagagccgtatcgtcctcagtatcatttcagtccggagaagggatggattggtgatccctcgggattcatgtactatcagggtaaatatcatatgtactggtggggcaaagtcgaatctacagatttggtacattaccaacagataaccccttatgccatgaccggaacggatgacaatatcagttacttcaccggttctgcggtcatagacaagaacaacacggccggcttcggcaagggggcttatgtggcggcttacaccgtttttgagaaggactccaagaaacaggcgcagggcatctctttcagtcatgacggaaagacatttcattattatgaaggtaacccggttctggacctttggagtacggaattcagggaccctaccgtcttctggcacgagccgacccaaaaatgggtgatggttgtagccaaggccctggagaagaaaataaagttttatacctctcctgatttgaagagctggacttggaccagtgattttggccctgccggtgacagtgaaaagtcttgggagtgcccggatttattccagttgccggttgacggggattctgacaagaaaaggtgggtgatggtcgtatctgtaaactgggcgcaagaacaatattttataggagacttcgacggcacttcttttaagctgatggagaaccatcctgcagagcctctatatgtggacaaagggctggacttttatgcatcccgcacatttcaggattttgacggaacgttggattccaaaatttcgatgggctgggttgcaacctgggactatgcaccggtagctccatcgaagtatgggaagggcttctggtccattccccgtaatctggaactgaagacatacaaggaaggcgtgaggctggtgcagaaaccggtggaacagttgcaaacacttcgccataagcctgcatcggtgaaacgtgctttatcggtgggaacacagaggttacccggctttgttcccgatgagaatgtctacgaactcgatgcttcgttttctactgacgtatccaacacctttggcttgaatttgtgtgtgggtgaagggcgcaaagtggtggtcagctatgatacggattcacataatctggtgattgaccgcacccattgctccgatgtgcagattcctaaattcagccgtatggcatatgccagggtggaaccggtagataataagatacgtttgcatatatttgtagacaaatcgagtattgaaatctttgccaatgacgggaaggatgtattcacattattaacctatccgggcgaggctcaaaccggtatcgaactttttgcgcagaagaaggggacgaagatggagttggatgcctggatgcttaaatcaatatggagatgaggaatttattgtttgcattgctgcttttgcctttgatggcctcttgtgtgaaggatacggcacaagtgactttggactctttgctggatgaaatgatatctgtagaagaatccgcacgttatccgctggtgccatatcgttgcctgcaagtcagcagttatgaccgctcctccgtgtctcccgattcgccgggatggtttgccaacaatgatggctatggcattgtctgtacggatacggttgatgggagagtggaacgtgtgatgttcgatgaaaagggccctggagctattacccgtatctggataaccacagttgacaagcgtgggacttggagattttattttgatggcgaaagtactcccggatggatagttcctgcctatgatttgatgcgtttcggaatacccaggttgggtaggggactgcttcaaccccacaccagctatactccggacgggaaaggcggcaatactcttttcctgcccatcccttttgcccggagttgtaaaattacatttgaagacgaaccgggcattgcgcctactcccaaatactatcacatcaattatcgcaagtatcccgaaggaacttctgtggaaaccttctctgcggcatccgtagcccgcgtcggtaaaaagatttcagaggtagatgatgccttgctgcatcctgcatcccgttccggtttgcaggtggacaagaagcggcaggtgctccagccgggcgattctttgtggattgacctgccgcaaggggaaaatgcggtttatgaaatcagtttccagctcgcgaatgcagattctacggcttatgcccaactgatgcgcaatcttatatttaaggctgattttgacggccggtctacggtttgggttcctctttcggattattcgggagggggtatgggtgctccggctgttgatagctggttcttgtctgcagacggacaaggcaaggtggtgagccgctggctgatgccctacaagacagaaggcagactattgttacaaaatatctccgcacacactgcagacgtgagtatggaagtgggaacggcacctttgccatggggagggcgttccctctatttccatgcttcctggcgccagcagaccggacttccggtttatgagcgtccggatgatgatgcaaattgccgggagtggaactttgccacattgaccggacgaggcatatacaaaggggatgtcctgactctgtataaccattcgcgtgcctggtacggagaaggggatgaaaagatatgggtagatgatgatgtttttccatcgcatttcggtaccggaacagaagattactacaatagttcgtgggctccggtcgtaatattccaaacgccttttggtggcgcaccccgtgccgaccaggcgagttctcacggttataatacattcttccgtacaaggaatttggacggtataccgttttcttcattattgcgtttcgacattgaattgttgagttgggtaaggggaactgtagattatgcaactaccgtttactggtatggagatatgggagcgaaagctgttgatacttcaggacttgaggaagcagcccaagacttgctacccgttcccggcgatttatctaaatatcgaagagaaaatagcatagaatttgaggaaacaactccaatagcctcttctccatccattcattttgacaagcagagtatgcttggtttcgttgacgggcaatggagtggaggaacccaactcttgtgtattggtggaaaaccgggtgattctgtagagtttgagttcaatcaattggaagactgtccttatcaactggtggtgtatgccacgaaagctcctgattatggcatagtttctttttccgtaaatggacaagatacacatataaagtgggatggatatgatacaaaagttactctttctgaccctatttctttaggatgctatagtccggtgcgtggagcattgactttgaaaatatctttgtcaggagctaacccaaaagctgttgaggagaagaatttgtttggattagatgctatacaacttatgaaaaaacaatgatattatgaaagagaggatactgatacttttactactggctactgtttgtagtatgcaggcacaaaatattcacatggcactacgtccggatgatttactgatagataattttgaaggagatacttttggaaactggatattggaaggaaatgcttttggcaattcaccagtttctatggaacgtttgtcaatatggggggataataggtttgaaggaaatcggatggcttctagctttgtcaatggagatgccggtaccggtgtattgaagtcacctcttttcaggatagaacgcagatatgttaattttctgataggtgggggtgttgattatcagcgggagtatgtagccctttggattgatggaaaggaggtgaaaagaagtacggggtataatagacgtgtcatggaatatgagtcttgggatgttgctgaatatatgggaaaaaatgcccggattgttttagtggaccaatcaaaagagggctggggatttatcaatgccgactgtttctaccagtctgataccaaattggaaaaagaaatttttgcgaaaagaatgttggtaactcaccgttatttgaatattccggtaaagatgggagcggttatagaacagatggatatatggattggtgataaaatggtacgtaatatggaagtggagcttggcggcgatgaacctgattattgggttacattggaggtcaaggattggattgggcaagaattacggatagaggcgagtaagagtcctaatgtagagcaagctttgaatcaatgcttttgttctgaaactcctaaggaagagaacttgttttataaagaaccgttacgtcctaaagtacattttacttctcgccggggatggctgaatgatccgaatggtctggtttggcatgaaggggagtggcatctgttttatcagcataatccctatggctgtatttggggtaatatgacatgggggcatgctgtgagccgggatttggcacattggactgagttgggggatgtattacatccggactcgttgggacctattttttccggttcggtagttgttgataaaaagaatacgctggggtgtcaacaaaatggagatacagtattggttgctgtttatacttcggcaggtggattcgggtatcacacccggcatttgcaacattcacaaagtataggatatagtttggataaggggcgtaattgggttactttttccggtaatccggtacttcccacgttggtcaggtacaatcgtgatcctaaggtgacgtggcatacgccgactggcagatggattatggtattgtacttggataagcaggagtatgctatcttttcatctcccaatttgatggattggactgaaacggaccgttttaaattagagggggcggatgagtgtcccgacttttttgaaatgtccgtaaccaatgaacctactgtccggaaatgggtctttaccggggcgaacagtacctatttggttgggagttttgatggatatcgttttcggcctgagacgaaacctgtaaaaatggatagtggtacaaactattatgcggttcaaacatatagtaatgcaccagatgaccgaagaatacaaatagcatggatgaacggaagtaatttcccggatatgcctttcaatcaacaaatgtcctttccgcgtgaattaacattacatcgggttgataaaggatatgtcttaaaaagtatgccggtaaatgaactcgctttattatatgggagaaagtacatctggaagagtctggtagttgaagaaaagaattgtttcacgacaaagttgaatactcctgccttctatctgaaaacgggttttgctgtagatagtgttgatgcgcagatattggcttttgatattaatggtttgaatttgatttacgattctgtcaaacagatactcactgttgagaaagagaatggggaaaccttgaagcagatggtgctaaagcccaatgaaggaagaattgaattggatatattgtcggatattgcttctgtagaaatcttcgtcaatcaaggagcactgtctgctgctttctatcatctgattgaaaaaaacactccttctgtcaccatatcagttgaaggcggacaaacaaagttgaaacagttgacaattcatgaattgaattctatgtatgttccccagtgacatacagatacctttttaaggatggaatgtaacatttgtagtatgctttgaaacaaaaaagatagtctcctgctgcttggtggcgtatctttgcatgctagaaaaacataattaatttaataccaacagaaacatgattcatttaaaagacttttggcggacaatcagaaggacgcttaccgtatttatattaggaactaccgtggctgtctttacatgccaggccataaatcctcctttcgtgattaaacatctgggtgacggacagagtatcgtccaaattgacgagcagaagaagtttttgctgctgccggtggaagaggcttctccggaggcaaaattgtatatgatagcggacaatgatgttgtacgcagtatgaacgtgcgattggcagtcaataaggttgactattttgttccggtcgatttgaccggcttcgataataaacatctctctttcaacttccagcttattccggattcggccttatgctgggaagaaatgaaactgtcggatgaattcgatgtttcgaaccgggagaagtaccgtccggtgtatcatttcagcccggcttacggttggatgaatgatcctaacggaatgttctacaaagacggggtctaccatttgttctaccagcataatccctacggctccatgtgggggaacatgcattggggacatgccaccagtacggacctcgtcacttgggagcatcacggagatgccatttcgcccgatgcgttgggaacaattttcagtggctcttgtgttgtcgacaaggataatacggccgggttcggtgccggtgccgtcattgccttctatacatcggcaagcgaccgtcaagtgcagagcatggcctatagccttgacaacggaaaaaccttcaagaagtatgcgcgaaatcccatcctgacttccacgcagcgcgacttccgtgaccctaaagtcatctggcacgaagataccaagaaatggattatggttcttgccgtagggcaggaaatggaaatatactcttctgccgacctgaagagctggacgttggagagcaaattcggtgaaggacaaggtgctcacggcggagtctgggagtgtcccgacctgcttgaactgccggttgaaggtacggaactgaagaagtgggtactcgtctgtaacctcaatccgggcggaccgttcggtggctctgccacacaatatttcgtagggacatttgacggtaagaaattcgtgaacgagtctcccgcagtgacgaaatggatggactggggaaaagaccattatgcaactgtcacttggagcaatgcccctgcaggacgtgccattgcattggcatggatgagcaactggcaatatgccaatgatgtgcccacccgtcaataccgtagtgccaactccgtgccgcgcgacctttcgctctatacctcggagggtgaaacctatgtaaaggtaaccccgtctcccgaattgctgaaactgagggataagggcagcaagaagcgtgctttcaaggtagaccgcacgtataacctggacaaactgctgaatgacaattccggaacgtatgaaatcgaaatgactatcaagaacaagaatgcggatgtgataggattccagctctttaactcgaaaggcgaggaggtggagatgtactataacctggcggaaaagacgttcaccatggaccgtaccaagagtggtgaggtgtcgttcagcaaggacttccctgcagtgaccgtggctcctgtcgaggatggcaatgaaatgaaactccgcttgttcgtagacaagtcgagcattgaagcgtttggcaacgacggacgttttgccgtgacaaatctcgtattcccgtcggaaccttacaaccgtatcagtttctatgctaaaggtggaagctgcaatgtcacctcgtttactgtgtacaaactcggattaaaataacagataataatcttcagcatggaaaatactaagaattcttctttggcaaagctctttccggtcatgctttgcttcttcgccatgggctttgtggatttggtgggcatcgcctccaactacgtgaaggccgacttgaacctgaccgactcgcaagccaacatattcccgtctctggtgttcttctggttcctcatcttctccgtacctacgggtatgctgatgaaccgcatcggacgcaagaagacggtgcttctcagccttgtcatcacgtttgcctctttgcttctcccggttttcggagacggttacgtgctgatgctgctctcgttctcattgctgggcatcggcaatgcgctgatgcaaacgtcgctcaacccgctgctttccaatatcgtaagcggcgagcggctggcaagttcgctcaccttcggacagtttgtaaaagccattgcttcgtttctggctccatacatcgccatgtggggagctacgcaggccattccgtctctgggcatgggctggagggtgctgttcccggtctatatggtcattgcggtgattgccattctctggctgagcggtacttccatccgcgaggaaaaggaagagggacgcccttccaccttcggggagtgcctcgccctgctgggcaagccgtttatctttctctgcttcctgggcatcatgtgtcatgtgggcattgatgtaggtacgaataccacagcgcccaaaatcttgatggagcgtctgggcatgacgctggccgatgccggctttgccaccagcctttacttcattttccgcacggcgggttgctttctcggcgccttcattcttcagaagatggctccccgaaccttcttcggcatcagcgtgttatgtatgttggctgcgatggtagggttgttcgttttccatgaaaagacaatgatatacatttgcattgcccttatcggtttcggcaattcgaacatctttccggttatcttctcccaagcgttgcttgctatgccacaaaagaagaacgaggtttccggcttgatgattatggggctcttcggcggtacggtatttccgatagcaatgggcttggcaagtgatgctgtaggacaaagcggtgccgtggctgtaatgacggtgggggtagtgtacttgttcttctatatgctgcgtatgaagcggtaatctttgttcgcaagctgcgcatacatatcccaaggctgcggatatctgtcccaaggttgaggatgtctatcccaagccttgggatagagataatccttagttcttagagactttttaatagataataggcaacttttcattctatagttaggaacttttttattaggtttgcagcgggtaggacattgagtttgctgtgaataaaatatatcattcattaaacaatataatattatgaataagataatagtaggtatgggcgaggctctgtgggactgcctccccgaaggaaagaagataggcggtgctccggcaaactttgcttaccatgcatcgcagtttggtttcgacagccgtgtggtcagtgccgtaggtgccgatgcggatggggacgagattctggatgtgttcgcccggaaggggctgcgcacgcagattgagcgcgtgccttaccccacgggaacggtgcaggtgacgctcgatgccgtgggcgtgccgtgctatgagataaaagaaggcgtggcctgggacaacattccctttaccgacgaactgaagcgtctggcactgaacacgcgtgccgtatgtttcggctctttggcgcaacgcagtgaaacaagccgcatcaccatcaaccgttttctcgacacgatgcccgatgcggaggggcaactgaagatattcgacatcaatctccgccaagggttctataccaaagagatactctgcgaatccatgcgccgctgcaacatcctcaagataaacgatgaggagctggtgaccatcagccgtattttcggctacccgggcatcgacttgcaggacaaatgctggattctgctggctaaatataacctgaaaatgcttatcttgacttgtggaacgaacggcagctatgtgttcactccgggagtggtttccttccaggagacgcccaaggtaccggtggcggacaccgttggagccggtgactcgttcacggcagccttcaccgctgccattctcagcgggaagcaggtgcccgatgcccataaactggcggtggaagtctctgcctatgtatgtacccagagcggtgccatgccggaattgccggtggccttgaaagaaaggctggcatagatttttcttattcttttcacatttttcgttatctttgctcatctgcaatcttaaatcagaggaaagtgaagatgagacagcataaccttcggattttattctttttgctcgtgctttggggagtggcggttgcctgctcccggcgcgaggcacgtttccgtatcggcgtttcccaatgtagcgaggatgaatggcggcgccagatgaacagtgagatactccgtgaagcccatttctacgaggatgtggaggtggacatccgtactgctgtcgacgataatgaccgtcaggcaaaagacattcgtgagctgatagccgaaggggtggatctgctgattgtggcccctaatgaagccactccgataactccggttgtggaggaggcatacaaccggggcattccggtgattgtagtggaccgtaaaatcctttcggacaaatacacggcctacgtcggtgcagacaactacgagatagggaaagctgtgggagagtatgtggccaatgtgctgcatgggcagggagatgtggtggaaatctcaggtttggtgggctccacacctgccgtagaccgtcatcaaggatttgtgaaggctatatccgcttatcccggtatccggttgctggccgttgaagacggtgcctggttgcaactcaaggccggagagaaaatggatactctgctgagccgctttccgcatatcgacctggtgtatgcgcagaatgaccgtatggcggccggagcctatgctgccgctgcccgagaggggcgggaaaaggatatgcggttcatcggtatagacgccctgtccggcaaagactatggagtggagaaagtgcttgccggcgaactggatgccacgtttatatatcctaccggtggcgaccgcgtgatgcagattgccatggatatcctgaacaagcgtgatttcccccgtgaaactatcctgggcacttccgtcgtcgaccgcgacaatgctctcatcatgaagatgcagaccgcccacatcggcaccctggatggaaagatagaaaccctgaacggaaagataaaccagtatttagccagttatgccacgcagcaggttgtcttgtacggcagtctgtccgccctattgttgctggtcggtttgttggtggctgtctacctctccttgcgtgccaagaaccggttgaaccgtgaactgtccatgcagaaaaagaaactggaggaacagaaaacccagttgatacagcagaaggaactgttggaagtacagaagtcgcagttagaacagctttcccatgaactggaggaggctacgcacgccaagctggtgttcttcacgaatatttcacacgatttccgtactccgctgacgctgatagccgatcccatagagcagcttcttgccaaccgcaccctcgacggacagccgcgccagctcctcgagctgatgaaaaagaatgtgcatatcctgcttcgcctggtcaaccagatacttgatttccggaaggtggagaacgggcgcatggagctccatctcgaaccttttgatttgctcgacagcttccggggctggaacgactctttccgcatggcgttgctgaagaaacatattgctttcagctttgaggcatctcccgatacggacttccggatgatggcggatgcggagaagatggagcgcatttacttcaatctcttctccaatgccgtgaagtatacgccggagaacgggaaaatcaccgtacggttgttaaagtcggaacagaactacagtctgtccgtcttcaattccggcagctacatttcttcgaccgatgtggaagccatcttcgagcgcttctatcaagtggacgggcatcaagccggtaccggtatcggactggcgctggtacgtgcctttgtagagatgcatggcggtaacattacggcacgcagtgacgagaaaggcactactttcatcgttactttcccgcagcaggatgtttcgcagtaccatcccaccatagtgacgttgcctgccgaagagaaggacgtgtcgtccaccctgatagatacggaagtgaaggcatgcgaagaggtggttgaggctgattgtcctactgtgctggtaattgacgataatgcggatattcgcaactatgtgaagtcacttctgtcgaacgagttccgtgtattggatgctgcggacgggacagagggtatccggctggccatgaagtatgtgccggatgtgattatctccgatgtaatgatgcccggtatggatggtgtggaatgctgccgccgcttgaagggggagttgcagacatgccatatcccggtgattctgctgacggcctgctcgctggacgaacagcgtatccagggctatgatggcggtgccgattcttatatttccaaaccattcaattcgcagttgctcttgtctcgtgtccgcaatcttattgcaaaccgccgtcagttgaggcagttcttcggagataaccagactatcgagaaggaagccatcagtgatttggataagggtttcgtctcccgcttcaaatcgcttgtcgaggagaggatgaaagatgcggaactcaatgtggaggatttgggacggaatatgggtatgagccgtgtgcagctttaccgtaagctgaaatcgctgaccaactattcgccgaatgagctgctgcgccagatgaggttgaaaaaggctgcctcactgcttgcctcctctgacatgacggtagcggagattgcctatgaagtgggcttttcgtcaccttcctatttcacgaaatgctataaggaacagtttggggagagtcctaccgagtttctgaaaagaaggggatagctgttgtctatcccccttgttcttaatacacgtctgtttacttctgtaaatgatactggaacttatttcagtatttgaggcaggttttcccttccccagaagtagtaaacacagattccaatccagcttgtgagcaggatgataattgcaactaatagtttcttcacgccgtctaccggccacttcatgatttcaagtacggctttgacacacagaaccacaccgataatccaaatgataaatccaatcataacctgtgatatttagtattgttaattaaaaacaaatagagactacgccttattcaggagcagcctctattctttatttagtaatcggaattactctgtaacttcagcgccccaattttctttggaaagacgcttgtagctgttgtaacgccatttagcgttttcttcagcagccttgaacagctcgtcggcctcctgcggatattgcttcattacggatgcgtaacgaacttcacccttcaggaagtcttggaatccgctccaatccggttccttgctatccagcgtgaacggattcttgccttcagcctccagagccgggttgtaacgccacaagtgccagtaaccgcacttaacggccttttcttcctctgcctggctcttgcccatacctgccttcagaccgtggttgatacacggagcgtaagcgatgatgagtgacggaccgggatatgcttctgcttcacggatagcctttaaagtctgagcctggtcggcacccatagcgatttgggcaacgtatacgtaaccgtaagtagtagccatcagaccgaggtctttcttgcgtacacgcttaccggcagcggcaaacttggcgatagcgcctaccggggtagccttggaagactgaccgcctgtgttggagtaaacctcagtatccagtacgaggatgttgacatccttaccgcttgcgattacatggtcgagaccaccgtaaccgatgtcgtaagaggcaccgtcgccaccgataatccactggctgcgttttaccaggtattgagacagactggcgatagtcttgcagctgtcgcacttgtctttggcagcttctaccatcggaataatcttttcagccagttccttgctcttgtctgcatcgtacatgttttcaatccaagcctggaatacttctttgtattcggccggagttccttctgctgcgatggcatcttccatagccttcacgatacgtgcgcgcatcttttcgttggcaagctccatacccagaccgaattcgcagaagtcctcgaacaatgagtttgcccaagcaggaccgtgacctttttcgttcttggtataaggagtagaaggtactgaaccggagtagatggaagaacatcctgttgcgttggctaccatttcgcggtcaccgaacaactgggaaatcagtttaacgtacggagtttcaccacaaccggagcaagcgcctgagaactcgaacaacggagtagcgaactgagagttcttcacgttggccttgatgtcaaccaaatgttgtttgctcttcacgttttcagcacagtaggtccagttggcagcttccggcaattggctttcgaggtgcttcatagtcagagccttgccacccttcttcgggttgcccggacagacatcggcacagttgccacaacccagacagtcgagaacgtctacctgaatacggaatgtcataccgtcgaatgctttacctacagccttcagttgagtgaagttggcacccttctgctcttcagcatcgagtacgaacggacggatggaagcgtgaggacaaacgtaagcacacttgttacactggatacagttctcagcgttccattcgggaacgaatgcggctacaccacgtttctcatatttggcagtgccttgttcccaagtaccgtcttcaatacccttgaaagcggataccggcaataagtcaccgtcttgtgcgttgataggacgaaccacttcgttgatgaatgcaggatcgttgttttcagccttggcgtcgtctgccagattggcccaagccgggtcaacggtcagttgcttgtattcgccgccacggtcaactgctgcgtagttcttgttgacaacgtcttcacccttcttgccgtaagacttaacgatgaatttcttcatctgttctacagccaggtcaaccggaataacgccggtgatacggaagaatgcggattgcaggatggtgttggtacggttgcccaaaccgatttcctgtgcaatctgggttgcattgatatagtaaacagtgatattgttctgtgcaaagtacttcttcaccttgttgggcaggttcttggcaagctcttcgccttcccagatggtgttcagcaagaaagagccgttcttacgcaagccgcgggttacgtcgtacatgtgcaggtaagcttgaacgtggcaagccacgaagttaggcgtgtttaccaggtatgtagagcggataggagtatcaccgaaacgcaggtgcgagcaggtgaaaccgcctgatttcttggagtcgtaagagaaataagcctggcagtgcttgtcggtattgtcaccgataatcttcacagagttcttgttggcacctactgtaccgtcagcgcccaaaccgtagaatttggcttcgaacatgccttcgccgcccaatgcgatttcttcttcctggggcagagaagtgaaggtaacgtcgtctacgataccgatagtgaagtggttcttcggcatcggcatagccaggttcttgtaaacggcgaggatttgcgcgggagtagtgtccttggatcccaaaccgtaacggccgcctacgataaccggagcattctctgcaccgtagaagcagtcttttacgtcgaggtacaacggttcgccgttagcacccggttctttcgtacggtccagtacggcaatcttcttggcagtcttgggaacggcggcaaggaagtgcttggcagagaacggacgatacaagtgaacggcaaccaaaccaaccttttcgccattggcaacgaggtggtcgatagcttcgcgggcagcttccgttacagaacccatggcgatgataacgcgttctgcatcttctgcaccgtagtaatcgaacaaaccatacttgcggcctgtgattttggaaatctcgttcatgtattcctcaacgatagccggaactgcttcatagtagttgttgcaagattcacggtgttggaagaagtggtcaggattttcggccataccacgggcaaccgggttcatcgggttcaatgcacgtgcgcggaattcagccaaagcttcctggtcgataagcggagcgaggtcttcgttctccaacatttcaatcttctggatttcgtgagaagtacggaagccgtcgaagaagttcataaacggaacacgggccttgatggtggctaggtgggcaacacctgccaagtccataacttcttgtacagaaccttcggccaacatggcaaaaccggtctggcgtgcagacataacgtcctggtggtcaccgaagatacacagtgcatggcttgccaatgtacgtgctgatacgtggaatacacaaggcaggaattcaccggcaatcttgtacatgttcgggatcatcagcaacagaccttgtgaagctgtgtaagtagtagtcagcgcaccggcttgcagagagccgtggacggcacctgcagcaccaccttctgactgcatttcctgtaccaatactgtttcgccgaagatgttcttgcgacctgcggcagcccattcgtctacgtattcagccatcgtagaagagggggtgatggggtagatggcagctacttcggagaacatatacgagatatgtgcagcagcctggttaccatcacaagtaatgaatttcttctgtttagtcataactaaattgaattatttatttaagtaaaaaaatctctctcttaatacaagaaaccgaataaccagagaggtatttggttgcctcggcctatttctgccttatgcagtacataagtaactcccggattattctttatctttgttccttccggacaaatcttgaaaggcatcacctcatctaccatgaacgagatgttcttgtcgcccttgttcaccttgtggtccttccacattgtgttggcaaagaaagtgtccagtacgtcttgctcttccaccttgacgggatagatggaatacatcagatttgaattgtgcatcattatcttcgacggcttcttggggaattcttctcccttcggatagaccatattgatgagtcgtgcgtctgccagatacttgatgtaattcatcacggtggcacgggaggtctgtatgtcgtttgccagttggctgacattcggcgctttcggcccgtccacggccaacaaatatagtaatttctttatcttcgaaaggtatttcagctcaatttgtttgatgagcaggatgtctacttccaccatcatgttcattgtcttgagcagattctccgagaagttacgcttttcgaggaagaaagggtagaagccgtggtgcatatagtcctgcatgtagtccaatggacgtactttggagaggatgcctttggctatctgttcgtggttgctcaggatttcttccaacggataggcgtggaacttcatgcccgtctgcaggttcaggtattcgcggaaggagaagccgcgcaggttgtagctcttcacgatgtcgcgcaactccatattctcctctttcaggcgcatcacggacgagccggtgaacacgattttcaggttggggaagcggtcgtagcacatacgcagttccttgctccattccgggtacttgaatacctggtctatcaacagcacttttcctccgcgacgctggaattcggcggcgaactccacgatgccatgtccggagaagtagaagttgttcatgttgatgaagaggcaggagcggtctgtgccgaatttctctttggcatattgcagcaagaaagtagtcttacctacgcctcttgtgcctttgataccgataagacggtcattccagtctatttcgtccattaggtcgcggcgtacgggggcattggtatgctctacgagataagcgtgtgtacggtaaaatgcttccatgctttaaattcggtttatcgggcgacaaatatacggcttttttatagatttgcaaagtagagatggcaaaatattatataactttgcactctcatacaaaacgtgagtaattggttaacatttgaaagatgaaactttatgtgttcaatcctgatgcagatatggcattgggaaataatgaagaaaattatatggcgcccgctaccatccgccgtatggctgaagacttggctttgttgccgatttggtatgcccagccgggtagtggggtactggcctcttccgcctataatgcagattatctgaaacagatgcaacagttgttccggctggatgtgcatttggtgacagagccggagctgcccgattatgctgatgtgcgggtaatgccttggggatggaaccccgctatccgtaaacggatgttgaaaggcggtgttctggaaaaaaatcttcctacgccggatgctttggataaatatcgtatgaaggctgcccgtagtaacgctttggcttttcgcgcacttttctatttcaataaaatagattatacttgtggtgacggttgttgcttggtggaggctgatggtagaatgacggatatctctccggatattgttgatcgttacaaggagggatgtgtgttcaaatcactttggtcgggaagtggaaagggattgtgttggtgccgtcatggctttacgaaaaatgtttccgattggtgtagtagggcgctgaaagaaaatagaggttttgtgatggagcctatatttgataaggtggaagactttgccatggaattttattcggatggtcggggaaagcttctttttgtcggctattcccgttttgttacggatgacaaaggggcatatcgtggtaatatccttacttcggatgagcaagtggaggaatggattcagcaatatgtaccctttgaagcatttgtacgcatacgcaatatgatgcagaaagcattggaaacgagttatgctacatcttatatgggtttcttgggtgtggacatgatggtctgccgtcagaaggaagggcatccgtatgccatcaacccccatgtcgaaataaatctacggatgaatatgggaatcgtttcccatgtgcttagtgatcatttcattgtccccggtggggagggacgtttctccattgattgttttccgacccatgaagctttgatggagcggcatgagcaggatatgcaaagctatccgctggtggtgaaggacggcagggttgtttccggctatctgcctctggtaccggtcactccgaagagccgttaccgggcttttgtctgtgtcactgctgctgaatagcttcgctttcgtttccgcaacggtctatggctgtcacggcaaaatattttcgggcagtccacgggcggatgggggcataggtatattccgtaccttgtactcgttgtgccaggatattctccggattggaggtatctacgggataggtgtccgaaccgtagattacatacatcggagcattccgcttgtcattgtccgtggcgggttgccagcttagtttccaatagccgttttccggtgtttccaccgtgagtccggagggaggtgtaggagctacattgtctatccacggcatggcgggttgcagggccggggcggtatagaagtcttcttccagcgcctcataaagcccttgcgtattgtccatcagatacttcacgcggtagtgtgcctcgcccgccagaccgtgggcgcggataaagtgcatctgccgttcaatctcgtccagcgtccagttcccttcgctggggtcgaggaagtagatgcccagaccgggaatgatttggcgtccgttactttgttcctgccagtcgagggcaaagggatagaaatgattgccacggaaatagagcatcggataaatctggtcctggatgccctcgcccagccaaccctgcacgtcttgatagacggtgtggaaggcattccagccacgggaggggtagcgggaagtgtctttgtattttcctaccgggcaggtgctgacctttacccagggtttcatggcttttacacctttatatatatagcgtactatttccgtcaggttgtctctgcgccattgggcaaggctgcgtcctttgctgtatttgcggtagtcgtagctgtcgggaaaacggggggcgttttccggatagcgcaggtagtcgaagtgtatcccgtctacatcgtagcgttccaccacttcgcggacaaggctcatcaggtactctttggtttgcggatgtccgggattcaggaagtattcgcgtttgtagggtacgcagatggcgcgtttctttttggtgacggactctttaccgagggcggctacatgcttgcggttgcccagagggatggtcaccatccaggcatggcactccataccgcgcttgtggcattcggctatggcaaaagccagcggatcgtagccggggtcgccgcccacctttccggtcagtatggagttgtagggctcgatggctgatttgtagaggacatctccccgtgtacgggtctggaacagtactgtgttgaaattggcggctttcagtctgtccaatatttcaatcagttcggcctgttgcttgcggatgccttcgggcgaagtggtgcgtgtctgcggccagtccaggccatagacggcagttatccaggcggcacgcacttcatgcttgggcggttgcgcagccagtggcagcaagacggccatatatagtaaaatggaaataattcgtttcatttttctcttttcttctttatttctgtcatatttctcggcgaagataagcaaaacacccgattattttgtgctgtttacttggaaactgttacatttgcatacattaaagatattaacacgccatgattacatttacgctttgcctgctggcgttgatagccggctattttatctacggacgcttcatagaacgcgtctttggtcccgatgaccgcaaaacacccgcccttaccaaagccgatggtgtggattacattccactgcctacttggaaaatctttatgatacagtttctcaatattgccgggttgggacctatcttcggtgccatcatgggagctaagttcggtacggcatcctatctgtggattgtacttggcagtatctttgccggtgcagtgcacgactatcttgccggtatgctctccttgcggcatgacggggaaagcctgccggaaatcatcggacgctatctggggctgaccaccaagcaggtgatgcgcggctttaccgtcatcctgatgatattggtgggagctgtctttgtggcagggccggccggactgcttgccaagttgacccccgacagcttggataccaccttctggattattgttgttttcgcttattatatctttgccactttgctgccggtagataagattatcggtaagatatacccactgttcgccgttgccctgctgttcatggcggtcggtattctggtaatgctttacgtcaaccatcctgcattgccagagatatgggacggattgcagaacacgcatcccgatgcggttgcattgcccatcttccccatcatgttcgtcagtattgcctgcggtgccatcagtggcttccatgccacgcagagtccgctgatggcacgttgcatgacaagcgagcgccacggacgccccgttttctatggggcaatgataaccgaaggcattgtagctctgatatgggctgccgccgccacttatttcttccacgagaacgggatgggggagacgaatgcctctatcattgtagacgccattacaaaagactggctgggtgccgtaggtggcgtattggccattctgggtgttattgccgcgcctattaccagtggcgacacggctttccgttcagcgcgcctcattgtggcggatttcttgggaatggaacaaaaatccatgcgtcgccgtttatatatatgcatcccgatgttcctggtagccattagcttgttgctttacagcctgcgggacaaggatggatttgatatgatttggcgttattttgcctgggccaatcagactctgtccgtctttacgttgtgggccattacggtctatctggtacgcgagaagaaaggacgttattattacgtcacctatttcccggcattattcatgacggctgtgtgtaccacttacatctgcattgctcccgaaggtttcgggctcggtccgaattatgcgctgggcatagccttgatagctgttgtgctggctgctatttggtttaatatttggtattttaagacgactaaaaaactttggtaatgaagaaaatcaagaaatctaccgggctcacgttggccctgcttatttacgtttctgctactgccgcttatttccttccccgcaatacggaaatcagcgatactgagaagtatgtcaccgtagctgcttcgtacctcattgtatttgtgctgtggctggtgcttcgcaagaaggaggcgctgcaacgcaagcgattcgaagaagacaataaacaacattgattatttactcaaaaaacagaacaagatgaaaaaactggcattattcgtttgcttgcttgttgtcacagtggcagctcaggcacagtttgaaaaaggtaagtggattttgaacccgtccatcaccggtttggaattttctcatgacacgggaaccgacaagacaaattttggccttgaagccaagggaggtgctttcctgctcgacaacatcgccttgctggtgcatgccggggctgcttggaataccggagggtctgacctcgatgtctatacgctgggtgtaggtggacgttattatttcgacaagattggcgtgtatctgggtgccgatgtcaatgtggaccgttgggattggggacatgatttggatgataccaagttctctttcggtctggaagccggttatgcgttcttcctgacccgcacggtgaccatcgaacctgcagcttactggaacgtcaatagcgaccgttctaaattcggtctgaaggtaggtttcggattctatttctaatcttattttcctgctactgcaagtttttttgcagtgccgctgtaaatgtgttgcagtggcactgcataaatgtttgcagcagctctgcaactaatgtacagtggcactgtaataggtttgcagcagtactgcaaaagatatgcagtggttttgcagtaacgttttgcttagagcaatgctgcatattttctaacttgtttcaagcgctccatgagtgtttggtcactttcagccaattgcatgttatagtctagctgcattcgcatcagcaagctggcactgattcccaaggctgcttcaaagagcaatgctgtagatgttgtgaggggacgtcgacagttcaagatgtcgtttagtaccttatatgagatgccggtttgtgcagcaagcttagtttggggtaattttctattttccacctcttctttgagtaattcacccggatgtatagggcgttggcatttataatttcccatattcataatcatttatagtggttcgataattccaggatattacatattgtcactacggtttcagatgtactctgctttactgtgaattctatgcggtattggtcatttactctaatggaagaaatacctgctttatctcctttcaatacttcgtaatgaaacgaccgaatggcgtaaagctcttcgatattttgaacgtattccaaggtctttatgcgcaactgatatcgtttcaccatttgaggctgaaagcgatatttcttatcctttgtttttccttcctcatatagttgttgcaagtattccttatcaaagtgtatttccattgtttttagattgttttcattgtgcaaaggtaatgtatatctccaatattccactataaaagtggatatttgttggttgcctggataacgtgaaactttttatatgttaatgaaagtagaggctggttttgaacattatagcaaaaatccttatatttatactcgaagtatgaatcctaaaagcaaaatgccatgaatagagtttgtattaccttattgctttgctgcttgtcatcttgccgaatgaataagacggaacgcatggaaatgtctgaagattccatagatacagtaaggatagaccaaggggtgggaaaaaaaacagtgagcgatagcctcaagatagggattgcggatgatggtgactacttgcaaagacaattgcttgccattcacgaagaactgagaaaaagattgaataatacaccatatacacacattcagaggaatgtgaccggatatggggtggggttgcattgcatcgatatagatttgatggtgaatactcccgagcggcagaaagagtttcgggagaagataatggactcccccgttttctgttttcatggtgtagaagtccccgtcatcaacgagagagtaggcaggaaccatattcgtggcatctatatccgtcccgaatatccggtcttttcaacgaaagctctccatgcgacattcatcctcagcaatcacagcggcggagatttgatctgcggcgagcattactacttgacgttcgaagacgaaaaaggtacttggcgggaattgccgataaacgctgccttttgggacatcgcctatgtgctgcgagatggggaggaaagggttatgaaagcctccctttatccggatgtgcatcccaacaagccgggacgctaccgttacttttatgagataaccatcaggaggaaaccagtcttgatgatggctgagttcagactgacggacaatgaggaagaatggagaacggcggaaaagacatctctttccccttatgtttcggatgcagggaagggcgggagcccacaattgataacggaagagccaatggaagaaccggtctataaagtagtggaagtgatgcccgagtttccgggaggtatgaaagccttaatggattttattcaaaagaatatccgttatccggaagaagcccgtaagaatggcattcaaggaagagttgctgtcagcgtggtgattgacgagaatggtcgtgtgacggcccccgttattatgcgcagcaggtatcctgccctggatgaggaagcattacggattgtagaattgatgccacaatggaaaccggggatgcagcagggtaaagccgtgaaggtggaatttacttttccggttacttttaaattggagtagtagcacccggtaagattaagcacaaagacacggaggcatagagttttattctttttccttgaatttaatatctctgtgtctccgtgcctctgtgttctatttaaggaagcgaggggtgtaatttctcttgcaagaattgtcccgtataacttgccgcacacttcgccacttcctccggtgtaccggtagctacgatgtttcctcctttgtcccctccttcgggtcccaggtctatcacatggtccgcacacttcaccacatccagattatgttcgatgatgacaatgctgtgcccgcggcgtattagggcatcgaaggcttcgagcagtttcttgatgtcatggaagtgtagtccggtggtcggttcatcgaagatgaacatggtcgggtctgctttctcctggctgaggtagaatgcgagtttcacgcgctggttctctccaccggagagggtggaggaggcttgccccagtttgatatatcccaaacctacatcctgcaagggttgcagcttcttcacaatctttttctgtccgtgttgcgtaaagaattcgatggcttggtttacggtcatctccaatacgtcgtagatattcatgtcgtggaacttcacttccagcgtgtccgccttgaagcgtttgccgtggcaggattcgcattccagtacaaggtctgccatgaattgcatctccaccgtgatggtgccttcacccttgcattcctcgcaacggccgccttcgctgttgaagctgaagtatccggcactgtatcccatctgcttggcaagcggttggtccgcccatagtttacggatttcatcgtaggccttgatgtaggtcacggggttacttctcgatgacttcccgataggattctggtcaacaaactctacattgcgcaggttctgcaagtctcctccaatggaagtgaactcgcctggacgttcgttgcattcgtccaactctcgtttcagggcgcggtagaagatgtcgcgtaccagcgtactcttgcccgaaccgctgacaccggtgactacggtcattacattcagcgggaaccgtgcctctacacccttcaggttgttttcgcgcgcgccttttatttctatgtagttgttccacgggcggcggtgttccggcagggggatggtttcttcgcccagcagatagcgcacggtatagctgtcactgtctttctgaaggtctttcatatctccttggtagacgaccttccctcccaggcggcctgcccggggaccgatgtcgatgatatagtcggcagcacggataatctcttcatcgtgttccactaccactaccgtattgcccaactgttgcagctggcggagcacgtgtatcagtttgtccgtatcgcggctatgcaggccgatgctcggttcgtcaagaatatacaggctgcccaccagactacttcccagcgaggtggcgaggttgattcgctggctttcaccgccggagagcgagttgctgaggcggttcagcgtgaggtatcccaaaccgacatccaataggaattggatgcggctgttgatttctgtcaggatgcggcgggctatgtcggcgtcatgtgggtctagctgcaggttgtcgaagaagagcttcaactcagtgatgggcaaatctaccagttcggagatgttgcgtcctcccacgcgtacgtagtttgcttcgggcttcaggcgggtgccgtggcatttggggcagagcgtctttccgcggtagcgtgccagcatcacacggtattgtatcttgtactgattttcctgcaccatcttgaagaaggcgttgatgccctcaaagtagggtgtcccttcccacagcatccggcgttgctcgtcggtcagttcataatagggagtgaagatggggaagccggctttctcggctccgtgtatcaccatatccctccattcgcccatcttttcgccccgccagcatacaacggctccatcatagacggacaaggagcggtcgggtatcacgagatgctcgtcgatgccgatgactttcccgaatccctcgcatacggggcatgcaccgatgggagagttgaaggagaacatctggtcgttcggttcttcgaaggtgatgccgtctgcctcgaacttggtgctgaaacgatagaggcaggtactcccgtcgggctggtagaaacgcagcaggcaggcaccgtctccttcatacatggctgtttcggccgagtcggtgaggcggctgacggaatccttttctgaagaggctgtcatacggtcaatcaacagaaaaactgtgtctccggctttcggcttgtattcgtcgatgcgcatcatttcaccgttcacttccagacgggtgaaaccttgcttcatgtctatctccagttgttgttgcagcgtgcggtcttcgcgcagcaatatcggggcgagcacggtatacttggttccttccggatattccagcatgcacttcacgatatcttctgccgagtgtttcttcacttcttgtccgctgaccgggctgaaggtcttaccgacacgtgcgtagagcaaccgcagatattcgtatatttcagtggaggtacccacggtggaccgtgggttacggctgcttactttctgctcaatggcaatggcaggtggaatccctttgatgaaatcgcattcaggcttgctcatacgtcccagaaactggcgggcataactgctcaagctctccacgtagcggcgctgcccctcggcatataatgtatcgaaagcaagtgaggattttccggaaccggacagtccggtgatgactacgagtttgttacggggaatctctacgtcaatgttcttgaggttattgacacgggctccctttatgataatcgatgtattttctgccatataaaagtcacttatgtgatttaggatttgcaaagataatgcaaaccggggtagaataaaacgaacctgctggaaaaatcgtatcagataggcaaggttaagatttgttatactttaggatgactgctaatttacattaaataaaagcactaaattcgcatccgactccttttaatgtccgaacatggtaaagcgtaatataaaatggcttcttgttgtgctggtgttaggtttatgcccctcaatcctgcatgccgaagacccttatggagagatgaaagctctggcagatagtgcgcagaaagtgttgggacaagaccgattgccttccatcaatgcccggtggataaaacttgcccgcgaactgaacgatacggtacagattagtgatgcccataacaacttgatttctcattattatcagttgggggacattgaccaattgaaagccgcaacctatgaatatatggactggtgccggaaataccaacggacacgagaccggtatatggcgtggcggcagtacattcagcgtatgacggagaaaggtatgcaggaggaggcgatggctgaaaccgtcaggctccatcaggatgccgagcaagcccgggacaaatacggattggcatgtggcgaaatgtgcatcgggtataaccatcgggtctttggaaacaacgtaaaactgtgtatagagaattacaacaatgcactgaaacttttcgaggaaggcagctattatcgtgacgcatacgtggtgttgcttaatattatccagacttatctttcacgcagtgagtatgcagaggccggcgagtatctgagtaaattgtcgcaactggaggacaaactggaccgtaaacaagtcggcatagacccttccctgcacctgcgtttctgtgaattcagggttataggcttattggccaatgaaggtagaaaggctactgagccttatattgaggagaccgaccgcttctaccgtcaacatccggagagctcgacgcccgaagcatggtttggctataagataatgtgttgccgtatcctcggtgatttgaaaggtaacattgcttacgtggattcactcatggattatcagcattcactggggctttgctatccttataaccattatatgaaaggagaactgcaggaacagttgggcgattatcgtgcggcttgccgcagttatgccagatatgccgccgtgagtgactccgtgcgtacggcagaaatggatgacaagctaagcaaatatacggcacagtttgaggtggaccggttgaagatggagaagctggagctgagtgccagattgaacaaggaacgactgatgatagccttggccgttggcggactggtattgttgcttttgctgctcattacttatctgtatatccgcaccctctccatgaaccgcaagttggaagctgcacgcagggcggtggaaaaaatgagccaggtcaaaagttcctttatacagcatatcacccatgaaatccgtactccgttgaattccatcgtcggcttttctaccttgctggctcaagagaaactggatgatgtggagaaacgcgagtatgttgaacaagtggagggcaacaatacatatctgttgagtctgatggagaacatactcaatattgcggatatggattcgcgagtgtgggagatgccgcgggaggagatagaagtggatgcgtgttgcaaggaatgtattgagggcttccgtccggaactgaagccgggagttgaactggaatatgtgcctgcttccggcattatggccttttatgcagcccggcaatggctgaaaatggtgctggtgtctttgttggataatgcggtgaagtttacggaagaaggtcatatacgcgtttcctgcgaggaagataagtcccgacatgtattgcgcttcgtgatagaggataccggtataggcatcaggccggacgaatcggaccgtattttcgaacgtttttataaagtggacacgtttaccaaagggtccggattggggcttgccatagccaatgagataatggagttggtgggaggccggatttatctggatgacacctattgcggaggatgccgctttattgtggaatggccgatgaaggacaaaccttaattataaactattttaagtattaaaaagctgtaattagagaatgagagtaaaatcccttttatgtgtattcttcttgctgctaatggcgggaggagtatttgcgcaagtgcagaccgggtctgcctatcctaaacgtgaatttcgtgcagcatggatacagtcagtaaacggacagttccgtggaatgccgaccgaaaaactgaagcagaatctgatcgggcagttgaattccttgcagaaggcgggaatcaacgccataattttccaggtacgtcccgaagcggatgctctgtatgcttccagactggaaccgtggagtcgtttccttaccggagtgcagggtaaagcgcccgaaccctattgggaccctatgcagtttatgattgatgaatgccataagcgtggtatggagtttcatgcatggattaatccgtatcgcacgaagacgaccttgaagagtgagttggctcccaatcatgtgtacaatgtccatccggaatggtttgtcacttatggcgaccagttgtattttgacccggcactgcctgagagccgccggcacatctgcatggtggtgagcgacatcgtttcccgctatgatgtggatgccattcatatggacgattacttttatccttatcccattaagggaaaggatttccctgacgatgcaagttttgcacgttttggcggaggtttcagcaataaaggagactggcgccggagcaacgtgaatgtgctgattaagaaactgcatgaaacaattcgtgaaatcaagccgtgggtgaagttcggggtttctccgtttggcatttaccggaatgaaagcagtgacccgcttggcagtaagaccaaaggcctgcaaaactacgatgacctttatgcggacgtgttgctgtgggcccgtgaaggttggatagactataatattccgcagatttattggcatataggacatccggttgccgactatgagacactggtgaagtggtgggccaggaatacggaaaaccgccccttgtttatcggccagtccgtgatgaacaccgtgcagaatgccgaccccaagaacccgtcgataaatcagcttcctcgcaaaatggccttgcaacgggcctatcagaccatcggtggcagttgccagtggcctgccagtgcggttgtagagaatgcaggcaagtatcgcgatgccttgattgccgaatatcataagtatccggcgctacctcccgttttcgatttcatggataacgaagccccggcaaaggtacgtaagatgaaaccggtgtggacggaagacggatatattcttttctggacagctcccaagtataaagaggaaatgaaccgtgccgtccaatatgtggtctattgctttaatgacaaagagaaagtgaatatagatgacccttcccatattgtagccatcacgcgcgataatttctataaacttccttatgaagacggaaagacaaagtaccgctatgtggtgacagccttggaccgtctgcataatgaatcgaaatccgttggaaagaagattaaactttaaaaattagggattaaggattagggattaatcattaacgtttaatccttaatccctaatccctaataaagtatcaatcctgctattccacaagctacaatcattcctatcgggttcagtttatatatctttgtgcctataaatgccacgaggaagatgaggcagctgatgacgaaggaatatatgtcttctttgggagaactgaagttttccgaattcatcaataccagcgcggctgaggccagcagaccgaccactgccgggcggagcccactgaataccgcttccacggaaggatgtttctggtatttcagaaagaatttgctgatggtcagcatcagtaggaaagaaggaagcaccacggcaaacgtagcaataatagaacctaaaataccatagcttgtaccgtagcaatcagctatcgtagtataacccacataagttgccgaattgattcctatcggaccgggtgtcatctggctgattgccacaatatcagtaaattcctgcgctgtaagccaaccgtaacgggtaactacttcaccttgtatcatagacaacatggcatatccgccaccaaagccgaaaagcccaatcttaaagaatgtatagaataactgtaagaaaaccatgattagtaattaatgataaatggttagtgattaatgttgctatcctttttaattctttaatttttaattcttcggacgttgaaaacgtccgaagcagtatcctcctacacctgccgcaatgataatccagatgggagagaagcccaacagccagatgagcagtgctgaaaccaccggtatccatatgttgtatcggtttatccgggccgatttagccatgctgaatgtaggggctgcaatcaatgcaaccactgccgggcgaatacctttgaatatacgttccacaatggtgttgtccttgaagttgtgaaagaacaacgctatggcgaggatgatgagaaacgaaggaagtatggttcccaatgcagtgattatgctccctcgtattccccgtagccggtaccctataaaaatggatatattgacggcaaggatgcccggagcggactgtgatatagcaagcaggtcaatgaaatcttctttggctatccagtttcgtttggttacgatttcgttttctatcagcggtaccatagcataaccgccgccgatggtaaaggctcctatcttaaagaaaatggagaatgcttcaagatatatattcatattcaaaatgttgtaatttactttatttctttatcatctttcccttccttccctctcttggcatactggcttgggctcatattgaaatgtttcttgaatacttcacggaaatatttcgcatcactgaaaccggtcagctctgaaatctcggtgatggtatgcttttgttctttcagaagttgggcagcatgtttcagtcgaatcagccggatgtagtcagccggagcttggtcggtcagtgcctttatcttattgtagaagctggtcctactcatattcagcaggttgcagagcacgtcgacgttgaagcttgggttgtccatattgtcttcgacgctctttttgacggttgcaatgaatttccagtccaagtcgttggagcagttgatgcaatccgtattgttcttctcgtcgttcaggtccaggctggcatatttgtggcgcaacagtgcccggttagtcagcaggttggcaatgtttgcccgcaatataccgatattgaagggtttcacaatatattcatccgctccgctttgcagtccctcgatgatattcttgtcggtattcagtgctgtgagcaggatgatggggatatgtgatgtctcgatgtcgttcttcaggatatgacacaattcgtctcctctcatttccggcatcataatgtctgaaatgacgaggttgggcatatactccttgacaatggtcagtgcttcttttccattggagcatacttgtatgttgtattgttcagacaatgttctgcgcagatattcccttaattcgtcattgtcctctacaataagaattttctggtggttactgttgttttgtgactgttgttgcgtcttgtcgtagattccactggaagcaggggatgatgtagtagaggcattgataggcactccggaagccgaataaacaatccgttcgtttttgggttgagggcgttggattgctttgcggaaatgcttgttccctttgggaaacgtgattttgatgcaagagcctttcccttccatgctgctgaagttgagctttcctttatgtaagcgtacaagtttccctaccagaagtagtccgatgccgctgccggtaactttggaattgatagcattactgccacggaaatgcatcttgaacagctttttctgttctgaagccggaattccgataccggtatctttcacctcaatactccaggtatcttctgtctcggaagtaaagacatgtacattgccgccgtccggtgtatatttcagtgcgttggatatgatatttttcaaaatggaatccatcttgtccttatctaaccatacgttcagataacggaagctgctttcgtaggttaggttgatgtgttttatgtttgcgtatgaacggaaagcatcgatcgtctcttccatatatgtgctcagttcgtattcggatacgtatagacttccggaataggtgtctgcgcgttcgaaattaataaggttggtggtcaggcgcaacaaggcatttacgtttcgcagggctgtattgatgttgctctgtccgctggaagtcagttgctcgcgttcggtgatttcttccaagggtgctttgatgagcgtcagtggagtacgtatatcatgcgccgtattgacgaagaagcgtattttctcatcggattctttccgctgttttctcaagactattattcgtagagtgatgcttgcaatggatatgataatcactgcatagagtatcagcgcccagaaactgagccagaggggttgctcgataatgatgtccatactgcgttcctccaggacaatacgacggtcttcgttggagatggcacgtacgcggagggtatagttgcccggactcaggttggtaaaacggatgacgttttcctctcccggacggctccaaccctcatagaagccttccagtttccaggagtacagaattagggaaggatagtcatagttgatgtctgagacctgcaatgagaagatgttctggttgtacttcaaacgcaaggtttttgtctcgtcaatatccagaataagtggagaaccttcatccttgggataaacggtctgatagaatacccgcaggtcactgaataccattttgaacttatagtcgcgaggcaggatcatgtctttgttgaattctatggctccatccgtactgccgaaaatgaaattgccgtttttcctcaaggtgcctgaggctgcgttgaaatggtcagacttcagtccttgttctttggtccagttatggaatgtctcttcgacaggatagaaggtggacagaccgtgttctgtactcagaaagatatttcctttaccatcagacaatagtgtatagatattattggaaatcaaggcgcagttgtctctatgataatgtctgaatgtgtttttggtcgtatcatataccagtaaaccggcattgttggtaccgatatacagcattccgtcggaagcttggcatagggagtagatgtagtaggattctaccggcatctggatataggtatacttaccggttgctttttccaacaggtacaagccggtggaagtgcctatccacatatgtgtggagtctttctctatgatggcagtgataccattcaagcccgggaaatggcgtatattttttctggaataatctatttcttttaagttataataccctccggaccagatgtttcctgaagaatctttcataatggaacggatatacttgtccggccggatattcagattactgaataaagacggagtaaagaactctgtggacagtagtttcttgttgatctggtagatgccggaactatatcctccggcccagatgatgccgggctccacttcgcacaatgagatgaagatatggtttttactatggcttgcggtgtcgaaactgctgagaaaagaatgccattgtttcgtcttgctataataaaggctgatgccgttattggtggcaaaccataaatcgccgtcatggtcttcaatgatggcatttacctggtcattgatgagtgactgtttattgccgatagagtgttttatccattgataatcggcatatcggttgttgcgtacagttataccaatgggataattagccatccagatgcgttgttcactgtcaatgtagatatcattgatggtatttccgttcattgagttgtaccggttatagtcagcaacaatgtatggtatagattcataggtatcggtattcattttgtagacaccggccccgtctgtagctatgaggatttcattgttattgtaggcacggatacagttaatactaacgtccatcagtccggatgggatatgcatgactttgtgctcattcaggtcataggtaaatattccccgttggaaagtaccgataaaaaccttgtgagacggtttatgatagtatagttcgttgatttgtatcttcaaggtgtccaattggttgcagggactgagggtgagggtgttgttggccagctcagcataatgtatgccgatgtcggtcccgatgaagaagtgggtcgaatcaatctgtgcgatatcagtaattcgttctcctatttcgttttgaatgaatgtcaccttctgggtattgctgtcgtacagatatagagcatcttcattgcaaagccatattacgctgttggcatccacaaaaccgtaactgataggggttggacgtcctttcacttcgctttcgggtagcttgtataccaggacaaaacggtcgtgttttgtatcatagcggaacacgcgtcctttcttgccaatttcccatatggttcctttggaatccacatagagccagttcaggttcatcatggaattcacttcctcatctccatccatcagtttgtacggcttgaattcttttccgttgtatcggtcgatgccgtcgtgggtaagaaaccacatgtaacctttgggtcccttttgaatagcatatacccgtctgttgctcaaaccgtcttccacaccgatgtatttgtatgtttgtgcaatgcctataattggcaataatagtagtatgcagaaaaagaagtactttttcataattgtcgagcggtttttttgaatgttgtactgagggagagttgaaaataaacacaaaaataatgcttttgtttgagaaaagcaaaaaaagaaagcgaagaatagaaatgtaacaagcgcgggattattcataacccgcgcttgttacatttctataaagaaggaagttcagctcattttttattggcttccacccacttgcgtgcattgacaaatgcttctacccaaggagtgatttggtcgctgtttacgtggtctgcggggtagcaaccgttctgccaggggaagatggcacgttccaagtggggcatcatggccagatgacgtccgtcggcacttgccaatccggctatggaataatctgagccgttggggttggaagggtattcgtcgtatgagtatttcagcacgacgttgtatttgtcctcgtcgtatggcaaggagaattttccttcaccgtgagctacccagatacccagtttgctgccactcagtgagccgagcattacgctgcggttggtggggacggtaacactgaggaatctggattcaaacttgtgtgagtcattatgaagcatcttgccgtttttcttgtgctcgggattgataagattaagttccatcatgagctggcagccgttgcagacacccagtgaaagcgtatcctcgcgtgcataatatttgtcgagcgcttcttttgctttcggattgaagaggaaagcacctgcccaacccttagcagaaccaagaacgtcggagttggagaaaccaccgcagtaaacaatcatgtttacatcttccagcgtctcgcggccgctgataaggtcggtcatggtaacatccttcacatcgaagcctgccagatagagtgagtaggccatttcgcgttcgccgttggttcctttttcacggatgatggcggcgcgtatacctgacggtgtacggcggtccggattaatgccgtattgtgagaacttgcctttgaagtccggcatgaaggcgaattccaccggttgcatcttgtagttttcgaaacgcttcttggagcagccgttcatggactgcttacggtcaaggagataagaagtagagtaccatacatcacgcatatagtcgatgccaaactgataagtaacatcgccttttgatacaagaatatggcgttcgtctgtcggtttgccgagcttcacgtaacctacgcctgcatcttccagtatttgctttacagcttccttgtgcttgtcgctcacctggataacgatacccgggttctctgcaaacagaatcttgataaggtcttgctccttgattttatccaggttgatttccataccgccttccacattggcaaagcacatttcaagcagtgtagtgataagaccaccggcggaaatatcatgtccggcaagaatcagtcccttgttgaccagttcctgcacggcaaggaaagcatcgcggaagtattcggcatcctgcacgctgggaacttcgtcacctaccttgcccagggtttgagcaaaggcggaaccgccgagtttcaggttgtcgaaactgaagtctatatgataaatggtagtcttttcattgttaaccagcaccggagatacgactttcttgacgtcggaaacttctccaccggcagaaacaattaccgtgcccggagaaattactttgctgccgtcggggtatttctgtgtcatggaaagagagtctttaccggtcggtacattgatttgcagggaacagcagaagtcactcaaggcctttactgccgtgtacagacgggcatcttcaccttcttgcgaacggcaaggccacatccagttggcagaaagggaaacgctgtccagaccttcggcaagcggtgcccaaaccaagttggtcaatgcttcgctgacggaaagaacggagccggctgccgggtcggcaagtgccgcctggggagcatggcccagagaggttgcgatacccttttcgccgcgatagtccaaagctaccacaccacaatcgctcagaggcaactgcaattcaccctggcactgttggcgggcaatcttgcctgttacagaacggtccaccttgtttgttaaccagtctttacaagccacagcttccagttggagcacattggtgaggtattcgtgtagttgggaaacttcgtattggggcatttcgtagtgacgttccacggtcttgtccaccatataggtcttgggggaagagccgaacatctgttctacggcgaggtcgaacggacgtacaccgtcagcttgctggaaggcaaagcgatggtcgccggtcgtttcgccgactacgtacatcggggcacgctcacgttcggctaccttgcgtacatgttcgatggcctcttcctgaatcagcaagcccatgcgttcctggctttcgttagcaatgatttccttggcagacagagtcgtgtcaccgatgggcaacttgctcatgtcaattaaaccgccgcattcctctaccaattcagacagacagtttacatgtccggcagagccgtggtcgtggatggaaaccaccggattggtctcttcctcacaaagtgcgcgtaccacgttgtaggcgcgtttctgcatttcggcgttggcgcgttgcacggcattcagctcgatgccactgctgtagcgtccggtatctacggaagatacggagccgccgcccaaaccgatgcgataattgtctccaccgatgacaaccactttgttgccggcttccggtgtacctttcaaacagtcacgctgggtaccgtagcctacgcctccggcaagcataatcactttgtcgtaaccatagacttcatctttttccttatgttcgaaagtgagcacggaaccgcagattagcggttggccgaatttgttcccgaaatcactggcaccattggaggctttgattagtatttgttcgggagtttgatacagccatttgcgtaccggcagaatctcttcccagggacgtccttcttccgtacgggggtaggaggtcatgtaaacggctgttccggcaatcggccaagagcccttaccgccgcccatacggtcgcgaatctcaccgcccgtaccggtagacgcaccgttgaacggttctactgttgtgggaaagttatgtgtttccgctttcagggagatgacactcttgatgtcttttacttggaaatagtcgggcttggagtggtctgccggagcaaactgttcgataaccggaccttcggcaaaggccacattgtctttgtaggcagagataatcttgttgggattctcttgtgtggtcttctttatcatttggaagagtgaagattcctgttccactccatcgatgatgaatgttccgccgaagattttgtgacggcagtgctcggagttgatttgcgcgaagccgaatacttcggagtctgtcagagggcgcccgaggtctttctctaccttcttgaggtaatccatttcctctttggaaagtgccagaccttccttttcattgtatgcctccaggtcttcgatgtgtacaatcggttccggctgccggttggttgtaaatacattctggtccagccccttgtacatacgttgcagcatcgggtcgtggtctgcgttctcatcttttacggggaagtactcttcgatgcgtatgatgccgtccagccccatattctgggtgatttctacggcgtttgtactccaaggagtaatcatctcacggcgcgggccgacgaaatgtcctttcaggttgtcttcactttcgggggtggcttctccaaaaagccagcagagtttgtcgctgtctgcctgggggagttcatgattacattctacggcaatcacactcttggatggggttctgaaaaaaagaatcatagttatatttacgattttacgatttacgattttacgattgaagttacttctttgagtatcttcatcttttcttcttgggggcaaagatacgtaaaatcggtggggaggagaaaaaaaggaaaacaaaaaacgcatgcaattttactcgtatgcgttttttgttctgtttcataaaaaccggatgtgtgttattgtatgacgatttcatccgtaaataagaattgcttcttcccttgtatggcatggaagcgtacatatcgtgcctcagtgggggtgccaatccagccgaaatcacggaatatcacgtcctttccggcctcttcctcgctgcagatatcactgcccagcagggtgaagttcttgccatcaacagatgcccatacttccactttggcagggagaaatacttgtggggtacggatttgcatgaagttggccatgacccgatgtatggcggtcacttcgcccaggtcgataatggcatccaaatcattggggcagaagccctgccatcgtccgtccatgtagcttttgccgccgcgaagtccgtcgaggagaccggcgtcaccgccgcctttgtatacttctttatgctgatagtatctgccgcccggtgcataggttatctttttgcctatgcccttatggtagtcggtgcgcaggtgaaggctttttccgataggcttttctccgtcgaaaaggcgtgcggtcagcaatatggagtcttttacggcaaacggtttcttgtataacttggaagatacagtcggttcggagccgtccgttgtgtagcggatgtcaatcggatgtttttcggaggtgagggacagcatgatttttttcttggcatagtcaacggtctggctggtctgcacttgttccgacaaggtgaacgggttgtaccctttcgtccggatgtatcgtatttcgttgttgatacgtctcttgaaactctccggatgcttgttctccatgggagtccagcctacttctgccagagcgatgatgcgtgggtatatcatatattcggcatgttcgtaagtgggcagatattcagcccatacattgccttgcacgcctaatatgtatttgcagatatcacttcccaatgaatcgggagccgggtcgtaggagtaggtctgtccgatggggatgcaggcgccaaacgccagcggctgtgtctcagggtcatcctggtagtggtccagatagcagtggctctccggtgtcatgatggcgtaatgccccatgcgggcggcggcaatgccaccctccgtaccccgccacgacatgacggttgcgttgggggccaggcctccatccagtatctcgtcccagccgatgatttcacgccctttgtcgttgaggtacttctctatgcggactatcatatagctttgcagctcactttcatctttgagcccttcttccttcatgcgcttctggcatttggggcatgccttccagtggcgtctgctggcttcatcacctccaatatggatataccgggaagggaacagccgtatcacttcatccagcacatcttcgaagaacttgaaggtctcttcgtttccgatacagacttcaccggatgtataaggcttgccggtacaggacagctgtggataggctgccagtacttctcccgagtgtcccggcatttctatttcggggataacggtgacatgcctcaagcgggcatattccagaacctcacgtacatccgcttccgtatagtagcctccataggctccttcttcatccttctcgcagaagtgatggtcatatttcccccaatcctgcagattggcggcttttctccaggctgcgaattctgtcaggcggggatagcccggaatctccagccgccatccggcaccgtcggtcagatgccaatgcaggcggttgattttgtaggtggctaccaggtctatttgtttcttgacatagtccgtgttaaagaagtgtcttgaaacatccaggtgcagcccacgataggggaatctgggttcgtccttgatggtcgtgactggcagttccttcccgttacgggcaagttgtgccagggtttgcagtccatagaaggcacctgcagcggaggaggcctgaatgtttacaccttgtttgctgactgtcaggttgtagccttcggcagcgattggattatccgttgcgtccgttatttctatcgttacaaaagggttcttgtcgacaagcttcatggggatggcaaagtccggcagataggccagcaggtcattcatgtcggatttcgccagattggtcgagaaggttaccgtagatggcagttctactgtttttgacgttgtttgggcatactgcggatatggaaccacaccgagttccttgggggattcgcatgccgtcagtagtaagacggccatggaaacgagtgttagagttttttttattcgtttcataagggggtattgttaagttcggaggtaaatatacggaataatatgtaaaatggataatctttacttcttaaaatccttttccgtcgaaaaaacgttaacactattcgttcgtctcataaaaaagtccgatatttgcagccatgattcagatagagaccatatttgacatattgtggaaggggttcattatcggcgtcattgtgtccgcgccattgggtcctgtaggagtattgtgtattcagcgtactttgaataaaggacggtggtatggtttcgtaacggggataggagcttcgctaagcgatattgcatatgctttgctgacgggctacgggatgagtttcgtttttgattatgtcaacaagaacatcttttacctgcaacttttcggaagcattcttctgttggcgtttggcgtttatacgttccgcagcaatccggtacagtccatccgtccggtatccatcaacaagggttcctattttcataacttcataacggcgtttgccgtcacgctttccaatcctctgattatattcctttttgtaggccttttcgcccgcttcgcttttgtaagtgagggagtgctggtattcgaggccgttaccggatacttggccatcgcattgggcgctttggcatggtggtttggcattaccttttttgtcaataaagtccgtacacaattcaacttgcgtggcatctggatgctgaaccgtattatcgggagcattgtcattgtggtgtctgtggtgggattggtgtttacgctgatgggtgaatcgctgtattgagtgggaaggtgaaaaatcataattcatacattttatcgtgaagattgcgcaacaactgaaagaaaagaatatagccgaataccttatatatatgtggcaggtggaggatttgctccgtgccaacggctgtgacatagaccggatacgccagaacatcattttgcgctatccggaggaggaacggcctgcgttggaagaatggtatggaaatctggcagatatgatgcgtgcggaaggcgtaacggaaaaaggacatctgcaaatcaaccggaatgtcattctgaacctgacggagctgcatggcgaattgctggcttctacgaaatatccgttctataatgcggcttatttcaaggcactgccttttatcgtggagctgcgccagaagagcggccggaaagaggagcctgaggtagacacttgtttcgaggcactttatggagtgctgctgttgcgcttgcagaagaaggaaatcagtcagggcacggcaaaggctatggaggccatcagcggtttcgtctcgttgcttgccaactattatgacaaggagaagcggggagaattggagttgatggataattgataattatggaggaaaatattgttcatcgtaacattctatatataagtgtaactttattaaatgaatattctgataaccggtgccaacggtcaacttggcaatgaaatgcgagtgttgtcgaaagaaaacggacaacatgcttattttttcactgacgtgcaggaattggacatttgcgacgaacaatctgtgcatgggtttgtgaaggacaaccggatagatgtaatcgtgaattgcgccgcttatacggctgtagacaaggcggaagacaatcaggagctttgcgacaagctgaaccatgtcgctccgggctatctggctgccgctgccgaagcttgcggtgctgcattgatacaagtgtctaccgactatgtttttgacggaaccggacacaccccctatacggaagaggcggctacttgtcccaattcagtatatggttttaccaaactggcgggtgagcaggcggtgatgaagtattgcagccgtgccatgatcatccgtacggcgtggctctattccatttatggaaataattttgtgaagacgatgctccgtttgggacgcgagcgcgagacactgggagttgtattcgaccagataggtacgccgacatacgccaatgatttggcacgcgccatctttgcggctatcagccagggaatcgtgcccggcatctatcacttcagcaacgagggagtctgctcgtggtatgattttacgttggctatccatcgtctggcaggtatcaagagctgcaaggtaagtccgctgcatacggacgaattccctgccaaggcaccgcgtccgcattattctgtgttggacaagacaaagataaagaagacattcggcatcgatataccccattgggaggcgagccttgccgtctgcatgaagaatttggaagagtgattattactgactaattgatatatggccaataacaacgaaatagagagacggagaacgtttgcgattattgcgcatccggatgccggtaagacatcattgaccgagaagctgttgctttttggtggacaaatccaggtggcgggtgccgtaaagagcaataagataaagaagacggcaacgtcggactggatggatattgaaaaacagcgtggtatttccgttaccacttctgtaatggagttcgactaccatgactacaaggtcaacatccttgatactccgggtcaccaggactttgctgaagatacctaccgcacgctgacggctgtggacagtgttatcatcgtggtggacggtgcgaaaggtgtggaaacgcagacacgcaagctgatggaggtctgccgtatgcgtaatacgccggtgattatcttcatcaacaagatggaccgtgaagccaaagacccgttcgacctgctggacgagctggaggaggaactgcacatccacgtgcgtcccttgacgtggcctatcgagagcggtgtccgtttcaagggtgtctacaatatctacgagcataacctcaacctctaccagcccagcaagcaggtagtgacggagaaggtggaagtggacatccataccgaggagctggacaaccagattggcgcccaactggccgacaagctgcgcggagaattggaactgatagacggtgtttaccccgaattcgataaggaggaatatttgaaaggagagcttgctcccgtattcttcggttcggcactgaataatttcggtgtgcaggaactgctggattgctttgtggagattgctcccagtccccgtcccgtgaaggcggaagaacgtgaggtggagccggaagaacctaaatttaccggattcatcttcaagataaccgccaatattgacccgaatcaccgttcatgtatcgctttctgcaaaatctgctccggcaagtttgtacgcaatgccccgtacttgcatgtacgtcatggcaagacgatgcgtttctcgtcgcctacgcagttcatggcgcagcgcaagacaactgtcgatgaggcttgggcgggagatattatcggcctgccggataacggtacgttcaagattggcgatacgctgaccgaaggcgaggcgctccacttcaagggacttccgagcttctcgccggagatgttcaagtacattgagaatgccgacccgatgaagcagaaacagcttgccaagggtgtcgaccagttgatggacgaaggtgtggcgcagttgttcgtcaaccagttcaacgggcgtaagattatcggtacggtggggcagttgcagttcgaggtcatccagtatcgtctggagaacgaatacagtgcgaagtgccgttgggaaccgctcagtctgtataaagcctgctggattgagagcgatgatgcggctgaactggaagccttcaagaagcgcaaataccagtatatggcgaaagaccgcgagggtagggatgtgttcctggcggacagcggatatgtgttgcagatggcgcagatggacttcaagcatatcaagttccactttacgagcgagttctaagctatacgatttttgctgactcacggctataaatgatgcaagtcgaagaaaaagaggaggtacaaagtaatgaaaaactttgtacctctttatttattgtgggaagaaagtgttacctttgtttctgtaacgattaatatgcattgattatgaaaactgttgaagtaagctcgttccttaccgattttacaccttactcattataaacacaaaatttcaagatgaaacatacctccctttttctcctgctgattctccttctggggctgacagcctgctcgaaacctgccgatagaactttgatggactacgaacagtccctttctcatgctgactcgttggtgcaatgcggtgctgtcgacagtgcccgggccgtccgcctgatttccggtttgcaccgtgagtataatcagataaaggagctttccgatggcaggcatgtgcggctgaagccggtcagtggttacgaacgttttttctggggagtgttttctgtgattatgttcagcatttccggtgctatgctgttcagccttatccgtttcaagaaagaacgtagtcccgtaactatcttgtcaccctgagtgaaaacgaacagcgcttgcgcaacaatgaacgcgagcgcgaggaactggaagagtgcctgaaggagatgtcgctgaccgacgaagagcgcgaagaagtgcatagctcgctgatgaacctcatggaacatggcagccgtctggataaggaaaacgagtcactccgtgcccgtctcaaggagtatgaagacaaccctgtgcctcgcgaactggaactgttgaggaaagagggcgagcgtgtctgtagctaacacttgaaaagggacccgggtagcatttgaaacgtgtaccacccgataggttttgcaaagttaattaaatttgtttatttatcatatcttgtgtttctttcattctgtacgattttcccgtcatgttcagtagaatcgccttgtgcgttagcctgtctaccattgctgtaactagtactttgtctgcaataatctcgtcccatctgttgaatgcgagatttgttgtaatgacggttgttttcttgtcagttctgagtgacagatggttgaacaacatctccgctcccgccttgtcacaagaaacgtatccgaactcgtcgcagatgaccatgtcgtatcgttcgaacttgttctcgagtgcccttagtgtcattgcgttccggcattcccttatctgcgtaagcagtctgggcacggaagtgaacagtacggagtatcccgcgttacaggccgcaatccccaaggctgtagccagatgggtctttccggtaccgggattcccgtatagtataaggttgcgcccttccttgatgaaatcaagtgtctcaaggtttggcaaggccttccgcgcttctggcggaagcgcgtccgtgtctatttcgttgaggtatcgcaactgtgggaacgcggcatttttgatgcgatgccgacgctggttctccgagcggttttctttttcctgacgcaggagttcggccgtgaacatccacaggttccatcgttcatcaagtccttgctgtataagcaggtcgatgtcgcgtcgtaccagagggagtttgaggtcgaaggcatacgcacgtatccgttcgcgtatggagtcttgattttcgttttgttccattgctatgcaatttttatgttgttagacggtaactttgtttacaggttgttgtgtggcgccacatccgatcatcgccgaaagtgtgtccaatgtctgtgaggccgattcttcaatggcggtctgttgtggatcggacggggtcagggtggctgcgtcttgacggacgtttgcggttccattgccgtcactggccagcatctcggcgctcaattgttcggaagacaggcgtttgagtccccgggaggacagacggtctgccgcagccagtatgtcggcataagtgcgctggttgtcacgggtaaacacgagcagttcgacaaacgatctgggagaatccgtaaaatgtttgcgaaacagtgccgccacgtccgggtgtacctgtcgcatggccgtggatcgtcccaacgccgcaggcttgcgaaggaacgtgcccagatagtgcatcaggtcgatacaccagtcaccgagacgccgggagcgtacatacgtggctaccttgtcgcgaccgtcaagcacgacaatacgctcggaatacatctttatgggtacctcccgaccgacaagccggtcaggcacagagtaatgcacaccatcgacggtaatggtggaatacttcccgacacgggcatgccgctgctcaaagcagcccatgtcaccgtggtcaagcggccgcaaagccgcaatatcggcctgtacgcgctccttcttctcttgcgcagacatgttggaagcctccccgttgagcctgtcacagaccttgtcaagatgacactgcgcctgctccagcgaaccgaaacggacatcataggcgaaagcccgccggcggatatgttccaccgaacgctccaccttacctttctcccatcccgaacgcggattacagaaatgaggggtgaaacaatagtggagttccatgcggcgcagggcatcggtatgttcgcgctcctgtccaaggaacttcttgacggccacccgcatgttatcgtaggccattacttgcggcgtgccccccaaagcacggaagcagttgcggtgtgcttccatcagggccaacgtgtcctcgcgggagaacaggtatgcccgccgcaggttgctatggttcatcgtgaacacggccatgtgcagcttcgtcttgacaccggcaatccaaagtgtcagcacgccccagtcaaactcgcaccggaaccccggttcatactcctggcggatgaacgccgccggggacttggctggagcggacaccgccacttccaatgcacggacatactggcataccgtcgaataggcaatctctatgccttgatcgcgcaaccggcgccacatgtcaatcttgcgcatctgctgcttgcgcaatccggccgcggcattagaccggttgcgggccatgaagccgtctatcgcctccatcacctgctggttcatcactctgcggacacgtttgctgctgtcatagcgcaccggctgctgcaggtacgtgtccattgcttccgcatcggggttgtcaccgaccgcttgttcgaaagcccggagatacttgcgtacagtcttgcggctcatgccgttacgacgggcgatctcacggatgctcaatccgtcacgcctataggcgagaattatggaatctctttcttccatgtggtacatattatgaacgccattggtttttatgaatataccaattttgttcggttaaacatacccatgggtggggcacgtttcaaatgctacccgggtcccttttcaagtgttagctacagactgacaccgttttatgctaaaagtttcccgtaccgcctcattggttgtgcgggaagctttactttttagcatcttttatcattcttctctgcctttctttaatggattatcgctaatttcgagcgatttttcgtaaattcggctgaataactaataatttataatatggaaaacttgaatacagcacttttgctgatggtggtaggtatggcaacagtcttcgctatcctgctgattgttattaacttaggaaaagctcttattgcattggtgaataaatatgcgcccgaagaggtgacaccggctaaagctgcggcaaatggtcccgcacctgtccccggtaatattctggcagctatcagtgcagccgtaacagtagtgacacaaggtaagggtaaagttgctaaggtagaaaaaatctgaaataataatcttatataaaaacacaccgaataatttagtatgaaaaaggaaattaagttcagtttggtattcagggacatgtggcagagtgccggaaaatatgtaccccgtgttgaccaactggtgaaagttgctcccgccatcattgagatgggttgttttgcgcgcgtggaaaccaatggcggaggttttgaacaagtaaatctgctgtttggggagaatccgaataaagccgtgcgcgagtggacgaagccgttccatgaagccggtatccagacccacatgttggaccgtgccctgaatggcctccgcatgagtcccgtgcccgccgatgtgcgcaagctgttctataaggtgaagaaagcgcaaggtacggacatcacgcgtactttctgcggtctgaacgatacccgcaatatcattccttccattggttatgcacacgatgccggaatgatttcccaatgttcgctctgcatcacccattcacccatccataccgtagaatactacacggagatggcactgaagcttatcaaggcaggtgccgacgaaatctgcatcaaggatatggcaggtatcggacgtccggtttctttgggcaagattgtggccaatatcaaggcggcgcatcccgatattcctatccagtatcatagtcatgcgggtcccggtttcaatatggcaagtattcttgaagtgtgcgaagcgggttgcgactatatcgacgtaggcatggagccgctttcctggggtacgggacatgccgacttgctcagtgtgcaggccatgctgaaggatgcaggcttccaggtgcccgaagtcaatatggaggcatatatgaaggtacgcgcactcatccaggagtttatggacgacttccttggcttgtacatcagcccgcgcaaccgcctgatgaactccctgctgattggtcccggactgccgggtggcatgatgggcagtctgatggcagacttggaatccaatctggagtccatcaacaaatacaaggcaaaacgcaacctgcccttcatgaagcaggatgaactgctcatcaagttgttcaacgaagtggcatatgtttggccgcgcgtgggttatcccccgttggtgactccgttcagccagtacgtcaagaacctttccatgatgaacgtcattgctatggagaaaggcaaggaacgctggggtatgattgccgatgacatttgggatatgctgttgggcaaggcaggtaagctgccgggtcagctggctcccgaaatcatagagaaggccgaacgcgaaggacgcaagttcttcaccggcaatccgcaggacaactatcccgatgctctggacaagtaccgcaagctgatgaaggagaacaagtgggaactgggcgaggacgacgaagagctcttcgaatacgccatgcacccggctcaatacgaggcttacaagagtggcaaggccaagcaggacttcctggaggatgtggagaaacgccgtgccgaacgtgacaagtctccgctggacgatgccaaacccaagacgctcactgtgcaggtggacggtcaggcttaccgcgtgacggtggcatacggtgacatcgacctgcccgcttcggccaccgaaaaggtgacagctccccccgtaggcgaaggtcaggacgttccggctccgctcgaaggcaagttcttcctgacaaagaatgcgcaggaaaccccgttgaaagtgggtgacaaggtgaagagtggtgacctcctctgctatatcgaagctatgaagacatacaatgccatccgcgcagactttgatggaacggttgttgccatctgtgtcaatccgggtgactctgtttctgaagatgatgtattaatgaagataggataatggaagatatatttgcaaaactctatgatatgacggccttcagcaacatcattgctgatccgtcgttcctcgtgatgtatgccatcgctttcatcctgctttatttaggtatcaagaaacactatgaaccattgttgttggtacccatcgctttcggtgtgctcattgccaactttcccggcggcgagatgggggtgattcaggcagatgaaaacggaatggtcatggtaggcggggtgatgaagaatatttgggagatgccgttgcacgagattgcgcactacctcggactgatgaacttcatttattatatgctgattaagaccggctttctgccgcctgttatctttatgggtgtgggtgcgctgacagacttcggtccgatgctccgtaacttgcgtctctccatattcggtgcggctgcgcagttaggtattttcaccgtactgctttgtgctgtgatgatagggttcactccgcaggaagcaggtgcgttgggcattatcggtggtgccgatggtcctacggctatctttactaccatcaagctggctccccatctgttgggaccgattgccattgctgcttattcttatatggcgctggtaccggtcatcattccgatggtggtgaagctgttctgtaccaagaaggaattgatgattaacatgaaggagcaggagaagctgtatccttcgaaaaccgagattaagaatctgcgtgtattgaagattatcttcccgattgcagtgactacgattgttgctttatttgtgcccacagcagtacctttgattggtatgttgatgttcggtaacttgattaaggaaatcggttcggatacaagccgcttgtttgatgctgctgctaatagtatcatgaatgcagctaccatcttcttaggattgagcgttggcgccacgatgaccagtgaggcattcctgaattggacgactatcggtattgtgattggtggtttcctggcatttgcattgtccattacgggaggtattttctttgtgaagctgttcaacctattcagcaagaagaagatcaatccgctgattggtgctaccggcctgagtgccgtacccatggcaagccgtgtctgcaatgaaatagcaacgaagtatgacccgaaaaaccatgtgctgaattactgtatgtccagtaatatctccggtgtaatcggttcggctgttgcggcgggtgtgctgatttcattcctgggataaacggtcagtaggaaaaatataaagaaactccggtatggctttgtaaagctatgccggagttttttgtatgtttttctttgaggggcatttcattcactaaccaccttccaatattcagccaccgccatcttctctgccagatacgcatcaattaggttggtgtgtgcctgcgtccacgagagttgtgcggacaacacatctgccatgctggcttttccttcattataagagaaggtgacaaggcccagattctcttcggcgagtatcatattctcccgggccgtcttgacttgctgttcagtttccgtcagttttgtggtggctgcggagagttcctccagaatattgtccgttacatagctttgttgcagcttctgtatgccgatataggctttctgttggcggtttgtcttgaagcgggctccccaacggaagatggggatgctgacattgactcctacgacgggagtatgaggtacatcctgccccatataggtgattcccgtatcccaaccggtagcgaggaacatgttgacttgtgggttgtagcggctgagggcggcatgccgttgcgcttcactgcgggcgatgttcacggaggtactggcatattctgcccggcgaagcagcacatcatccaggcccagaggtatgatggaggcagtcggtatatctatttcggctatgctgtctatgggagcgtccggttccgagcccataaggatattcagtttttgcagggcaagggtatggttttggcgtgccttgatgtactgcaattcggcttccttacgtcgggtggaaatcatcagcaagtctgtgcggctgatggcaccgtcatcaaagcggtcttggatgatgtcgtactgctgttgtacaatatcctgaaaggtagccgcggctttcagaccggcacgggcggcagaggcattccaatagacggcgtcactttgatagtgtatctggtcgagggtcagctctgtggtaagttggtccagtgcctcttcggcttgcgccactttcttttgggctattagggaacctccggtataaagcggctgcgtcaaggtggcaagtgcctgataggtataagggtggtagtctcctttcggactgttccattggtccagatgattgagattggcggtaccctcggcggtgatgtcaatctggggcaggaaaccggtggaggcaatcttgcgtgcctcggtactggcgaatgttttcagatgctgttgtttcagaatctggctgtatgcttctaccttgtcgcggtattcttcgcggctcagatatgcttgttgtgccccggcattcagtcctgagcacagtaatgatagaataagtatatttgttttcatcattcaattggtaaactgtaaattgttgaatgttctctcacttgattttatgaatggcgcaataagccaccggcagcacgaatagtgtcaatgccgaggctaccagcaaaccacccatgatggttgccgccatgccgccgaacatggcgtcgaacaataacggcaacattcccaggatagtggtacccgatgccatagccaccgggacaatacgggtggtcgttgcactgataacggcttcacgcggtgcttttccggcagcggtttccgtatcaatctggtccaccagcacgatggcattcttgatattcattccaatcagccccagcaagccgaggatggagaagaagtcgaatgatttccccaataccaccagtcccagtacaatacctataaagataagcggcagcatcagcaggataacaatcggcttccggtagctgcggaacagaaacagcaaggtgacgaacataaggaagaatgtcagcggcaggttagctgccagtgcggcattgctttctgcctggctttcctgctctccgaagtatttcatggtgtaaccttcgggcacatcaatctcttcttgcacttgcttccatatacggttgaaggcggcaatggcattcacaccgcggcgtgggtcggcctgcgccatcatcaccatctgccggttgtagtctttcacattggagaacttgtactggaagtcgaaccggctgacgacttgttccagagtggttgtttcgcgtgcagtgccgaatacggggagtgtacgcaagtcgttgatgcggaaagagtcgatagttttatccttcaacagaacgggaagtacctggtctccttccctatattccccaagtgtcatgccgttcgtaccgatctggatactctgtgccatgctttgacgggagatacccaacggttgtgcacgctcctgactgtaaacgggatgccataccggtatcttattgccccaggagttgcgcacgttgataagttcgccgtcacggtgcatgatgtccagagccttgttggtcaacatgaccagcgtatccgtgttattgccgatgaacccgatttcaatggcggcatctacagcaggagagagcttgaacaacatggtacgggtgatggcattgggatagttggccttcatgtaggcatcaagattctcttcctgcttcttggtatatttgctgtccgttacttccaccaggatattggcgaagttaggtttggggccgacggaagtggaggccagatagtaacgcaacggtgtgctgccgaatgtgacggatacccgtttcacttccggctgctgcatcagatgcgcttccacctttttcatttcggtttctacttcgcggatgctgtacccgtccggatagaatacatctgcccgaaagtagggcttgtccagagaagggaagaagttctggggcatcagtcccatgacgatgagggagaggatgaacagtgctgtaatgcttccaagggtcaacgccttcttgcgtatcagtgtgccgaggatggaggcgaatttatggtagaaaggcttgtcgtatgggtctttatcaccatctttagcctttgctttcagtatgaagttgccgaatgtagtggtttgtgtcaacgccagcacccaacttaatcccagggaaatggccaacactacgaatagcggtttcacgatttcggctacggaagagggagccagatacagtggcagaaacgaacagatggcaatgaacgttgctcccagcaatccccattggggaccggtggcaccgtctatcagcgcttttcggcggtcgatgccgcgggcaatggcaatttgggcattatctgtcaccacgatggcattgtccaccagcattcccatggctatgatgaatccggcgagggaggtccggttcagacctacgccaagaaacgacataatgagcagtgtgcctccgatagagaatataagggaagagccaatcagtactcctgcacgcatgcccatcaccagcatgatgattacaatcacaatcaggatggattctatcagattgatgatgaacccgttgttggcttcttgggcaatcacgttttcgggatacagactttccagttccagtcccacggggatgaggggcatgagttcggcaagcctccggtctaccagttcaccggtttttaccacatcctttgtcgggtcggtggagatgccgataccgatggcgcgctttccgttgacgtgcatgatattgccgggaggttccatgtatcccttttcaatgatggcgatgtcgcccagcttgacttgtccgccggaggtagtgataatctggttgcggatatcatcgacagtcgtgtaggtaccgttggccacgatgcgtaactgttgttctccggcgctgatttcacccgtattgataatctggttctgcgattgcagcaggtcggccagctgcttggggtcgatacccattcctgccagcttgtttacggagatgaatatatggatgacctctgtctgtgtaccgaaaagggctaccttcatcacaccgtctgccgtgatgacttgtgtcttgattcgttccgcccagtttctcatttcttcataagagaaaccgtcatcacccaccaggccgtaatagataccgaaaacgtctccaaaatcatccgagacggtcggcacagaagagcctgcgggcagttggggctgtatgttgagcactttgcgccgcagttcgtcccacttctgcggaatggatgcggcagaaagtgacggttgcagttcgaaggttatcttggagagtccgtacatagactctgactttatcttgtagacgccgctcatcgactgtatttctcgggagatgggttcggtgacgagccgttccacttctgccggctccgctcccgggtagcgtgtcatgatgactgccgacttgatgacgaaaggtgcgtcttccttctttcccaacctgccgaatgacagtataccgccgataagcagcacagccagaaagaagtagactatcttcgtgttgtctaatgaatattgggctagattcataatgaatattttttagataaatggggaatgtaatgtgccaatgtgattaatcacattagtacctttattgcttctccttctgtcagctggtatactccggccgtcacaacggtttctcccggttccaaccctttagaaataagcaggtttgcctctcccgttggagaataaacggtcacttcgcggcgactgactttattaccttccaccacccatacatacgttttccggttttcactgtcgccaaatacggcgcttaacggtacattcatcagcttttcttccagaaagggagcgacatccgatgccagctttattttgcatgtgaatcccggttttacgtcataacgtgtacggtcaaagtgcgggtcgtcaattgttattgtcaccggaatacccgtccctgctgtggagatgtcaagatactcttccagtctggcatcgaaagcctctgcagggtaactgtcgaacaccaccttgaactttacgtccttggcacggagcagatagagataatcatccggtacggtgaacttgattcgtagcttctgtgtatttaccagctgtacaaccccttctcctgcattgacacgctgatagttctctaccagccgtttttcgatggaaccctcgaaaggggctgtcagccgcgtatcccgcatattgttgccggacaactcgtaagtggattttgctttctgatagttggctacgctgatttcgtattcctgcacggagatagcctggcggccaagcagccgtttgttacgttccacttgtgcggcagctgtttcgtaggcagccttgtcggctgcatattgcagggagatgtcgcgtgggtcgatggcggcaatcagttgccccttttttacccgctgtccctctacaaccgggaggttgatgatttgtccgctgacgcggaaggcaagtctcacatattccacggcttccactattccggagaagtctttgcggataaccgactgtgaactgacttgcgcagtcttcaccggtcggataagggtattgctacccttttgtttttgcccgcacgacgtgatgagcaacgccatgaccagggcgaaaagaaacatttttttcattggtaaacaagtatatagttattcgttcaggtatatataaaaacataaaaccgggaaaacaaccaaatgttctcccggttataggataaatgatgatttaatgtgccaatgtgctaattggctgcgcaatgtttatgctgcgctatcacgccgcaggtcattggcacattggcatattaattttcaattccgtcccccgttccagcgtatatgggtgtccgtagacttgtatgtccactttgctgcctgctgtaagcgagatttcgatttcttttcctacccgtatgtgaagtgtgtttttcagataattcaccttgaatgaatagctgtcccatttttgcggtatgacaggggagaaacacaacgtctccttcagcacctgcatacctgcaaatccgcgtacaatggccagccagctgccgggcatactggttatgtgcagaccttggtccgcttcgttgttgtagtcgtccaggtcaagccgcgtggcatgcaggaaaagctggtaagctttttccactttgccgatgcgtgcagccaggatggaatggatgtggggagaaagggaggattcgtgtacggtcatcggctcatagaactcgaaattgcggcggacggtttccgtgtcgaaatagaaataatagaggtaaagtccgagcaacacgtcgctctgcttgatgtagcaagagcgcagaatgcggtcccatgaccaatgttggttgatggggcgttcttcggcaggaatgttatctgtactttccagtactttatccatatagccgtcattttggataaaaataccccgttccttgtcttccggcagatacatgtgttcgatgatgtctctccaccgggcactttccttcacttggtcgagattggtgatgcggcgtatgtgggcatattcatccggatattgctgtgccaccatttccagaaaacggagggtcatcttgaggcactgtatacaggaatagttagtgtaccagttgttgtccacattgttttcgtattcatccgggccggtaacccccagtatgacatatttctgtttgggttgggagaaggatacccgttggctccagaaacggctgacggcaatcattacttccaggccatatttagcgatatagtccatattgcccgtcagcgctgcatgctgaacgatggcatagacaatgatattgttacggtggatttcctcgaaggttatttcccattcactgtggcattcctcaccgttgttggttacctgcggaaacaacgctgcaccgtccttgaaacccagtttacgggcgttttcgatggctttgggaagctggttgtgccggtatgccagcaagttctttgcaatctctttgggagtggagagcagaaaaaacggtacacaacacagttccgtgttccaataagtatttccgccatatttttctccggtgaatcctttggggccgatgtttaggcgcggatcatctccccggtaagtctgatacagctggaatatgttgtaccggataccttgttgcgcttccgggtccccttcgatgacgacatccgtttcgtcccagatttcctgccaggcccttcgatgctcttctaccagcgtattccagcctatgctcttggcttcgcgtgcctcggccacggagtgttccaccaattcactccgttcgtggtagagagaagaagcgatggcggtgtatttgatgagtgtcacattgtctccgggtttcacgtcggcacctacgctgaaaccggtctgcttttccttttctatccgtatggggttggcagtggtttccttgttgtttttgaagaattggtaagtcatggcgtagcacacttgtgcatcttcccggcgggtctgtgtccagagataggcacagctgctggtagaaccggaacgcagtatgttccatattttcaggtttggcagatcggcatcgtctactatattcccgtcaaggatgggcacgagtgagattctgccggtatagttgatggaagacacgctgtacttgatgagacagaggttgggccttgccatatttgtgatatgctctacatggatgcggagctggtttccgcgaggagacgtcacctccatgtcccggtaggagataccttccttcatatccaggcggcggttgaagctatcgacatcccagcctgccaaatcgagttcctcatcgatgaggcgcaggttgatgcggctccagtcggcagccttgggtatacgggtgtaatatggtggaaatccgttcttccaccatcctacgcgggttttgtccaggaaagtgatgccggccacaaatgaaccacggtaactgtcactgctgtaaggctcctcaaaatacccccgttgcccgaaacgtccgtttccgagactgaatatactttccgacatccgttgacggtcggggtggaattggtcttcgatgatgttccattcatcggtcttgaggtatttcttcatggcgacgtgttttctgtagttatcgccgtaaagttaagcaatatgcggaaataaagaagaaatggaaaggaaaaaaacaaacgtgcggtaggcttttttttacctgctttcttgccggagggctggtaggctcgtcaataacagatgctatgtacggtcagaagaagaggtaacaatcatacggtatgaaagcatgaatcatacgatatgattatggtaatcatacggtatgattcatgtctttattacaaagataacggctgtcctttgtacggtgtgccggtctcggttctttgtgtgttatgtttcggaggcgtgtgcttacttgcttttttctccttggttctctttgatgaggtatacgcaggcggcgccgattatcagcatgattcctgccagcacaagcatattgatttcaggaggcagtcctccttggggagtaaacaaggcaaggatggtgccgcccaaagcagctgctataatctgcgggatacagatagtaccgttgaaaagtcccagataagtacccatgtgtcctccgctcagtgcgttggtcaggatggtgaacggcagtgccagcatggcagcccatgcacaacctatcagcaagaaggaaatgaacaacatatacggattgtgcataaaataggtggaaatgaaacctatacctcccagaacaaggctgagtgagtagacccggcgacggtccttgaacatcggtatgcagatggcccaaagcacagagccgatggcttgtacggcaaacagtacgcctacccagtcggcggcattctggtattgcaggctcttggtgtcgagtaccactttggtaacaccatctaccaggtgctctactgtaggagcgtcaaaagcattggcagcgatgctgccgttggtataagtccacatgaacataaaagcaaaccagcagaagaactgtaccagtccgatagtccaaaatgctttcggagccttgatgagcagcttcagcatgttggtcttttcatgttcctcttcttcggtgatgccgtgatactctgcatattcggcaggcggcatctcttttactttgaccgaagtgtagatgacgcagaagataaggatggccgctccgatgtagaatgagtaaatcaccgagtcggggattactccttggggagctgtattgctgatgccaatccatgcaaagatgaacgggaagagatatcccaccaggctgcctgcattgcagagaaaactctggatggagtaggcgagtcctttttgtttctcattcaccatgtcgcccaccatcattttgaagggttgcatggccatattgatggaggtgtcgaggaacatcagcgataccagtccgaaaatcatggctgtacttactgccatgccgaagcttccggcattgggtagcaggcacatgacgagtacggccaccaacgaacctataaacagataagggatgcgccgcccgaagcgtgtccaggtcttgtcactggcggctcccacgatgggttgtacaatgatacctgccaacggcggtaatatccagaaataactcaaattatgcgggtctgcacccaaagtggaaaagatacggctgatgtttgcactctgcaaagcatatgcaatctgtacgccgaaaaaaccaaagctgatgttccacagcttccagaaacttaaatcgggttttactttcatgatggtttaatatgttttattatttcgtagttcctcttatcaccagattggtacgtactatcttgttgttgcttttctcttctccctccagctttccggtcagaatgctgaaagcgcttttacctacttcctcgccatgctgctccacggtagtcagcttcgggtcggtgctttgggcaatggctccgtcggtgaatccgcagatggatacttcatcgggaacttttacgccgaccagtttgcaggcatacagtatgcccgaagctgtctcgtcgttgatggcaaagaaaccgtcagggcggttttcgctttccagcaggtcgggagtgatggagatggcgcgttcacgggtgtcgcacaacagaatcatgctgtcgtccaccggaattttatacttcttcatggcatccaggtagccgttccggcgattcttggtaatctccaggtggggagccgcaccatagaaaaggatacgcttgcatccggtctgtatcatgtattccacggctgcaaaggagccggcatagtcgtccaccaccactcgctcggttttcagccccgtacatatacggtcgtaaaagacgatgggaatatcgttgttcaacagctcctggtaatggtcgtattgggaagtatccttggcaagtgaagcgataactccgcagacacgggcggcaaggaaagaatgtacaattttcacttcctgctcgtacgattcgctgctctgcgccactatgatgttataaccggcatctgccgccgctttctcaattccgctcaatacgcaggaaaagaagtggtgtaccagttggggaacaatgacgccgatggtattgctgcggcttgcgcggaggtttacagccagtacattgggcttgtagttatgttcgcgcgcataggcatgtacaaggtcacgagtttccttgctgatgtccggattgtctttcagcgctcttgacacggtggaaggggagacattcagcgcccgggcaatatccttgatggtaatctgcggtttattcatggtatagttttgaggacaaagataaggtaaacttccctaatccgattgcaaaaataacgtaatatggtaaattgtgcttattcgttgaggtttatcgggttgtaagtttgtgcaaacgattgcagatacccgtattttgacaaattaaggtgatatatagttctatattccctaaatgcttatatttgcagtacgcaattaatgatgataacgccatgaaacacatgaagtttttgactttctttttttgtattgcctttgcagtatttgcatgcagcagcaataatgagacagaccccaatgctggtggacttcccgataaggaggaacctctggctacggactttgctaaaggtgccgacatcagttgggtgacggagatggaacataagggtatgaaatactacaatacctccggtgtggagaccgattgtttccagctgatgaaggatttgggcctgaatgcggttcgactcagagtatggtttaatcccaaagagcacgataactggtgcaatacggctgatttggtgacgaaagccaagcgtgccgcagagctgggtatggatgtaatggtagacttccattacagtgactggtgggccgaccctggacagcagcataagcctgctgcatggaaaggactgaacttggccgacttgaagaaagccatcgccgaccatactgccgatgtacttaatgcgctgaaagcggcaggagttgctcccaagtgggttcaggtaggtaatgaaatccgtccggggatgctttgggatgaagatgctgcattgagtggtgcgtcctataatgtgagggaatgtgatgtaaagggttccaacagcacttccgagaaagtgaaataccgtaagaactttgccaatctggctgcttttatcaatgtaggatacgatgcggtaaagtccgtctttgacgatgctattgtcatcgtccatctggacaatggatatgacaacgaattgtatacctggttctttaatgaactgaaagccaatggcggtaagtgggatatgataggcatgtcgctctatccttacaggacgatgctcgagcacaaggaatatacagctgatagaactatcaccgagtgtattgccaatattaatagtgtagcccggaaatacaactgtaacgtgatggtggtggaaaccggcatggagtgtgccgacgacaaagggaatctggcaagtgcttccgtgctggcagaagggaaacgccaactggaacgtatcctgaaagagtgcaaggagaataccggcggacgctgcaagggcgtgttctactgggaaccggaatgcaggccgaaccaatatcggctgggggcattcactgaagacggccgccccactgtgataatggatgcttttaaataattatattaacaaaatcttttaaagaagaatgagaaagacaatacttatcttttcctgctgcgctttttttgccttggcggcaatggcgcagcgtacagaagcattgttggaaaagaactggaagttcaccaagggagatgttcccgaagcaacacaaacaaatttagacgacagtaagtgggaaacagtgaccattcctcatgattgggccatctttggtccgttcgaccgcaacaacgatttgcaggaggtagcggttacgcaagaccttgaaaaacaagcttccgtaaagaccgggcgtaccggagggttgccttatgtgggtgtcggttggtatcgtacggcttttgatgctcctgccgacaagcaggtcactctggttttcgatggtgctatgagtgaggctcgggtctatgtcaatgggaaagaagcttgtttctggcctttcggatataactcttttcattgcgatgttaccggtttgctgaatgccgacggtaaaaacaatgtgctggctgtccgtctggaaaacaggccccagtcctcccgttggtatccgggggcgggattgtatcgcaatgtccgcctagttactacggaacgtgttcatgttccggtttggggtacacagctcaccacaccgcatgtttctgctgaatacgcttccgtgcgtctgcgtactacaatacggaatgccggtgatgcggatgttcgtatttctactgatattattgcgccggacggtaagatagtagcccgtaaggataatagccggaaaattaatcacggacagccatttgagcagaattttctgataaatgctccgtctctgtggtcccctgagacaccttatttatataaggcagtatctaagatttatgtagatggcaaacagactgacgaatataccacgcgttttggtatccgcagcattgagattatagctgataagggattcttcctgaatggtaagcaccgtaaattccagggggtatgcaatcaccacgatttgggcccgttgggtgcggctgtcaatgtggctgctcttcgccgtcagttgacattattgaaggatatgggatgtgatgcagtccgtacctcccacaatatgcctacacccgaattggtggaactctgtgacgagatgggctttatgatgatgttggaacctttcgatgaatgggatattgccaaatgtgagaatggttatcaccgctatttcaacgaatgggcagaaaaggatatggtaaacatgctgcatcattatcggaacaatccttgtgtggtaatgtggagtataggaaatgaggttcctacccaatgtagtcccgagggctacaaagtggcttctttcctgcaggatatttgccatcgcgaagaccctacacgccccgttacttgcggtatggaccaggtaacttgcgtgcttgccaacgggtttgcggcaatgattgatgtacccggtcttaattatcgggctcaccgttatgtggagtcttatgagactcttccacagaatattgtgctcggttcggagacggcttccactgtaagttctcgtggtgtctataaatttcccgtacagaagggtgccagtgtgatgtatgatgaccatcagtgctccggttatgatgtggagtgttgttcctggtcgaatcttcccgatgaggattttgctttggctgatgattatgactggacaatcggacagttcgtctggacgggctttgattatttgggtgagccttctccttatagtacggattcctggcccagccacagctccgttttcggtatcatagacttggcaagcctccccaaagaccgtttctatctgtaccgcagcctatggaacaagcaggcaaataccttgcatgtccttccgcactggacgtggccgggcagggaaggggagaatactccggtttttgtttacaccagctatcccagtgccgaactattcgtcaacggaaagagttatggcaaacaacggaaacttactgctgatgaaagccgtgctttggaaggtcaggactcccttgctttgcagcgtcgctatcgcttgatgtggatggatgttccttatgaaccgggcgaagtgaaagtggtggcttatgatgtttccggcaatcctgcagaagaaaaggtgattcgtaccgctggcaagccccatcatctggagctggttgccgaccgcacccacttgtctgccgatggtaaggacctggcatatatcacagtccgtgtcgtggataaggacggtaacctttgtccggcagacagccgcatggtaaacttctcggtgaagggtgccggaaaatatcgcgctgctgccaatggagatgctaccagcctcgatttgttccatctgcccaagatgccggctttcagcggtcagctgacggctattgtgcagagtggcgagcaagccggtgagattgtgtttgaggcaagggctaaaggattgaagtccggaaagctggtactttatacttcagagaaataaatagcactatttgcttccactctaccacacctgctctgtaaccctttgttcatcggtgtttgaggtgcggtggaagcaacagaaaaaggtggaagcaaattttgcttccacctctgtttttagggccgatatgatgttaacttgttgtaatgtaacaagttaatatcatatcggccattttgttaatatcgtgttaatggcatattaatattgtgcagacacgttattcatatcctgaaagtatgttgcttggttcatacatgcatggcatttcttcagtaaaagctttgtgtttcttttgttttgtcttgatgttgtgtagtgcttaacggccatcatccgatctgttgacggccgttaggcgatttgttgacggccgttggcagattgctttacggccgttaggcggtgaaaagttctgtggttcagttgaataaacatatgcatagcatgcaggaatgccgtatgtggagtgtacagatgcattgtatgatggtgcaaagtagccaaaatcaaatgactttttcgtattgtgcaactgcatgcaatcgtttgcattgtttgctccccacattttacacattctttatactttactaaattaataaagcatatttttgtggcgtcatgctttaggtacttgaaagacattagaaagcaaaagtacgaaattatttttacgaataatatatataggtaattaatattgttaactttaatttattaaatgcatgaagcaagtaaatcctagaatctatcgaacgattcttaccctagttttagggctgttcttgtcagttggcgcttatgcacagaacatcaccgtgaaaggtactgttactgatgcgacaggcgaaccggtaatcggtgcaaatgtcttggaaaagggtacaactaatggcgttatcaccgacattgatggtaattttcagttgcaaacctctcgtggtgcaatacttcaggtctcttttgtcggtttcttaacagctgaagtaaaagcagctcctaatgtgaatgttattttgcaagaagactcccagttacttagtgatgttgtggtaattggttatgctacaggtagtcagcgaactatctcgggtgccgttcaaaaagtaggccgtgaagaaatgaatgcaggtgtagtggttaatccattggctgctatcaagggcaaaatagctggtgtaaatattcaaaaaacaggtggtgaccctacagctgcccccgctattcgtgttcgtggtactacttctctgaccggaggcaatgaccctttggttattattgacggtgtgtttggcgatttgaacatgttgaatgccatttctcctgccgatattgagaattttacagtattgaaagatgcttctgaaacagctcagtatggttcacgtggtgcatcaggagtaattgtagttactactatcaagggcaaaaatggtgtgaagagtttgagttacgatggaagtttcggtattgaaactgtttataagaatctggatatgttgagtgcgagtcaatatagagctgctgctcaaaatttgggtatcagtatcctggataaagggtatgatacgaattttatagaagaaatgcaacagtccggttatactcagaatcatcgtttgtctttctcaaatggaaatgaggattccaattatcgcgcttctattggcgttattgaccagaaaggtattataaagaacaatacgatgcgcaattatacagcaaagattgatgcaatgcaaaatatgttcaataataaattgaaattagaattcggcatgtttggttcattgaaagaaaacagatatgtgaatgactatcaaaaaacattttattctgctgcttcttataaccccactttcccgaatgtgaagaatcctgagacgggaatgtgggatgaaaatgccaatgctaatgaggtgcataatccgctaggtcgtttggatattgatgaccgcgaaacgaatgcatttattaatgcgaatgcacgcattacttatagcattacagatgatttgaaattgagtgcatttggttcttatacatacaatgtaaaggagaacaagaagtacatccctacttctattaaagcagggttgagtaatcgtggtgaagcttatcgtggtgacaataagtcgcaatctatgttggcgaatatgatgttgacctataagaaggcttttggcaagcattacatcaatgctttagctttggctgaagttcaaagggtaactaacacaggttttggagctacagtgaatggatttagttctgatgattttttatataacaatttgcaagcaggtgcagtgttaaaatggggtaataacacttcttattataataatccgagtttggcatctttcatgggacgtgttaattattcatatgccgataaatacattgtaactgtgaacgcccgtacagatggttcttctaaagttggagcaaacaacaaatgggctttcttcccgtcagcatctttggcttgggtgctttctgaagaagaatttatgaaagatattgatattatcagcaatttgaagattagagctggttatggtcttgctggtaatcaggatgctatcagttcctatatgtctttgcctttgatgagtccgaatggtacaactacagtaaatggccttcctgtagtaactatgggggtgacccgcaattataatccggatttgaaatgggaagttaagaaaacttttgatgttggttttgacttgggaatgtttgacgaacgtttgactttgggttttgattattataattcaaagacaaccgacctgctttacaattatgatgtgaaggttcctccttttacctatcctactttgcttgccaatatgggagctatgcgtaacacgggtattgaaatatcattgggtggaactcctctgaaaaccaaagatatggagttgaatatcaacgctaacatagctttccaacagaataagttgctctcgttgaatggcacatatatgggtgaagctatgaccgccaaagaatatatgaatttgggtggcatgaatggtgctggcttcattggtggctacaatcagattatctatcagatggtggggcagccggtgggtgtattctatttacctaaatgcgacggtttggtcgataatggatttggtgactatacttaccacatccaagacattgatggtgttgaaggggttgaccttgcagatggaaaagatcgctatatagcaggtcaggctatgcctaaagctttattgggtgctaatgttagcttccgttataaacaatttgatattcaggtgcaaatgaatggtgcgttcgggcacaaaatatataacggtacctctttatcctacatgaatatgaatcagttccccacatacaacgtaatgcaaggagctccagagaagaatattaaagaccagacagtgacagactattggttggagaaaggtgactatttgcattttgattatgtgacattgggctggaatcttaatacaaagaacatgaaagctatcaagtccttgcgtgtcacgttctctgtaaataatttggctacaattaccggctactcagggctttctcctttgattaacagtactaccgtaggtggtgatttgggtgttgatgacaaacgtttctatccgttgtctcgtacttactctttaggacttagtgttaacttttaattagatgtatattatgaaaaaaaatatattatatagcttgttgatttcaacagtggcaactgtcggtttgtcttcttgcgatgcttttttggaagagaatccgaaagatcagattacggaggaacaggcatatcaaaattctacgctactctatttaaatacagtagcttcgctctatacccaagtaggtgctaatggtggtggatcgggtttacaaggtactgaccgtggtctttatgacttgaatactcttactaccgatgaggctgttctccctacacgtggtggtgactggtatgatggagggttgtggcaggatgtattccttcataaatggggaacgaagaacgacttggtaaaaggttcatgggattatctttatagggtaattgctcaagccaataaatcattggataagttgaatgaaattttggcgaaagaccccgaaaatacatctgtgcccaagtatatatccgaggttcgcgcattccgtgctttgtattactattatctgttggatatgtttgctcgtgtgccgttggttacctcttctactacggcaatggctgatgtcgaacagtctgaacgttccgttgtattcacatttgtgaaaacagaacttgaggaatctgtagctgatttgagtgatgctcatagcaacttgccgggtgagtattacggtagaataacgaaaccggttgcttactttctattggcaaaattggctttgaatgccgaaatttatacagacgataattggactgacggttcaaagcccgatgggaaaactatcaagtttactgtggatggagcagaaaaaaatgcttgggaagctacaattgcttatggtactaagattaaagagttgggctatcagttggccgataactttgcttccaacttctctacgaaaaatgaaacttcagtagagaacattcttactattcccatggatcctaatttgtataaaaatgagttctataacttgatccgttcccgtcattataatcatggtaatgcttatggacaggggggatggaatggctcttcggctaccaaagaagctctcgatgcttttggatatggaacaaatgcagtagacccacgttttgatgttacctattatgccggtaaagtagaaggaccgaaaggtattattaaattggatgatggaacagatttggagtatcttcctgctgaaatttcattggatatgtctggtaaggcttctgaaaaaactgccggtgcacgcatgaaaaaatacgaactggatgcagctgcaaccaatgatggtaaattgcaaacgaatgacatcgttttgttccgttatgctgatgtattattgatgataagtgaggcaaaggtaagaaatggcgaaagtggaaatgttgaactgaatgaagttcgtgctcgcgctggagcaagtacagatgtagtagctaaccttgaaacattgttggcagagcgtctgagggaatttgcttgggaaggtttgcgccgccaagatttggtacgctttggtaagtttacacgtgcctacactgacagacctcaactacagggtgaagctaacggatatactaccgtgtttcctatccatgaagatgttttaagtctgaatactaagttgactcagaattacggttactaatgtttaatgatttaatacttgataaaatgaaaaaagtatttgaatatatagcaacactcttattgctactggcagtagggacaagttgtgaagaaggaaatgataactggaaggtgattacggctgttccgacaggattgtatattacgggtgatgctacaatttatagtgcggctgccacttcctctcaattgacaactccagcgtttgacaatgctccggaaggaactaatattgtaggaatctatacatggctcaaatcatcagggagtttcactatgttggaggtggattctgaaggcaatgaaatcaattatggcagtggagaatctgttgctacgactccggctccgacttatagattgaccgtaggtggtagcccgttcacggttgcgaaagacggattatattatgtagcttttaataaggctgataatcagcttacggttatccctactgattttggtattattggtgatgcaactcctcagcagtggaatgatgaaactgctatggcgggtgctttgaatgaagctcaggctactgtggagtatactataaaagatgtaacactggataagaaagaaatgaagttccgttacttgcataattggggcgtggatattccttatcaaggggcaacagtgaagatgcactcaaatatgggagccgtcgcaaaaggtgctatttccgaggcattcagtgaatgtaaaggtggaggggataactttactgtaggtaaagctggcatttatgatgttacattgaaactggatttacgcaccggtgttttttctgctcaggctatttgtacggcagaagacacttcaagtgctacgttacccgaaaagatgtttgttgttggtgcaccatgggattggaagtgggaaaatgcaccggaaatgataccggtacatagtcacgatggtatgttctggggaatctattatattgaagcaggtcaaggcgttaagttcaataatgaaatgagctgggatactggtgacaactttggagctgaaaacgaagaacccaaagggtatggcgaatatccggcaggtggagctaatttggtaatcagtacatcaggttattatcagatagtagtgatatgtacactttctgcggataagaagagcataaacagaaagattgttctttctgaaccggagccttacttgattggtgatgcagcagctggtggatgggatgctcagttggcagatgttgataaattcaaattgaatgcagaaggtgagtatgtgtctccggtatgcaaagaagggaatttgcgtatgtgtgtaaaattggagaactgcgattggtggcaaactgaatttaatgtttttgatggcaagattctattccgcggtaaaggcaatgatcaggatgccgttaaggtagctgccggacaaacagtgaagttaaacttcaaggacaataccgggagtattcagtaagaacaatgtgctgaaagaatataaagtattataatgaaaagggctgcaggtgaagtgcgccccaaaagttggacaggttaaacattaaccggttatagaaagagttcggtattgtaccggactctttccatttaaccgggactttattcttttataagtatgttcttttatttcttttatattatcggtatctgtcattagcttcgctcaaaacctcttctgattatttcatcaaggtatagtcagagcgtagcgaagaatctactttctttatgaatacgcagagaagagattcttcgctacgctgaatacggatagtataagctaattatggcgacatacttggtttataatcagtacttataagaaaacttgagagataattgcattgtttgtgatgcagtatttgctcaagattcagctcagccccgacaaaaagttgagcgcacttttaccctcatgccctcataatgtgctgcatccctttgtccatcgggcatacagctatgagggtaaccatgagggcagcatgagggtaaggcgttactctcatagcgtatcgtccgctcgcttcgtggcatccgggaaaaacaatggcaagaaagatgtatacccctttgctttctatgctgaatcacagaggtttgtcgtgttgaagcaccttgtctgtcaacggctcactatggtgggctttcttgttcatatgggcagggctgacgcattaaaaatatttcattgataaaagttcacaaagaagttcatcatcccatccagcagcctttctttttcctttcacgcttccctttctttcatttttcttaatgaccatcagtgctattttattcataagtgaaacattctgtgccgcattgcccgtttttctgcctgcgtcttcattaaaggagacatccaattgccaatgtagattgttctcaatagcccaatgtgcccgtatggcttctgctattctttgaggctcaagtcccaatgaagtgatatagaacctatggtttacagtcgtctcgcctgtcgtcctgatggttctttgcgaggagattctcacaactgccttcaatcccttccaatcctttaacatcccggttaacgcctggcaactgtacacaagacactcacggcgttcgtgtctgccatgagcctcttcctccgttatgtatttgccgtatctggtggcataataagccttgttgacatctatattcttcttgtccaaatcatcgaaccatcctttgactgtattataaagattccgatggttttctttaagagccaggacataatccgccccacactctattatctttttggcaatatccgtttgacagcccattgcatcaatggttacaaggcatccggttaagtccaatgcttccagcaacaaggggatagccacaatctcgttatgtttctcattgactttcagttgtccaaggctgattccattagctgtagcccaggcactgaccatatggagcttaaatccgggattcccggcggggtgggaagaggtacacttgctggcaccacggatggtcttgccgtcaatggccacgacaccctcatatttctcacaaatctcaaacatccagtgccggaaaatacgttcgaaatactcagggttcagagcgctgaaaaagcggttgaaggtatcatggctggggatggattccaatccgggaagacgctcgcggaaaaagtcaatcttggcattgccgaaatcctctatctcataccaggactccgcgccacatatgacagcagccatggcgatataaacgatggcatcggcagaatgtacacgttttctgtcaatacgagggtcattgatttgtttacagatactaaatattgccattgttcttgtcaacttatgtttcttaattgcttataaagataaggattttagatgatgtatgaaagcgttttgtctattagttatcaagcatataaagtatgcttttaatagaattataatagttactatgtttgtaaatgctgaaaatattcgcttgtcgggacgggtggtcccgccccttgccgctgggcgctccccgaccaatgaattttagataaagtaaaataggcgcaataattgaattactaaatttgtaattgacaagattcaatattcagtaattaaaactattacacctatggtgcaaagaaaagaattaaattttgaaggtcaaaatatctatataggtattgacgttcatttgaagacttggcatgtgtcaatcctcaccgaatccggttgcttgaaaaagcacagccagcagtcttccgcccaagcgctctttgaacatttgaagaaacattatcccaacggtaattatctgtccgcttatgaggccggtttcagtggcttctccacttattattcattgttggattttggtatagaatgtcttccggttcatgctgccgatattccgacgggacaatacgaatccgtgatgaaaacagatgccattgactccaccaaaatagcgagggctttgaagtccggtctgcttcggggtatttacatccctaagaaagaggttcttgatgaccgtaacgtcatgcgtttgcgtataactttgaaacggcaactttccggttacaagtcacgagtgaagcacctgctttataataacggagttatttatcctgaatgttttcaaaactcaaagtctcattggtcgaaacgctatcttaaatgggtacatgaagatgtacaactgttatcagaaagtcgaaattcactggatctgttgttgagacaagtggagttgtttcgtaagagtctccttgagattacccgtctggtacgtacgttatcccgtaacgggcgttatggggaagcatacgagaacatcgtctccattcccggtattggtatgattacaggcatgtgccttttgacagagataggtgacattcaccgcttccgtaatgaaagacaattcgcctcctatctgggactggtacctacaagccatagcagcggtgaaaagacaagtcacggcgagatgacgttcagaggaaataagcggcttggccctttactggtggagagcgccttggtagccatacggcaagacagggcattggccgctgcctacggagagtattgcaagcgtatgttgccgcaagaggcgataatccgcataacccgtaaattgtcaaacagaatactgattatactcaaaagtggaaaaaagtatgagcatgacagatgttactgacagaaaatataaaagagcccttcaggcaaatttcaaccgggacgactcctgcataaattatgatgaaccttcaaggttgcatctctaaatagattgttgcgtcctacctattattctgaagaagtaaattgttggctgcatacattgtggtacaacttatagaagtttgtctaatagggcttttatttaattttaaacgacacaaggcttacggctttgggttagttcataggttgtggctttagtcgcaatcgggatgaatattgtttctttttgtgaactcaaaaaacgtaagtgattgatttataaagttaataacaaataaaaaggtattcaattattaggaatacaacatagaaaatatttatggtaaaaactataatgcgtcagccctgtaggcgtttttatcaaaggaaaacggtgctgaagcataaggatgcttgccttgacgatgatgaacgccaagggagagcaacctcgcaaccatattgaagttccgcaagttgatttggttctgttgtcatatccgtgtttcttgattcgtaatccttatcgtttattctacaatcggtcaagctaaaccgaggaaaaccacggctctttcatttaagggagtcagaaggagttatcgggagttaaagggagttggaagccggtagtatcgttatatatcaacaagagtatcggcctttaactcccgataactccttctagctcccgacaactcctctaaatgaaagagccgtggaggaaaacttgaaaaatcagcagcaatgcgcctctctacaagaacttttgctatctttgtgtcgttgatgccaaaagtggctgattgaatagaaaaaacaacaggaggacagcagatggacccattgaaatacatagtacccggcagaaagagacttccctacggcatgatgaacttcgcggatatccgccaagacaattattattatgtggacaagacccgcttcatccccatgatagaggaggcggaccgcttcttcttcttcatccgtccgcgccgcttcggcaagagcctcacgctgaacttgctgagacaatactacgacgtgcgcacccgtgacaagttcgaagcccttttcggtgacctgtacatcgggcagcatcccacgccgagccgcaacagctatctggtgctccatctcaacttctccggcatcggcggcgagctgaacgactaccgcagagggctggatgcgcattgcggcattactttcgagaacttctgcaagatatacgccgacctccttccgcaagacactctggaaggactgcgcaaggcgaacggagccgtggagcagctggacttcctctgtcaggcttgtgaacgtgccggacaggatatgtatctcttcatcgacgagtacgaccacttcaccaacaccatcctttccagtcccgaaagcctgcgccgatatacggacgagacgcatggcgaaggttatctgcgcgctttcttcaacaaggtgaaagcaggaacggattcatgcatcaaacgttgtttcatcaccggcgtaagccccgtgacgatggacgacctcagcagcggattcaacatcggcaccaactattccctcgcgccgaagttcaaccagatgatgggattcaccgaggaggaggtgcgcgaaatgttggcctattattcagcaaacagccccttccaccacagcgtggacgagttgatggagatgatgaaaccgtggtacgacaactactgcttcgcgcaggaatgttacggtgaaaccaccatgtacaattccaatatggtgctttacttcgtcaagaactacattgacgatggcaaagcgccacgcaacatgatagagagcaatatccgcatcgactacgaaaagctgcgcatgctcatccgcaaggacaaggaatttgcccatgatgcttccgtcatccaaaccctcgtaagccagggcttcatcacgggcgaactgaaagacagcttccctgccgtcagcatcaccaatcccgacaacttcgtcagtctgctctactacttcggaatgctcaccatcagcggcacgtataaaggaaagacaaggctcaccatccccaacatggtggtgcaggaacagctctatacctatctgctgaatacttacgacgaggccgacctgagcttcagctcttacgagaagagcgaactttcctcggctctggcttacgacggcgactggcaatcctacttcggctacattgccgactgcctgcaccgctatgcctcgcagcgcgacaagcagaagggcgagtccttcgtccacggctttacccttgccatgactgcgcagaaccgtttctaccgtcccgtctccgagcaggacacgcaggaaggttatgtcgatattttcctctgcccgatgctggaaatctactccgacatgaagcacagctacatcgtagaactgaaatatgccaagtataaggattccgaaacccgtgtggaggaacttcgccgggaagccatcgcccaggccgaccgctatgccgagacggaaacggtgaagcgtggcatcggcaccacccggttgcataagattgtggtggtgtataaaggtatggaaatgcgggtttgcgaggaaatcggttgattggctacaaaagtttgtcattcggctttcataaaacatggtggtacgggaacattggcttgccatgcaaacgtttccgtaagcttgctgttacttttctcttgcgttaatcggtttgccctttcttttccggctatatttgtgaagtgataactttgaacacttcatattatgaaaattatcaatcaacgtaagatttctgttttatggcatttaatatgcttcagtttagtgctggcattcgcggcatgcagtgacgacaaagaggagttccaggagtatctgactcctgcttccggtagtgaatcaatctttgagcaaggttttagctttggtgaagctgcttcttcgcagagcgtcagttttgaggccgggcagcagtggacagccgagctgagtggcgaggataccggctggtgcaacatcagtccggcaaaaggtacgtccgggaaagccacgattatggtttccgtcggcaagaatgagacaggaaaagcgcggacggcacgattgaatattgtgtccggttcgaagaagaaaggaatatctgtcactcaggctgccaatgcgattgtagttccggatggtttgagttttgcaccggcagcaccggatgccgaccagccccttgtaattacttttaaggcggatgcaaagtctgctctttatgggcataaaggagatgtgtatgtgcatatcggggtggtcagtgaaggaacttggctgttcgttccggcagagtggacggaaaacaaggataaatgcaagatgactttaaccgaagccaacgtatggagtattacgttgagtccgaatatccgggaatggtttggaagcggaaagacaccggtgagccggcttggaatagtgattcgcagtgcggacggcagcaagaaagggatagaatcggattcctttgttgaggtgaccgacacaaaatatgaaggttttgttcctggtgaaattaaaactgcagcagtgccggccggtatggtcgagggtatcaatgtagtggataattctacggtgacactggtactttatgacaaagatgcgaatgggaatcataaggactttgcccatgtagtgggcgacttcaataactggacattgggcaatgacgaaaaatcgcagatgtatcgtgatgatgcttccggatgttggtggattacgttggcggggctggatgctggcaaagagtatgctttccaatattatgtaggtacgaaggcgggtgaagtggttcgcctggctgatgcctatacggaaaagattcttgatcctgataatgataaatatattccggcttctacctataacgaaagtatggcttatcctgagggaggagtaggaatcgtttcgaccttcaagatacagaaagacagttataactggaaggtcaatgactttaaaatagcaaatcctgagcaattggtgatatacgaattgcatctacgtgactttaccgcctccagcgacatcaatggtgcaatgggcaagctttcttatctgaaggctatgggagtcaatgccatcgaactgatgccggtgcaggagtttgacggaaacgacagttgggggtataatccttgcttcttttttgcgatggataaggcttatggcacaaaggccatgtataagcagtttattgacgcttgccatgaggcgggtatggcagttattctggatgtggtctataatcacgctacaggaaacaatccgctggctaaactttattgggatggtgataagactgcaaagaataatccatatttcaatgtggaagcacctcatccttatagtgtgttccatgacttcaatcatgaaagcccgttagtgcgtaagtttgtgaagcgcaatctgcaattcttgttgaaggaatataaggtggatgggttccgctttgacctgacgaaaggattcacacagacttcttgtactgaaagcacggcatccaattacgatgcaagtcgcattgccatcctaaaggattataatgctgccatcaaggaagtgaaagagggctcttatgttatcctggagcatttctgtgattcaaaggaagaaaatgaactggctgcagatggcatgcacttatggcgcaacctgaataatgcctattgtcagtcggctatgggatatgctgaaaatagttcttttagcagcctttatgagaaaacacctgcatgggtaggttttatggaaagtcatgatgaagaacgcgcagcttacaaacagtcgcaatggggtgaaggtatactgaaaaccgaccttgatgctcgcatgaatcagttggcgctgaacactacattcttccttactgttccaggtcctaaaatggtttggcaatttggagagatgggatatgacatttccattgaggagaatggacgtacgggcaggaaaccgttgcattgggagtatctggagaatactgaccgcaaggagctgcacgatgtttatgcggatttaatgaaattgcgtaacgcccatccggaattgttcgattcaagtgccatcttgacatggaaggtcggagtttctgattgggacaacggtcgttcattgttggtagaaagtgtaacgggcaagcagctggttgttatgggcaactttacgcataatgcggttgatgtagctttcccggcaacagctggtaactggaccaattattttaccggaaagagtgaaacaataaatacacaggtcaatgtaccggctcatggatatgtagtctacactaatttctaatttcggtaaaaatcattcatacatctttatcagcacccgattcagccagttccaacggaaacggaaccagcgtcgggtgctgctttgttttcccccgaagcggagaacgaactcacggtagccatgcctgcggaagggaagtcccacatccatgaactctaagtggcggtatccgcgttgtttggcatcatccagtgctttccatacggcaagaatccccggatattgcagggcataagtcttgcgcatgccaccagagaaccatagataggcgctatcatctgaataaatgcatgcgctgccaccgataatcttctccttataagtgacgatgaagattttgctttgctgcccttttgtcaactggttttcgagatgctgaaagaacttgatgctggggaagtggcgccgtatcttggaagaatatacgtggcgcaacatctgggcaaaacagagaatctcctctttggtacgtgcttcccgcacttgggcgccgtttttgagccctttctttatttgccggatacgtgacgggctgaaacgctcttccaccttttcgacgctgtgcagcgagttgcgcacccgcagccaattgatggcgatgtattggttgtcccggaaagatttgtatccgaacatggcattttccaggttgcggaactcgatgagaaaagaatcgcgcaatgcttcattggtaagcctttgtagcatgtcactgaagatagtctctttgtctgcctcgttattgaaatattctcccgtaccgtacacctcacatcttttgatgatgccgggtggaaacatgcggacacttttacgtatggcggcaagcagtttcgcaacgggcttgtcatcttcggatgccacaatgagtatgggggtataccccggagttgcctcgtagattcggaacaactctgtggaatggaaggtgttggtgcctggcagaacaggaaccttgctcccacggtaatatgtagtgagtttcaaaggcatggtctgcaaatttaaaaaataatctcgtatctttgcaaaaattattgttaatgtgtcgatgtgcacattagcatattagcacataaaatcattatggaaagtttcagtgaattgataaaagcacgccgcagcatgcggaagtttacagaagaagaattgacacaagaacaagtcgttactttgatgaaagcagccctgatggcacccacgtcgaaacgcagcaatgcatggcagttcatagtggtggacgagaaggataaattgaaggaattgtcctattgcaaggagcaggcatcgcagtttattgccgatgcggcactggcagtagtggttgttgccgacccgctggcaagcgacgtgtggatagaagatgcttccattgcttccatctacctgcaacttcaggccgaagatatggggctgggaagctgctgggtgcaggtgcgcgaacgttttacggcttccggtatgccttccggcgagtatgtgcacgaggtgttggatattcctttacagctgcaggtgcttagtgttattgctatcggccataaggggatggagcgcaagcctttcaacgaagacaatctgcagtgggaaaagatacatatcaataagtacggaggaaagtaacagtgagtgcagcaaaagcaaacaataaccgtgatacatataaggccactgccatcacactgattgtattcggcattctttacttggtggacaaattggtgcatttttctgcaatcggcttgccgtgggtgatgaataaggataattttctattgtataccgcagtgatttttctgctgttcaagcatgacaagtcagtgggattggtattgataggtttgtggctgatattgaacttcgggttgataactgccttactcggtacgatgtccgcttatctgctgccgttggcgttgctggtattaggggctattctgtattggttggcaacaagataagtgtatggcaggaagaagtatagaagatatgtccattgcctttatcggtgccggaaatctggctactaatctggcaaaggctctttatcggaaagggtttcgtattgtgcaggtctacagccgtacaaaagaatcggcgcaggaattggcacagacggtggaagctgcatataccacggagctgcaggcggttacgaaggaggcgcagctttatatcgtttcgctgaaggacgcggcttttgtagaattattaccccagattgtttctggaaaggagaatgctttatgggtgcatacagccggcagtattcctatgaatatttggcaggggcatgtagtgcgttatggagtgctttatccgatgcagactttcagtaagcagcgtgaagtggattttggacagataccgtgttttgtggaaagcaactcggaagaggatgtgcagcttctgaaggacattgcttccgccctatcggaaaaagtgtatgaagcaagttctgagcagcgcaaaagtttgcatctggcggctgtgtttacgtgcaattttaccaatcacatgtatgtgttggctgctgaactgctgaaaaagtacgggttgccgttcgaggcaatgctccccttgatagacgagacggcccgcaaggtgcatgagctggaaccgcttgccgcacagacaggaccggctgtgcgctatgatgagaatgtcattgacgagcatctgcggatgcttgccgatgagccgcaaatgctggaactatatcgggagattagcgagaatatacatcggttggcaataagataaccggatgccgatgcttgcctcttttgaactaatgttttgctgcatataggtatattataatgaacaagaaaaaagtgcaatgagtaccataaactatgatttgaaaaagataaaagcccttgtttttgatgtggacggtgtgctgagtgccaatgttatccctatgagttcggagggtgaacctctgcgtacggtcaacataaaggatggttattccctgcatttagctgctaagcaaggggtgttgctgggtataattacgggtggacgtacagaagcggtccgcaagcgttttacttctttaggttttgaggatggaaatatctatatgggttcttctgttaaaatccatgattaccatgacttccgtgaccgtcatggcttgaaggacgaggaaatattgtatgtaggtgatgatattcccgacttggaggtgatgcgtgagtgtggtttgccgtgttgtcctaaggatgctgtgcctgaggtaaaggctgtggctcgctatatttcgtatgcagaaggcggttatggctgtggtcgcgacattgtggaacaggtattgaaagtgcaagggctttggatggcagatgaaaaagcttttggttggtaggatggcaggcaaattaataattaaaaattaataattaaagtgaggcggctcgcttttgtaatatagtaggctgatgttggataatctgaagaaatataaggtgattcttgcctctaactctccgcgaaggaaagaattgctggctggtttgggagtggaatatgaagtaagaactttgtccgatgtggacgagtcttatccggagacgttgaaaggggcagatattcccctctatatatctaaggaaaaagcagatgcctatcggaacatgatgcagtcgggcgatctgatgattacggcagataccattgtctggctggatggacaagttctcggaaaacccaagaatagggaagaagctatgcagatgttgcgcgacatgtccggacgtacccatgaagtgtttaccggtgtgtgcatcactactactgagtggcaacgcagttttgcagcggcaacagaagtgcgttttgccaaactgaacgaagaagaaattgcctattatgtggacaaataccaacccatggataaagccggagcttatggtgtacaagagtggattggattcattggggtggaaaacatatccgggagttactataatataatggggctccccgtacagagactgtacagggagttgttggagatctaaaccagatccatcattagagggatatctttttcactgattccttgtctgacaagtgtttctttgtctttaccgaacatttctctaaaaatctcctgcccgccatattccaaagctgctttactgtaaagttctgcagctttttctattttgcccgttctccaagcaacatgtccggcattgagatagtctgccgcgagtggtttggaggcgagtatcttttcgtaatacttcattgcttgctcatacttgccgttgacaaacgaacaccagcctatagcacgccatgctttgatacaattgctttcgatgaaatcaagcttgaagaaatattgcagagcctcttcatatctttccagttcggcaaggcagcttccggcgtagaaaaggacattatggctttccggctggattgcctccactttcttatagtattccagtgcagaggcaaagtcccttatctgccggtagcacgtagcgagatggcggattgtccagacatggtcgggctttagtacatcggctttcaggtaggcgtctatcgcttccttatacctcttttccttttgcaggcaatagccagccttttggaaaatgtctgcatttgcatggttcaaggctattaattccttataaagctccaatgcttctgccgggtgttctttgcggaagtggaagtcggcgatggtaatcagcagctcgggtttgcacagaatctctttgagtgctgggatacggtgcagggcaatctcctccttgaagatgtcacggaactcgtgtctgcgctggcttaatttgaagaaacggtataagtcgtggacatactggttgctgatgacatccggtcgttcggcatactgccgcaaagcggaggatttgctttcgtccatgagtgcatccagatcctgagaagtcatctggctgagcatcatcgtacgctgtgactgtggtatatgtgccattgtaaagcaaagggaatacttgtcactattgcagaagaaaccggattggaggataagggagaggatggcattgtctccggtaggcttgaatccgaattccttgatgatgctggagtgatgcatgtcgaacggatagaaccagttgtacggttccttaaagaacggataagtcttgagttgtgcaaacgtactcatatagacatcagcgccttccagctgtaattcgttcatctctcgtatcttgtctcccagtccggaactttcaaaagctttttcccaatctggattaagatcgttttcctcagggttctcttcaaaaccgaacttcatgttacgcatgatgttcacattcctcatcatctccggaatgatttcttcacgcatcttcttgtctatcttttccgtttcctggctacggagcagctcgatgtaaatacggttcagttgcttgccgaaactgctgtcttcgttgagcagggaaaggcgggctgtcaattcgggataaagcgacagacgggtgggatgaaaaagaagtgcgaaagcgatacctaccaaagcccgttggtttacttgcgtatttgcatgcgttacggcgtccagcaaccatgagaatttacgggtatcaaagcactccatcagactgagcatgacggcactggtgaacaggcacaaatcattggtgggaagcatttctgattccagtaatcctttggcttgctgttcgtcttctgcagaccagtcgctgttgctccatgtggaaaggaaaagaacctgggcggtttgttcgtgccgttgcagtacggcgtccatgccttggttatccggcatcagctgacaaacggccaggtcatcagggaaagattccaataccttctgcagtgcggcaatattgtattctttggggaggcgttcccggttattgcgcagggaatggtaatagtgcgtggaaactccgtcaaggagagacagacgtgcctggtcagcgacttcccaagtttcggtcagaatctggcgatatagtttctgtcgttcaggatcgtcgattccctggcgcatgtattgcagcatgtactgataggatgtctgagcttgttccaagcggttgcggagtgtccagtcaccgctgttccaaagaaaggcttccagttgggattgtgcttccttcagccgttgctgcttgagtagagtaacgatatgctgatattgttcttgtatggcttgttcgttcataaatcagtctctttttgggtatgtatcttataaaactacaaaaaggatgccaaaaagttcataaatttccatttccccagctcagaaacgaacttgcaactctgcttgaagcaggtttgagttttctcctttatggcggttacagtatgtatactgggcttgcagacggcatttgggatagaaccaatactgtacacctgctacataattggtctgtttatcggaaatagttttatttttgttgaaatagtcataagaggctattacgtcaaatttgggaagcacatgggcagatacggttgcatagtaaccgtcacttttaacgtgtccgtcttttccggccaagtattctgtacgtacatctacggattttgttttgatggtggcacctgccgaccagcggtttcgggtgtaattctctcctatggctatgtctggattaatggaagaaacggctacggcgcatcctttccctttaacaaaggaaccgccgacggacaaccatttcaatggatgtaccataaggctgcctacaatatctttctgattgtttttatcttttaggttgatgccttgtccgttcatgatggcaaggttataagtcatcaaagagtcgaacaagtctccataaattaacaatcccatatcacgaccgcttgcagagccatacaacggatcactgccattgataccggccaggtaattgacggcttgagaataacagtttattaattcgacaaagcagggagacatcgggttctcaatggtatacatggttttgaactgtccgatacgtgctgtgagttgagggagaaagcggtattccgtgtaggcttccagaatttttccggtattggcaaagctgtacatgaagtaagccgaccatttatcggtgattttaccgcgcgccataaagataactctctttatatcgaaagtattgctggtaccttcgcccgcatcatcgtatgtatatcccacttgggcatagccggagagtgaaatgcggtcttttaaagtgttgactacatcattcagacaagcatcttgtgctttcaggatgcatgtggctgataaaaggatgcaggatagtagaattcgtctcattatagggatggatagtagtaaaaaaggcaacccttttttcaaagagctgcctttgggtgttattttgcttgtttttattcgttgatagcagcgatacccggaaggatttttccttcgattgcttcaagcaatgcaccgccaccggtagatacgtaagacacgccgcttgccaagccgaacttgttgacacaagctacagaatcaccgccacctacgagtgagaaagcaccgttcttggtagcttctacgatagcttcgcctacagcgcgtgaaccgtgagtgaagttctcgaattcgaatacacccgtcggaccgttccaaaggatagtcttggagttcttgatgacatctgcaaagatcttttcagtctcaggaccgatatcaagaccttcccagccatcaggaatttcgtcaaccgggcagaacttggtgttggcatcgttggagaaagaatcggcaatcttggcatcaacagccaaaacaaggtttacgcctttttcttttgctttcttcaccaggtcaagagccaaatccagtttgtcatcttcgcagatagaaataccgattttgccgcccatggctttggtgaaagtataagtcataccgccggcaataatcaggttgtctaccttgttcagcaggttttcaatgatttcaatcttggaagaaactttggaaccacccatgatggcagtaaacggacgttggatatcgttcaaaactttatcaacagcctttacttctttttccatcaggtaaccgaacattttgttgtccttgtcgaaatatttagcgatcaatgcagtagaagcgtgtgcacggtgagcggtaccgaaagcgtcgtttacatagcaatctgcataagaagccaatttcttggtgaattctttctggctttccttaacagcagctttggcagccttcttttcttcgtctgtagcatcttcagccaaaccgcggggtttgccttcctcttcagcgtagaaacggaggttctcgagcaacaacacttcacccggttgcagagcagcagcctttacggcagcttcttcgcccatacagtcgttagcaaattgcacctcaacacccaacaactcttcgagatgcttcagaatgtgcttcaaggagaacttgtcagccgggcctttcggacgaccgaggtgagaaccgataattacactaccgccatcggccaaaatcttcttcaatgtaggaagagcggcacgcatacgggtatcatctgtaatgttgaagttttcgtccaagggtacgttgaagtccacacgaacgaatgccttttttccggcaaagttaaattgatcaattgtcataatactctattttatttaaaagtgttactaatttctttttagtgagcgcaaagttagcatttatttcttttttttgctatgaaaccgttgtttattctttgtctttgccgctctctttgctaactttatatttctggcagtaatatttgcacattaattgcaaaccgcaggtatcacattgtggagtacgtgcctggcatacatagcgaccgtgcaggataagccagtggtgagctatggggatgtctgtttccggtatatgttttaccaattctttttcgacactgaacggagttgtacatttatctgatacgagacccaggcgatggctgacgcggaacacgtgtgtgtctactgccatagccgctttattgaaaacaacggattggatgacattggctgttttgcggcctacgccgggcagttttaccagttcttcaagggtatcgggtacctcactgttgaattctttcaccaacatctgtgccatgcctacaagatgtttagctttgttgttgggataggagacgctgcggatatactcgtataccacgtcgggagtagtagcggcgagtgcttcgggagtagggaagtcccggtaaagggcgggggtaatcatattgacgcgtttgtccgtacattgtgcagagagaataactgctatcaacagctcgaacggattgtcataatgcaactctgtttcggctacgggaacgttctccctaaaccaagcaaggattttttcataacgctctttctttctcatcttaatttgtttttatgatagtgaggagatactttcagattgaaatagaagatggagataactgtgaggcaggctccgaaaaaatatgccatatcgaatgaggtaatctgtgcgatataacctcctgctgtcagacctataccaatgcctacatcccatgaagtcaggtaggtagaggtggctgttccgcgctggttgttgggggccaggtttacgaacagcgtattgaaggcggggaacatcgtcccgaagcctactcccaataggagggcaaccataaaaaacaatatgtttgtcagttccgggacggtcttcatcagtagtccgcaagcggacaatatgaagaaacagctacataccagatatagtcctaaagttatgacttgggtgatacgtcctttatccacttgtttgccggagaacatacgggacactgccatgccgacggccataaaagtaaaaaacaatccggaattcaaggtaattcctatttctttggcatacatggctacataagtgcttgtcatgccatatggtatggagagcaatagcagtgcgattcctgccgggatacctttcagcagcacaaagcggtccaatgagataggttctcgtttgactggttgtttgggtggggtcttgacgaggcatgcggcaacaaaaccgatagttcctgatatgagcgagcaggcaaaaatcgtttcaaaggaatatatgtcatgcatgaaaagaccaatcatcgggccgaagctcatggctgtattgttcatcagtccataatatcctacggcttcgccgcgacgggacgaaggggtaatgtcaatcacaattgtatttcccgctacggtcaccattccaaatgcaaggccgtggacaacccgcaacatgatgaataaagataggactcccgctaacatgtaacctgcgaaaatggtgataaagatgaagtatgccaccagataaagaggcttgcgggctagcgtgtcgagcaggtatcccgaaaacgggcgtatgcagagcgaggcaatggtgtagcatgacaagatgacacctactgctgcatttccggtatggaatacctcagtcaggtagaatggaagaaccggtagtatcagataaaaggcaaaatacaaaaggaaattggcagccaggataaggcaatagccggaagttacaagtttgtcttttgccatagcgaaaaatagtggttagcgatgagtggttagcgatgagtgattaatgatatgctgaaaatgcgcaacttattaatcactaatcactagccgttattcactatatttagtaagcgctctcgaattctttcaggaagcgtgtgtcattttcagagaacatacgaaggtctttcacctggtatttcaagttggtgatgcgttctatacccatacccagggcatacccgctatacactttactgtctattccgttcagctccaatacattcggatctaccataccgcatcccagaatttctacccaacccgtatgtttgcagaaaggacaacccttgccgccgcagatgttacagctgatgtccatttcggcactcggctcggtgaaggggaagtaggaaggacgcagacgaatcttggtgtcactgccgaacatctcttgagcaaagagcaataaggcctgcttcaagtcagtgaaagacacattgcggtctacgtataaggcttctacctgatggaagaatgcgtgtgcacggtagctgatggcttcattacggtatacacgtcccggacaaagcacgcggataggaggctgtgtagtctccataacacggctttgcacgctggatgtgtgtgtgcgaagaatgatgctgtgcgatacgttttctgtatcattttcgatgaagaatgtatcctgcatgtcgcgtgccggatggtcttcggcaaaattcatggaggagaatacgtgccagtcgtcttccatttccggtccatcggcgatattgaatcccatacgggcaaatatatcgatgatttcgtttctcacgatggagagcggatggcgggttcctaattctatcgggtaggctgaacgggtcaagtcaatatcgtcacagccggtatcttggctttcgaactgttctttcaaagcggcaatcttttcttgtgctttgtttttcagttcgttcaagcgcatacccacctcttttttctgttcggcggctacattgcggaaatctgccatcaagtcattgatggctccttttttactgaggtacttgatgcggagtgcctctaattcctcggcgttagcggctttcagcgcctctacttcctgcagaagctgattgattttagctatcatatcgttgttatcttatttattttctaagttaaaaacggtgcaaagatacaatattatcattgttttgcctccacttggggaagataatttggtatcagtggtacaaaattttatgtgaagaagaaatgatagaggatgggagaaaaaatgatatatatgtaaaagtcttcatattgtttatggaaaaaacataaatgagcgttgtttagtgacttttaaaatatacttttcgtatctttgcgccccgtttactgttctatggaggtagaacaaactggcggttggtatttattaacatacgtcaaagagagagagttaacggagtaattgttgcattaaagttagagtttgaattgatgaaattgaagacaatcctgccagtcgtggcagttgcgggagtactcatgtgtgagcctgccgtattgttgcatgccggtacatctgattttgcttctcccgaagctatgggatggttccgtaagaaaaagaagagtgaaaccaaggacagcgttcaatccaagagcgactacgaaaaattgactggttccgatgctattgcccgcaagggaatgttcaatgtttaccagaagaagagcgattattactttgaagtgccggcaaggctgttgggacgtgatatgctggtagtaaataaattacaacgtgtgccttccgaactgaatgaggcaggtgtgaaccgtggtacgaattacgaaaatcagatggtgcgttttgaattggacaaggctgccaacaagctgttggtacgtcagagccgtcctcttccgttggcgccggatgaggatgccatacggcagtccgtactggataattatatttctccgctgatagccggtttcaagattgaggcattcaataatgactctaccatgatagtggtcaaggtcaacgatatttatgatggtacagagacgagtatcaataatgtctttacgaatatcaacctgggaacttcggccatcaagaatctctcccgcattttatctatcaaagcttttgagaacaatgtggtagccacttccgagttgacaactaaggtgaccgagggaacaacgactgtgtttgttacggtcgaagtcagttcctctctgttgctgttgccggagaaacctatgatgggacgtctggatagtccgcgcgtaggttactttaccaatccgttgttgaattacagtgacggtcagcagcgtgtagacaagaaacccttcatcacccgctggcgtctggaaccgaaaccggaagaccgggagcgttaccttcgcggtgaattggtggaaccggccaagccgattgtgttctacatcgagaactccactccccgtcgttggcggaaatatatcaagcagggaatcgaggattggcaggctgcttttgaacgtgccggattcaagaatgctatcatagccaaggaactgacggacagcatgaatgtggataaggatgacgtgaactactccgtgctgacctacgccgcctccaccaaagccaatgccatgggcccctctatcctcgacccccgttcgggcgagatattggaagcggacatcatgtggtggcataatgtgctgggcatgctccaggaatggattacagtgcaaaccggtgtcgtacgtcccgaagcaagaggagtaaggctgccggatgagctgatgggcgatgccatgcgctttgtggcatgccacgaggtggggcactcgttgggcttgcgccacaatatgattgcttcctggacttttccgacagattccctgcgttccaaaacatttacggatcgtatgaataccacttcctcctctatcatggactatgcacgtttcaactatgtggcacagccgggtgacggtgttacggcgctttctccccatatcggtccgtatgatatgtttgccatagaatacggctatcgttggtatggtaaagaaaccccagaggcagagaaggacttgcttgccgacttcctgagccgtcatacagaccgtttatataaatatagtgaggcgcaggatgtacgtgatgccgtagacccgcgtgcgcagaatgaagatttgggcgatgatgctgtccgctcatctctgctgggtattgagaacttgaagcgtattgttcctcaaatcatccaatggactactactggcgagaaaggacagacttatgaagaagcttcccgcctatactatgcggttatcaaccaatggaacaattacctctatcatgtattggcaaacatcggtggtatctatatagaaaacaccgttgtgggcgacggacagaaaacctatactttcgtagaaaaagaaaagcagcaagccgccctgaagtttctgctggacgaagtgctgacctatcccaaatggctgttcgacacggaagttggagagtacacttacttgctgcgcaacactccactgagcgtagtggagaatgcaccgacacaagtgttgaagaatgcccaatcctatatcctttgggatttgctgggcaacaaccgcctgatgcgtatgttggagaacgaatcggtgaacggcaaaaaggctttcacggtggtagagctgatggatggcctgcatcgcaacatctttgccactacggaacgcggtgccttgccggacgtcatgacacgcgccttgcagaagaacttcgtagatgcactgattacagcagctgccgaaagcgaaggagtgaaaataaacaaaaaactgatggacaaccacttcttgctggaccatcagactgccctttgcagctgtgacgagcatgccggtaagactttggatgccgaccgtatgggtgcacaccgcgaactgaacttctacggttcgcagataaaccgcgtatctgatgtcatctccgtgaagcgtggtgagttgcttcgcatcaaagaattgctccaaaatcgtctgggtgcatcggatatagccactaaatatcattataaggatttgattttgcgtatcaatactgcattaggagtaaagtgatttttcttttcaatagagtattaattaattttatatgtaacgcatgaaaaaacgtgtattaatcgttttgctatgctttgtaggagctttgtcatctgcttttgctgcagagaaaaaagtccagggcgtagtaatatcttcagaggataacctaccgcttatcggtgcttccgtttatgtgactgcggaagacttgaaaaaggcggggagtgctcagactacaatgggggtcatcactgatgtggatggtcagttctctatcgctatacctgcggggataacccgtttcttttgtagctacgtgggatatgacgtattggaagtgaagcttgttccgggaaaggaacattatgaaataacacttcatgcatcttcccaaatgctcgatgccgttgttgtgacgggttaccagacagtggagcgccgcaagctgacggcagcggtatccaaactggatatatcggacgagaccatcggtgcagtaaaaagtatcgaccaggcacttgccggacaaattgccggactttctgtcagcccgacttccggtgctccgggtgctccggcaaagatacgcattcgcggtactgcttcattgaatggtacacaagaccctttgtgggtgctggacggcattcctttggagggaacggatgttcccgaaccggatgagctgaatgacatcaccaacatgaagcaatcttccattgcaggcctgaatccggcagatattgagaatatcaccatcctgaaggatgcggcagccactgccatctatggtgcgagggcagccaatggcgtcattgtgattacaacaaagaagggtaaggtcggtaaaccggttatcaatttctcgtcccggtttacctatactcctacattgagccttgaccggttgaacttgctgaactcagcggagaaagtaggattggaaatggatatgatccgtaataactattctccggacaatcataaaggaggcgtatataatattctttccaattacaatgagttgtctgcttttcagaatggaggatgggatgccttgagcagtgatacacaagctgccatcaaccgtttgaagagtgttaatacaaactggggagatatccttttccgcgatgctttcagccaggaatataacttgagcctttccggcggtacggaaagggttacgtattatacctctttcggctattataaagaggatggaaatgtggacggtgtgggtatggaccgtttcaacttggtaggaaagacttcctataaggtgaacagtatactgaaagtgggtgcctccatgtttgccaaccgtcgcaaaaataccaattatctgacagatgcatacggtatgtcgaatcccgtgttctattcacgcaaggctaatccgtattttgaactttatgacaagaatggcaactataattacgactacgatattcagaacaacactgataaggatttaggattcaacatctttgaagaacggcagaacacgtctaatgaaagcgtggtgaattctttttcatctatatttgatgcggagttacggttcaatgacaagtggaagctgacttcccagtttggctatcagttggaaaaaacttccagagaagaaatagcggactgggaaagctatgccatgcgctattactataagttgagcgaatactcccaaggtggagaaaccaaacactttctgcccgaaggaggtatgcagaagtcttatgaaaactccaattcacagattacttggaaggcgatgggagaatatcgcgacagcttcaatgatattcatgaactggaagtgatggcaggtaccgaactgcgcaagacttggtacgaaaccttgttctcggcagggtatggcttcgaccgcaagacgttgaccaccaagccggtgattttccccaacgaaagttacgccacgtctttcccgctccatcagacgacgtataaggagaatgcttatgtgtctttctactctacggcctcctactctttattgaatcgctacacggtgggaggaagtatccgttttgacggttccgatcttttcggtgtggataagaagtaccgctatcttcctctttattctgtcagtgccttgtggcgtctgtcacaagaaccgtttatgcagcaggccaagtgggtagataacctggtgttccgtgcatcttacggtctgcagggaaatattgacaagaatacttctccgttcttgttgggtacatatcggtcggagagtattttgcccggagtatcggaagatgtaattatcattaattccgctcccaacaagaagttgcgttgggaaaagacgcagtctgtcaatgccggctttgatttttctgtattgaaccaggctatcaatctgagcgtggactattattaccgtaagggtaccgatttgatagctttgcgcatgcttcctctggagacgggctttacttcaatgaacgtcaactgggcaagtatggagaacaaaggtgtggaaatcagcttgtctacccgtaacataacgacaaaaaacttctcctggtacacaaatttcaattttgcctataacggtaataaggtattgcaggaaaacataccggagcagcagaccactccgggacgtgaaggctatcctgtaggggcaattttcgcactgaagactgcgggagtgaataaggaaaccggtaatatgatgttctataatccggagggagagaaagtgaccttgaaggagctttaccgcctgaaggacgagtgggggataggtattgcctcttccgatgtaactgcagccgaagagagaaccttttattcgtatatcgggagtagcgatgctccttatacgggaggtttgattaataccttcagctataaaaactgggagctgaatgtcaatttctctttgacgtttggcgggtacgtacgtacgcaaccctcttatgacatcatcaatccggattatggcaagaactataatgcggatgtgctgaaccgctggactccggaaaacccgaatgcggagcttccggcatttatgctgagtgcttccaacccggaagagtactcctggtatgattctaaaaccatctggagagatttggatatctgggtgaagaagctgaactacgtacgtttgcagaatctgcgtctgggttaccgtatccctgagctcctgacaaagcgtttgggaatgaactcggcaacggtatctattgaaggacgtaatctcttcgtgtttggttcgggatataataactacatggatccggagtcgatgtacaatccttatgcaactcccgtacccaagtcggttacattcagtttgaacttgaatttctaacttcaaaagcagaaagaaaatgaagaaaacaataagtctgatgataatggcctgcatgcttctgcttgcggcatgcgacaactatctggatatacagcctaccggtagtgtcattcccaattctttggctgagtatagagcgttgcttgcccgttcttataaggacgtgagtaaattcagtgaccggggaatggcttgtttccgttccgacgagatgcaggttcgggataatgaatatgaccaaaattattatatggatatagagcgctggaacgaccttgctcccaatgcctatacctcatcgtttgaatgggccaagtattacaatgtgctttttattgccaatcacgttattgagagcagaagtgatattaaggaaggcactgaggaagagataaatcagcttgtaggagaagcgtatatgctccgtgcttatgtacatttcttattggtaaatctttatggacagccctatactaaggagggagccttggataccaaatcggtaccgctgaaattggatacggatttagagaaagtcctgaaacgcaatacggtggaagaagtttatacttccatccaagcagatattgacgaggcacgcaaactggtcatgaaggcagaatgggaacagagatattcatatcgtttcaatgcggcttcggtagaggcgtttcaatcacgcgtatccctttataagggcgagtggcaggcggcttgggatgctgctgaggcagtgcttgccgtgaagtctgtattggtagatttgaatgatgccgctgcaactcttcctaacagttataattccgtggaaaatattactccactggagacacccctgagcagtacaatcaatggggctgctctggctactccggtttttctctccctttatgctgagaacgaccttcggctggacaaatattttgctgaaacggatgaaaaaggtttccggaagaataagaaggcgggaagcaataactacttgtgtactttccgtgtgggtgaaatatatctgacggctgctgaggctgctgcccgacttggagaactgtctcaagcacgtactcgcctgctggaactgatgcggaaacgttatgcaccggaggcctacgaagcgaaatccgttgttgtcaatgccatggataaggaagtgttggtacaggaaatattagatgaacgtgcccgtgaacttgcttttgaaggacatcgctggtttgaccttcgtcgttccacccgtccgcgtttggagaaagtgcttgatggtacgcgttatgtactcgaagagaatgatgcccgctatacattggccattccgaaagaagccatagaagccaatccgggattgctgaactgataaagataaaactccccgattctgtattgacgagaatcggggagttttgtctttatgtggattggatatgtattttttacgtacctttgcaccgttttttgtaatagacagtataagatgatacagaatcagagacctcctatccgtagaattgcttttcctattcttatagcattgagtatttcgcattgtttgaacgatatgctgcaatcggttatttcggcagtataccctttgttcaaggaggatttatccttgagttttgcccagattggtctgattacgttggtgtatcagatgtcggcgtccgtgtttcagcctctaatgggattgttctttgataagcgccccattgcctggtcattgccgataggtatgggctttactttggtcggtatcatgaatctggcttttgctactaatctgtattggttgctggcttcggtattcattgtgggtatcggttcgtctgtactccatccggaggcgtcacgtattacttttctggcttccggcggaaaacgcggactggcgcagtctctatttcaggtgggcgggaatttgggtggctcgcttggaccgttactggtggctttgctggtagctccttacgggaggcatcacattgccttgttcatggtttttgccttgattgccatcgtggtgatgattcctatatgtcgttggttccgttcctacttgaaccacatcaagaaacgcccgatgcttgtggcaggaaagatagaacgccctctttcctcaaagatgacggtgtttgccataagtattctgctgatacttatcttctccaaatatatctatatggcaagtttgacgagctactatacattctatctgatccataaatttggtgttactgttcaggcttcacagcttttcttgtttgtcttcctggtagccactgccatcggaacattggtgggaggtcccgtaggtgacagggtaggacgtaaatatgtcatctgggcttccattcttggaacggctccatttagtatgatgatgcctcacgtagggcttgcatggacagtagtgctgagcttctgtgtcggtctgatgctttcttccgcttttcctgccatattgctgtacgcccaggaattgctacccaataagctgggtttgatttccgggttgttttttggtttcgcttttggaattgccggtatcgcttcgactgtattgggaggtatggcagataagtatggtatagaggctgtttataatgtatgtgcctttatgcctttactggggttggtggcttgctttctgcctaatttgaaaaagagatagagattttttattcccattgtcagccatacggagagaacgaaaggtgcggtcaatgtaataattccccaattcattcccacaatttgcaatacaacagagagtaaaacggaacatgcagcccatatacagctcatccagcttttacctcctaaagcaagggcacacaatacgccattatatcccatcagacccatattcaaagcttcggaatccactcccaataatgtggctaggaggagggggagaagtgctcccaatatggtatatactgctgcattccgggaattcacgagaatgcctgcaaggaaaaatagtccggtcatcatgtttccttgaaacatcacctggcctatgcccatactgaaacattgtaagtaatttatggaggaagaagcgggtgtttctgtatcagagacgagtagcatgtcaggcatcagccaactgcacaatcccagcagcatccatacagaaaggataaaaggggtagtgaatccgggcaacacgcgttgcatgttgaaaaaccgtgcaatgtaggtagatgcacacgaggcaatagccatcagcatcaaggaacttacagtcagaagcataaagacccctacggctattcctaccagtgtaccgttaaaaccatataatccattttttatatcatcacagtcatatcctgagatacgggctgtcaacgtacttattatgttgccacttacagccaataggcccatttgccatgaattcaaaaagattccaatcaacatcaataatccggacaatgcattgttttggaacatgacttgccctatgccacgtcctaaaataagtaatgacttgcgtgtaaaagcttctttcatgagttgtcgaatgaaaatggactatatgtaaatttatagctcgttaatgcgtacaaaaaaaacgattagactaatctaaccgttttaattttcgtggagcgtatgagactcgaactcatcacctcgacactgccagtgtcgcgctctagccagatgagctaacgccccgttgccacgtttgcaggcttgctttcgtttttgatggtgcaaatataatgcattattctgaaataattgctatgtttgcgaaagaatttgaaaaaataagttatgctgatatataataccacttatcatgtagaggaaggagaagacaaaaacttcctgatatggatgcaggaacactatcttcccgaggtagaaaagaacggaacattgtatgctccacgtatagcccgtatcttgagtcatattgaagaaggaagcatctgctattctgttcagtttgaggtagaaaactctgccaaactgcatcgttggtatcaagagcaaggagtgaaactgaacgaggaattactgaatatctttaaagataaagtgattggctttcctacattgatggaggtaatagtgtgatacaaccggtcaaagagaaaataatattgggtatagaccctggtaccaccattatggggtatggagtattgcgtgtggcaggtgtcaagccggaaatgatagccatgggaattatcgacctccgcaaatttggagaccactatctgaagttacgtcatattcatgaacgggtactgagtatcatagagagttatttgcctgacgagctcgctattgaggcccctttcttcggaaagaatgtacagtccatgttgaagttggggcgtgcgcaaggcgtagcaatggcagctgctttgagcagggatattcccattacggaatatgctcctttaaaaataaagatggccatcaccggaaacggacaggcatccaaggaacaggtggcggacatgttgcagcgtatgctgcattttcctaaagaggatatgcctacttttatggatgcaacggacgggcttgctgctgcctattgtcactttctgcagatggggcgtcccacggtggagaaaggctatcatggctggaaagactttattgccaaaaatccggataaggtgaagaagtgataagaattgaaatgtagaatctaaaaataatatcatgaaattgaatgaacttgctatcattggagtggctgcaacgacggttgtaagctgcactcccgcgaagacggagtatgcttcgtacgaactttaccctgtccgttcgggtagtctgacagagatggaatatacacctgctgccacgcaattcacattgtgggcacctacggcggatgaagttcgcctgatgttgttcgaagcaggagacggagggcatgcctatgaaactatttcaatggaatcctctgaagaaggaacttggaaaactaaagttgaaaaggacttgataggtaaattctacacattcaatgtgaaaatcaatgataagtggttgggggacactccgggtatcaatgccaaagctgtaggggtgaatggaaagcgtgccgccatcatcgacatgaaatccacggaccccgaaggatgggcagatgataaacgtccggcattggcctctcctgccgatgtgattctttatgaaatgcaccatcgtgatatgtccatcgacccgtcgtcgggtattgagcataaaggaaagttcctggcattgacagaacaaggaacggtaagtcccgacaagctggcaaccggcattgaccatctgaaagaattgggagtgacacatgtacatcttcttccgtcttatgactatgcctccgttgatgagacaaggctggacgagaacaagtataattggggatatgatccgcagaactacaatgtgcctgacggctcttattctaccgacccctacaaaccggatgttcgtatccgggaattcaagcagatggtgcaggctctgcacaaagcaggtatccgtgttgttctggatgtggtgtataaccatactttcaatacatccgacagtaattttgaacgtacagtgccgggatacttttaccgtcagcgaccggacggaacgtatgcagacggttcggcttgtggcaatgaaactgccagcaaccgtccgatgatgcgtaaatacatgatagagtctgtattacattggattaatgaatatcacattgacggattccgttttgacttgatgggtatccatgacatcgagacaatgaacgaaatccgtaaggcggcaacgtctgtagatccgactatatttatatatggtgaaggatgggcggcatcggctccacagatggcggaagattctctggcaatgaaagccaatacttataagatgccgggtgttgctgctttctctgacgaaatgcgtgatgctttgcgcggtccgttcaatgacaatcatcaaggtgctttccttgccggattgccgggaggagaggagagcataaagtttggtattgtaggagccatcaggcatccgcaagtaaataatgactctgtgaattatagtaaggctccgtgggcggaacaacctacacagatgatcagctatgtttcctgccatgatgatatgtgcttggtggataggctgaaagcaagtatcccgggtattactcccgtagaattggcaaagcttgacaaactggcgcaaacagccgtattcacttcccaaggtgtaccgtttatttatgccggtgaggaagtgatgcgtgacaagaagggagtacacaatagttttgagagtcccgattccatcaatgcgattgattggagacgaaaggcggagcatgcagatgtatttgcttattataaaggtttgatacagcttcgtaagaagcatccggctttccgtatgggtgatgcggatttggtgcgtaagcatttggaatttctaccggttgacggcagcaatgtggtggtttaccgtctgaaagaaaatgccaacggtgatgcatggggagatattatagtagtcttgaatgcccgtaaggagcctgccaaacttaccgtacccgaaggtaaatatacagtggtctgcaaggatggctttatcaatgaacaaggtttgggcacactgtacggccccgaagttgttgttccggcccaatcggcactgattatgtataaatgatgattggatgatgcagcaacatacaatacacatagcggggggcgtagtacgcaacccgcttgttcgtttgacagagcctgtcactcttgatttcctggcaggagaacacattgccattgtaggaccgaacggagccggaaagagcctcctggtggatatgctgacgggaaagtatcctttgcgtgatggtgagcttacctatgatttctctccctccctcacgaaaactgcctatgacaatatcaaatacattgccttccgtgatacttacggttctgccgatgccaattattactatcaacagcgttggaatgcccacgaccaagaggatgctccgctagtacgcgaagtgctgggagaggtaaaagacgatgccttgagacggcagctatttgaacttttcagcatagagccgatgcttgacaagaaaatcattcttctcagcagtggggagctgcgcaagtttcagttgactaaagctttactgactgttccccgaattcttatcatggacaatcctttcatagggctggatgcgcctacccgtgaactgctttttaatttgctggatcggcttacccggctgggcgagttgcagattgtccttgtgctttccatgttggatgacataccttcatttgttacacacgttgtgccggtagaggagatgaaggtgggcgaaaagatggaacgtgaggagtatgtgcaggcattctgtgcgggcaatcagatgcgtattcaggaagaggccggagcgttggaggaattgcagcggcgtattctcgatttgccctacgaacatgcgaatttcacttcggacgaagtggtgaaattgaacggggttagcatccgttacgatgaccgtaccattctgaaggagctggattggacagtgatgcgtggtgagaagtgggcgctgagtggcgagaacggtgctggcaagtctaccttgcttagtttggtttgtgcggataatccgcagtcatacgcctgcgatatcagtcttttcggacggaagcgcggaacgggggagagtatttgggaaatcaagaaacacatcggttatgtcagtccggaaatgcatcgtgcttatctgaagaatctgcctgccatagagattgtcgcttccggtctgcacgacagcatcggattgtataaacgtcctcatgccgaacagatgtcggtatgcgagtggtggatggatattttcggtattgcagccttgaaagacaagccttttctgcaactctccagtggagaacagcgtctggcattattggctcgtgcttttgtcaaggacccggaactgctgatattggatgaaccgcttcatggactcgatacatacaaccgccgtcgggtcaagaagataatagaggcattctgccatcgtcgggataaaacgatgattatggtaacccactatgagaatgaattgccgcaaacaattactaaccgtttattcttgaagcgaaaccgctgaccgaataatattgcgtcagggaaagataataaaggactagcgggaaccatttatgatgtaaatcgttatatttcctctatgaaaagcaagaccgcgactatctttgtgagtggaaacgagtgtctattcctttctacatcttttttccttgcactactgcatgacggttcagttccgattatagtcggaacaatgaacaattatgtacatttcctcttcgagattaaaactcaaccgggtgtcctactccgtccgaaacgatagccactttgcgaaaacgggatataatcaccacaaatatattgaccttgtaacggacggttgtatcattatacggcagtcatatcggttgccgtataatgatctgttggtttgatatactgagttccctgactaagtacataccatactgcaacaagtatttttctcgcaatagctacttgcaccttcatcttgttctttcttctttcgatacattgcctgtatgagaattctgcgaaaaatgaatctttcatacgtgcagctccccatgaacattcaatcatggtttttcttacaaacctgttaccatgtgtgatacctcgtgccttgattttgccagcgctttcctcgttacggggtcttagccccacccatgacaccaatttctttggtgtctggaaatgtgtcatgtctgttcctatttctgctattattgaggtcgaactacgttctttcactcccggtatagtctgaaggttttcaacttcttgaggaaaccactccatgcatagtgcagtcatcttttcctgtgcttcgtccttgtgtcgttgctgcaattcaatctcttctacaagctggtttataatgtctatgtcggtctcgctgacaactccggtaagtgctttcaccaatgtttctctgccatgcctgttgattgttcttccatgcagttccttcacaaggacttccgcatctgtcacaccttgggatataagtttaactattgaacggtaccctttggaatctgttgtggatatataattactgattctgatgttgcacctctggatgcattggtcaagtttgactaaattgcggcttatggaaacattcaggtcaaatatccttctgtcatattgacgcagacgttgaattttatcatcaggaacaaagcttgatgctatcagttctttactcagacaagtagctatccattcggcatcattcacatcactctttttgccaggaagctgttttataaaataagggtttaccagatgaagtttcactgacccttcaagcactcgccatatgggtatccagtagatactggtactctccattgcacactcttcaacaccttcagagaccataaggtcgcgaagtgtgaccaactcttcggtaagaactccgaatttatgctggattttttctccattagcacacagaatacagcaaaaaacactatctttgtgtacgtcaagaccgcagactaccttcatagaagtatttttttattgggacatcaagcccgttggacatatgaggatggggaaaccctatgacctcgtttttaccacaaagatagtcgcggtcttgactttcttatttaccgggcgtaaaaaatctgtttttttatatacctttgtaatatcaaccatctaaacatttatatcatgaagttttttattgatacggcaaatttggaacagattcgggaggcctatgacttgggcgtactcgacggagttaccactaatccttcgcttatggcaaaagaaggtatcaaaggagtggagaaccagcgtaagcactatgtggacatctgtaatattgtgcaaggcgatgtaagtgccgaggtgatagccaccgactatgaaggcatgattaaagagggtgaagaattggcagccttgaatccgcatatcgtagtgaaggtgccttgcattgcagaaggtatcaaggccgttaaatacttctcgggcaaaggtatccgtacaaattgtactctggtattttctgtcggtcaggcattgcttgcagccaaggcaggtgcaacgtatgtttctccgtttgtggggcgtctcgatgatatctgtgaggatggcattgcattggttgcgaagattgtagagatgtaccgttattatggatataccacccaggtacttgccgcctctatccgtcatacggcacatatcatgcagtgtatagaggtgggtgctgatgtggctacttgtccgctttcggccattaagggtttacttaatcatccgctgaccgattccggtctgaggaagttccttgaagattacaaacgcgtgaacggataaacttaaaatatcctataagcctatctttcaatgtaattattgactaatattggtgagaaatagaataaaaagatttatttttgcgccttatatttagatatacaataaggcaccgatgaaagataggctcataggatttattaaccttaattccgcaacactattacaaatataactttttaagtacctgagcaacaaaaagttgctcaggaatttgccatgtcagatttttcacctatcttagtgttgcaaatcaaaatatgtatcaaacccgacagacatggcaaaggtagcaattaaatccgagaaactcactccttttggaggaatattttcaataatggagcaatttgactccagactctcatctgtaatcgactcaaccctcggtatgagatgcaggctgtatggttatcaatacagcgaaatcatccgttcgcttatgagcgtttatttttgtggcggctcatgcatcgaggatgtcaccactcatctgatgtaccacctttcgcttcatccgacacttcgcacatgcagtgccgacacgattcttagagccataaaggaactgacccaggataacatttcctacacatccgacactggcaagacctacgacttcaacacggcagacaagctgaatacactgctcctcaattgcctattgtccacagggcagctgaaagagggcgaggggtatgacgttgacttcgaccaccagttcatagaggctgagaagtttgatgcgaagcctacatacaagaagttccttggttatcgccctggcgtggcggttattggcaacttgattgtcggcattgagaacagcgacggcaacacaaatgtccgtttccaccagaaggacacgctgaagaggttctttgaaaggtttgaacaaaacaagcttattatcaaccgtttcagagctgattgcggctcgtgttctgaagagatagtggaagagattgctaaacactgcaagaccttctatatccgtgctaaccgatgcagttcgctctacaatgacatctttgccctcagaggttggaagaaagtggaattgggcggcattgagtttgagctggcctccattctcatcgagaaatggaaagggaaggcataccgtcttgtgattcaaagacagaagcggatagacggcgaactcgacctgtgggaaggagaatacacctaccgctgcatccttacaaatgactacgagtcttccgagaaagagattgtcgaattctataacctccgtggagggaaggaacgcatcttcgatgatatgaataacggattcggctggaacaggcttccaaaatcctttatgggagaaaacacggtgtttcttctgcttatggcactcatacgcaacttctataaattcatcatggcgaggcttgacgtgaagaggttcggactcaaagcaacaagccgcatcaagacgtttgtctttaagttcatctctgtgccagccaaatgggtcaggacatcaaggaagtatgtgctgaatatctattcatgcaacaatgcttatgccaatgtgttccagaatgactttggataacaccgacaacttatagtcgtgattttgcgtattgcctcaagtcgcatggtggggtaaggggcatttatatgtctttatggtgacattcgatgcactgtgccccctttttactaacgatgcagattcttttcgcttctgtatcatattaggcgcgtagttgcggatttgaggattaagacatactgcttgtttgtctgcatttttgtgttgcaaaaaccactgtttatgctgttttacaaatcgctgtacccggatgcctcgtgtgcggactggttcagtgtcatttggcatgggttacctttagacctatctctggctggttatctgacagctattcccggttttcttttcataacctctgtatggacactttctaaatccctccatcgcatctggtgtggctatttcctcttcatttcagtacttatttccataatttttactgtcgatttaggattatacgagtattgggggttccgtttggatgctactccgttattctatttcttttcctcccctaaagacgcagtggccagtgtcagcatttggatggtgctggggggaattgtggcaatggctgtttatgctgtcgtgctgtatactgttttctacggcatcttgctgcagaagaagctgttgctgcggatgaaactgccttatcgtcgcctgaaggtgtcaggtatattgttgctgatgacggggttactgtttattcctatccgtggaggctttacagtatctaccatgaatgtggggaaagtctatttcactgccgagcagcgtctgaaccatgcagctatcaaccctgcattcagtctgatggaatctcttgccaagcagaaggacttcagcaagcagtaccgttttatggaagctgcggaggccgaccggctttttaaagacatgcttgaacccgcaggtgccggtggtcaaacggaagaggcagattctgtgctgcaacctgccgattcactgcatactttattcaatactcagcgtcccgatgtactctttgtgattcttgagagtttttcctccaggttgatgacagctttgggaggtgagccgaatattgccgtccatctggatagcttgagtaaggaaggggtgctctttacgaacttctacgccaacagtttccgtacggaccgtgggctggtggctatcttgagtggctatcctgcccagcccactactagtattatgaagtatccccgtaaaacgcagtccattcctgccattgcaggcagcttgcggaaggcgggttatggtaccaagtattattatggcggtgatgccgactttaccaatatgcgttcctacctgatgtcatcaggctttgaagacattgtttccgaccaggattttcccgtaacggaacgtttaagtaagtggggggcgcacgaccatctcgtattcaaccgtctgctggaagacttgaaagccgaagctgccgaaggaactgccgaagagaaaactcctcatttccgtgtcttgcagacctccagcagccacgagccttttgaagtacctttccgtcgtctggagaatgaccggctgaacgcctttgcctatacggatagttgtgcaggcgattttgtaagacagttccgtgagcttccccagtggaagaatacggtgattgtgtttgttccagaccacttgggagcttatcccgaacatatcgacaatttgtcggtagaacgctaccggatacctctgttgatggtgggcggtgctgtccgagagccgaggcgcattgacgtctatggctcgcaacatgatattgcagccacgttgctggctcaattggcgctgccccatgatgagtttgttttcagtaaagatatgcttaatcccgcttcccctcatttcgcgttctttaccgtacccgatgctttcggtatggtgacagcggacaatcaagtgatattcaattgccaggcgggtactgtggtagtggatgagggcacagcaaaagggaagaacctgccgttgggcaaagcctatttgcaaaaattatatgatgatatagccaaaagataacgtatgacagcacttatggacgccttgcaaggggcaatagatgtagacacaaacatatttttttccatcaatcggatgcacaacatgtatttcgattattttatgagcgcttatagcggtaagtgggtttggattcccatgtatgctgccatctggtatgtgatgttgcgcaattttcattggaaggtcacactgttttgcatgataggccttgcgctcaccattacttttgccgaccaggcatgtgccacttggatacgtccctatgtggagcgtatgcgtccttctaatctgaataatcccatttcggagatggtgcatatcgtcaacaatcatcgtggagggcgttatggttttccttcgtgtcatgccgccaataccttcggattggcgtttttcctgttctttctattccgcaagcggtggcttactcttttcattatggcctgggcattgctgacgtgctattcgcgcgtatatctcggtgtgcattatccaggtgatttgctggcagggactattgtggggttgattggcgcctggttgatttaccgcttgtttgtgaaggttagcggatataagcgtgccgagcatgtcgctcatgtctatgctcctatatgggtaggggtgctgacgatagcggggatgctggtttatgccggaatacggacattgctgtagataatggtctttagaattgataaccggcagtcaccataacctctcgtggacggatattcaactgtgaagtatagctttgtgtggccgagtaggtagtataggcatactcttttttgttgaatagattgctgaggctggcttccactctccatttccttgtcttataaatgagtgatgcgtctgcaaacagtgtgttgagatgcgtatcgctgtttaagtcgttccggtaatgttctccggaaaggcggaggtcgacgtgcccgatgctgaatgtgaggtgcatatgctgtacgaagtccagtagaggagcaaggtgcgtgtcgttccctatcttactgccgccatagctgattgtggcatgatattcggcttcgaaagcttcggcgggcgaccatatcagtttgggttccatcttaagatagtcataacggtatttttgaagcgggtcgtttccggctgtttccgtttgtagagtgagggcgtctgtatctgaaacccgtgtcaactgccagccggtattgcggctcagttgtaagtcaagtgaggttttcagattccagtcgaaaaatcccttggagagagtgctgagcaggaaccaactttgtgtactgttggaatgtaggcgaagggtgtggacaatgcggttttcagagatactctgttcattcaaggtgttgtagtgtacatgccggtaggacaaagtggcggtggcgaaaaattcctgcacggtattcttgtattctccataaaggttgtattgttggcgtgtactgacggggaagaggccgtcagtgtttttccaggtacggtagtctgtccgataggtaaaagggcagaggtctgtgacatctcctgctgagcggtgtaaactgccgtagagggaaattttccaatggtagtcgggctgatagcgcagatagagtgacggattgaaaaagagaaaagagcgctgttgcgagaagtagcgcttatagctgagagggagtgacagacttccctgccacttgccttgctccaactggaagtaggaggagaggtagggagaaaaactggatgcgccaaatgtttccattcgggtggaatggtgctttaccgatgcccattcgccctttataccggcggtgtattgccgggtgaaaccgttgtgttttcttaggtggctggccttattgtcgttgtaaaggctgtgttggatgaatttgtctttcccgtcgtgtagtgacaaggaggagggcagataggcatactgtgtggcagaattgaactcccatgtgtatttctctccattgtggataaggctgaagaaattctttgccgtaaactgggaggtgcgcatcgtttgctgtaactcgtgggaggtgccgcggttcgtttcaccttctgccaggaagcggttcgacagatagtggatggtcttgttatcctcatagtgcatttccatatgggcggcatcgttctgcaggcagtagtggtaggcttcatccatgcgtatggtgtcatcgggctggtagtagacttgcgagttgccccgttgctgggtaatccggttatgggtatatccggcttgcaggcgcagggaacgttcgtcgttccatttatacatgcggttggcgttcagtgtatgggtttcgttgaagagcagccgttgcttgtcgaggggagcgctgatgcccggttgtaccagaaagccgtgcaggggaatctgttgggatgtgttgtttgtcagtatatgttgctcacggctaaggtcggtaccgttgttgttgctcttgtagccgtagatgctttgcttgcctttacccagttggagggcattggcggcgttttcccaaagaagcgttcctttgtccctcttcgtttgtgccgttccggtcgtttcttgtgttccatcgctccagcctgcacccagggtaccgttgacaatccattggtcgcgtgcctgtgggtcgagtttcaggttcagggctatttcatccgaactgagttttcctttcaatgccttgaccgattggtagttctccataatttctgccgattttacggctttggcactgaggttgttgttgatttggctgtagcgtccacccgtcacgtccataccctccacaaaatagtggtcgatggctttacctttatatttcacctgcccgttgtcgtcaatatccacaccggggagctttttcagaacatccttgatgtgtacgtccttggaagaggcaaactctgccagattataccttacggtatctttcctgccatgaatgcggccgggacgtatttggacttctttcagtgcaatggcttcgggatgcagacgaatatggagtgttcctgctgccgatatgttgcgtatttcccgtctatagcccagcagtgatacgctgacttgcaggttgccgttgtatttccatggcagggaatatctcccccgggcatcggtcagggcgtaatctatcatggtgccgtttcgcagcacactaatcattacggcttccagcggttgtccggtttcttcgtccgttaccaagccactgagagactgtgcatgcgctgtcattgcaaacaaggcaaggattggcagcaagagtttcttgaagtgtatatccattggagttcgatgggatgaatcagtcaagttccagcggattgtgggctatattcttcggcttcctggcttcattgccctggttgtcgcgtatggtgatacgtacgttgggcgtgttgcccataatgaatcctaccgggtcggcatagtatctttcgtggattttgttgtacgccttgcggtttacgggttcataatcttttccgttgaagaggataggtcggtaggaatggcattgctccataccggtgcaggtaaagagataatgccccctgttgtcttctgctttcagtatcagtccgggcagtccgaacagcttccacggcccttcgctggaggaaatctccggactgtaccagacaatccatctgcgtcccttaaacacgcattctgctttttggcagagatacgagaggatggttgccgtgtctgtctgcagtgtccactgtggacgctcttccggttcctcgcaccggagtctgttgatgtctccggcaatttcatccagtgtggtcactttgcctacggggtatctcttgtaggtctgttcgttcagcttgctttttccgaactgtttggcgtgttcaatcatcgtttcttgcgaggcgttattggcaatgtcggcagcaaataccgagtcgcccacatactttgtgtaactgtagaacttggagcatttcttgccgatttccaacatcatggtttcctggaaacgctcttccgacagtgtgtccgtacagccgtccacttcatactgcaccatgagtacagcctggtctatggtatcttttctgaacgtcttgccggagccgattttgatgttgaactgtgcgcaggcggttgtggtggttatcaacagcatggcggtgagtagaatctgctttttcatactttttcgttgttagaaattactgtttcgaggacgtgtcatgtgtcctgtcgtcgcaaatctatgcagaatttgtctttccggagtgagaaagttattactgaaatgttactcaaatgagaatagccgcctcgcgcgtacctctgattggaggaaacccttacctttgtatagtataaaagaagaacagactctgagatggaaaaacgaatcagaatagtatgggcattgtcactgatatccatgctgctacttgtagcagggcagggatattggttgtggaaccagtatcagtataagaatgaggaatatgaagaagagatacaccgccttgtcatggatgccgtggcagtgaacgactctatccggcgtgaacagccgaagaaagtgttcaacaagcctaatatatcctttttcaacaccaatgtggacatgcatacggatagggattcattgaccaacaagctcaaagagcgctatacgcgtacgtttgtggtgggggccatggcagataaatccgttctatccacggcaatgaaggatagtattgtctataaggacaagattgtgatacatggcgaagacaagctgcttttcaacatgagcttcagcgaggcgatagttgcttatcagttgcagatagatgtcccttttacgttgcagcgcttcgattcggtgctggcgactaaactggacggcatgtctttcactaccggactagtcacgccgcgcgacagcctctatcaatgggtggaaaccgtagaacggctggggagtgatttgcatccggtcatccgtctggtttatccttacaatccgctgaagcgggagttggtacaagtggatgtgcaggtgatgccgcatactcttttgctccgtatgggctggcaacttctgggcagcttggtattgattcttctgctgtctgtctgtctgctgttccagataaagaccattttgaagcagcaccgtgtggacgagttgcggaaaagctttgtcaacaccatgatacacgagttgaaacgtcccgtgcaggccttgaagatgtgcgtctcttttctcaatgacaaaacaatgcgtaccgacgagcaggccatggatgaagtggtgcgtgattccgtttccgagctggacaacctttccgcctacctccggaagctgcgcgacatgacccgtgctgacgatgagcagacacaactttccctcagtactttcgatttgaaaccggttgtggagaagttgatacgcctgcagcatgctcctggaggaaaacaagtatctttcgagacacatttcacggacaacctgctggttacggccgaccccgtgcacatggcaaatatcatcagtaatctgatggaaaatgccgtgaaatattcgggaagctccgtcagtatccgggtagaatgccgcctgcatggccacgagctcacattgaaagtttccgatgacggcattggtatccctgtttccgagcagggacgggtattcgataagttttaccgtagcagcaacttgcctgaccgttccttgccgggcatcggtttggggttgagttatgtcaagttgttggttgaggctcataggggaaccgtctttctgaccagtcagattgggagggggacgacggtggaaataaccattccacaataatctgcacagatggatatcgagaatataaatagcaactcatgaaaccactgaaaattctttttgctgacgatgacctgaagtattccatgcttctgaaacgcttcctggagaaagagggttatgaagtgacctatgccggaaatggtcttatcgccctcgacctgtttcctcttgtcaaaccggaccttgtcttgcttgacatcaatatgcccgggttcaatggctttgaagtggcaaaacgaatccgggaggcggacaagcatgtcctcatcttttttctttccgaccgcagcgataaggccgaccgcctgcaaggattccaactgaaggcgaacgattatcttgccaaacctttctatccggaagagctgacagcgcgtatccgcgagcgtttcacttcacagttgtccggtgtggcggaggatgagatgtatgctttcggccattccgtattcaattacagtacgaacgagattcgtacgggaaatagtaaggtgctgattacttcccgtcaagccgatatccttcgcttgcttgcgctgaatgtgaataagactgtcagtcgcgatacgttgctggatgctgtgtggggcactgcctcgtatgccaactcccttgccttgaatgtacagatgtcctatctgcggcggtcgctaaaaaacgacccgagcgtgaggattgagtcgttgatgaaaaaagggtatatacttgccgttctctgaaaacatctttatctttggattgttatacaaacaagacacttcaaaaaaaagagagcttatgatgagtttaggaggatggatgaataaaatcttgataggttgggggatagacccgaagtttgccgatatgtttgacgagacgattattgcactgctgatggtggggctttcgatagggctggactatttgtgccaggcaatcttcgttggcggtatgaagcattatacccgacgctctccccatcagtggaatacgttgctgatgagacgcagggtgatacaccatttgatacatattctgccgggaatcctcatctactacctgctgcccatggcctttgtgcgtggaaaggagatgcttgagttctcacaaaaggtgtgtgctgtctatatcattgtggcggtgctgcttactattaacggcttgttgctggtgatgctcgatgtttataacatgaaggacaagcagaagaaccgtccgctgaaaggcttcgtgcaggtattgcaagtgctgctgttttttatcggaggtatcatagtggtttcagtgctgataggcaagtctcctatgaccttgtttgccggtctgggcgcatctgcagctgtactgatgctggtatttaaggacagcattctggggtttgtggccggcgtgcagctctctgccaacgacatgttgcggataggggactggatagcactgccgggtggcgttgccaatggagttgtagaggagattacgctgaacacggtcaagatacgtaactgggacgaaaccatctcgaccgtaccgccgtataccctggtaaacaactcttttcagaactggcgcggcatgcaggaaagtggcgggcgacgggtaaacaagaatatctttctggatatgactaccctgaagttctgcactccggaaatgctggataatatccgcaaggaagtccccttgatggccgactatcagcctgcagaaggagaggtgccaaccaatgcgcagctctaccgtatctacatcgaacgctatttgtgcagcctgccggtggtgaaccgggagatggacttgattgtcagccagaaggaacccacgacgtatggggtacccatccaggtatatttcttctctcgcaacaaggtatggaaagagtacgagcgcattcagtccgacatcttcgaccacttgctggtgatggtacagaagtttgacttgaagctgtatcagtattccgactaatatatcaaccggaactccgcatatacaggcaagtggtcgctgtatcctccttgatacttcatcccgtagtaggtgcggaagggttgctgccctccgtatttcttgtctcttgtcagtaggaagggcaggcagaatacgtctgccttcgcttcctctgtatatagcggtgcgtgttcttgcagcaacgtacccgatacgatgatgtggtccagtagtccccattctccttgatacttgtagctgccgaagtgcttgcgtgttttggcttttcctgccagtagatggtaaagtttttgtggacgtagagagtcttgcaatgttgacgatgctgctgcctccaacacctcctttaccgatttattctccggataatcgttgaaatcccctaaaaggacaatttgcggatgtcggcgtatcgtgtataggctgtctatggcatgcttcacctttcgggcagccagtagccggtaaggttcagactctcttgcccctcccgaacgggatgggaagtgagctaccagtacatcaagcgtatcccggttcagcaacaatccgttgacgtgaagaatgtcccgtgtgggacggctattcttccggggcttgtctacggggaggctctgataggaaagcagtttgaaaagattacgttgatacaacagcgctacgtcgatgccgcgtttgtcgggagattgtgtcatcacataccggtagtctgcttcgcgcaaggcagagtagcgggtaaggtcgcgcatcacactgtcattctccacctcacacaaggcaacaagggcaggcggcgtccatcctccggtggcgatgatgacgcgggctatattatccagtttctttctgtatttagagtagttccaatgccgggtggcatccggcaggaactcgtagtcattctttagtgtgtcatgtcgggagtcgaataggttttctacattgtagcttactatccgaaacatgagggtatcttttccttcttgcccgtacagactaatgtacgggcagagaaggaagagtataactcctatcttatggataacgttcatacaaactatttccgttccccttttagggaaacgaaggatatctatttcgctggtatgtgcttcagtatatccagcagatggtcccagaacttctgtacagtaggaatcagcatccgttcgtcgggagagtgcacaccctgcagggtaggtccgaaggaaatcatgtccagtgccgggtatttgtcaaggaacagtccgcattccagacctgcatggatagcttttaccttggcatctacaccgaacaaacgtttgtaggactcaacagccactttcaggatttctgaatgcgggttgggtttccagcccggatacccgtcgccgaaggatacggctgctccacccatttcaaatacagtgcgcaccatattggcaatgtcttgtttggaggaggcggtagagctgcgctggctggtctcgatgcggatgatatgaccgggcttcatctttacggaggccagattggtggaggtttccaccagccccggaatgtcttggctcatggcatacacaccgtggggtgcggcatagatggtttgcaacaatcgcttggcggtatctttgtcaatggctttgggacgggctgcttccgattcgagcacgaattggaggtccgggtcaacgacggcatattctgcctccacttcggcggcaaagacattcaagtctgtgcgcagagcatgcttgtcggcatcgggtatggcaattaccgcgtgtgcttcgcgggcaatggcgttgcgcaggttaccgccgtctatttcgcaaaggtacatgtcgtacttctgggatgtctggctcaggaagcggttcagcagcttgttggcattgccgcgccccaggtgtatgtcgccgccggagtgtccgcctttcagcccctttacctgcactttgcagcagaaatatcctgccggtacgtccacttcccggtaggtgaattcggcaacggaatctatacctcctgcacagccgatgaagagctcgccttcatcctcggaatcgaggttcagcagaatgtctccgttcatgaagccttctttcaatgcaaaagcaccggtcagtccggtctcctcgtccacggtgaataggcattcgatagggccgtgctcaatgctgtcgtcggcaaggatagccagttcggtggctacaccgatgccgttgtcggctcccaaggttgtacctttggctttcagccattcaccgtcaatttcggtttcgatagggtcggttaggaagtcgtgcttcacgtcgttgttcttttcacataccatgtcgatgtgcgattgaagtacgacagtcttgcggttttccatacccggagtagcgggtttctttatcagaacgtttccggcttcgtccaccttcgtttccaacttatgtttttttccgaatgcttttaagtaagcaatgattttctcttccttcttcgaagggcgcggcacttggcagatttcctcgaaatagtgaaatacaccagccggtttcaagtcttttttttccataattatctgaattagcggctgccttacatgtgtttatgcagccttcattatcaattgtcaaatatcaattctccatttaattaaccacttattgctaaatatggttaaattgattgactattttattcccctttctctttttttagagtaaaaaaggcgagttagtccaaccaaagccctatatttgcacccacaaaaatagtaaaaacactattttcatgtaacaaaattaatggaaatgcttgatacaatattgataactctgttaatagttgctatttgcattgttttattgggtgtaaaggtcttttttgtgaaaggcggcaggttccctaacgggcatgtcagtggcaataaggcaatgcgcgatagaggtatcggctgtgtgcagtcgcaggacagagaagcacaacgcaagtcccgtttttccattgatgaactggaaaaagccttaaacgatagtatgaactaattttaaaaaacaatatttatcaattatgaagagattaaactacctcatgaacggtctggcagctctcgcactgatcgttttatttgctcaatgtgccggcaatactgataaacagacaacaaacgctcctgcacaagccggcggattatcggaaatgaaaattgcttatgttgaaatagatacgcttttggcaaaatacaactattgcatagacttgaatgaggctatggtgaagaagggcgagaatgtccgtctgacattgaaccagaaagccagcgaactggagaagcagaagcaggaattccagacaaagtatcagaacaacgcttatctttctcaggagagagcgcagcaggaatacaaccgcatcgcaaagttggagcaggatttgcagaacctgagcaacaagctgcagtctgaactgatgagtgagaatgaaaagaacagcctgcaactgcgtgattctatcaatgctttcttgaaggagtacaataagacaaaaggttacagcatgattatcagcaatacgggttttgacaatctgctctatgcagacagtgtctacaacatcactcgtgagattctggatggcctgaatgcaagatactcttctccggtgaagaaataatatttatcctatgatataaaaaaaggatgtactgaaaagtacatcctttttttataggcctctccctcgccccctcccccgtagggaggggagttttgaagtgtttgtattttgtaggactatctctgtccccctccctacgggggaggggctaggggagaggcttttaataatgctccgattgtacgctttacccgctccgcagtagtgacggtatgtgtatattcatcaatatgtaccgttcctcccatagagacggcggaattatgatagagcatggagctctcgatattttccctggcggagaaatgaaattcgcggatgccggtttctcgggcaatgtgggctatgttggcttcattcaccccacagcctgccaatagaatgattcggcctgatgcttgttgttggagctctttcaaaaggggaatgccttgctctgctgtagattgctgtccggaagttaggatgcaaccgcatcctaatgcgataatatcttctattgctttttgtggatttctgcatacatcgaaagcacggtggaaggtgacggacatcccttgtgaggctttcataagttgctccatcaatggaatgtctacatctccttctgccgtcaggcaaccgaacacgactccgtcagcgcctaggcggcgggcattctctatgtctttcagcatgatgcgctgttcggtggaggagtaaaggaagtctcctccacggggacggacaatgatatgcaatttggtctgctgcaatacttcccgtgcgatgaggatatcgccgtatgagggggttgtccctccctcggggatgcctgcgcatagttccacccggtctgctccgccggcttgtgcggcaatacaactctctacggagttggcacaaacttcaaactgataatctttcattttgtaaagttatggttgtggtgcaaaaataagaaaagggtgaatacgaattcacccttttctgcatttattttcttttctgatgttactttgcgtagctcaccgcacgtgtctcacggataacggtaatcttcacctgacccggataagtcatttcgtcctgaatcttcttggcgatttcaccggaaaggttctccgtctgcttgtcgtcaatcttgtctgcaccgacaatgacacgcaactcacggcctgcctggatggcatatgtctttgtcactcccggataggacatggccagttgctcaaggtcgttcaggcgcttgatgtatgcttctacaatttcgcggcgtgctcccgggcgtgctcctgaaatggcatcgcatacttgtacgattggggccagcaggctggtcatttccacttcgtcgtggtgggcaccgatggcgttgcagatgtctggcttttccttgaacttttctgccagcttcatgccatagagtgcatgcggcaattccggttcctcatcgggtaccttacctatatcatgcagcagtccggcacgttttgctttcttcgggttgagtcccagctctgatgccatcacagcgcaaagattggctgtctcgcgtgcatgctgcaaaaggttctggccgtatgaagaacggtatttcatcttaccgataatgcggataagttccggatgcagaccgtggatgcccaggtcgatagtagtacgtttaccggtttcgatgatttcctcttctacctgcttgcgtactttggcaactacctcttcgatgcgtgccgggtggatacgtccgtctgtcaccaactggtgcaatgccaggcgtgcaatctcacggcgaaccgggtcgaaagctgacaatacgatagcttccggagtatcgtctaccacaatttccacaccggtggcagcttccagggcgcggatgttgcggccttcgcgaccgatgatacgtcccttgatttcatctgattcgatgtggaatacagttaccgagttttcaatggctgtttccgtagccacgcgctggatgctctgtatcacgatgcgcttggcctctttgcttgccgtcagcttggcgtcgtccatgatgtcgttaatgtaggactgggcctgcgttttggcttcttcctttagggattctaccatgcgctctttggcttcttcggcagaaagtccggagatagcttccagtttttctatttcctggcgctgcatgtgctccagttcttctttcttcttgtctacgatggacagctgggcttctagattttctttcacggcttctgcttccatcttcttgcgctggatttcttcctggcgttggttcagtaccaattcacgttgtttcagcttgttttctgcctgctgtatcttttggttacgttgggccacttctttttccaagtctgccttcttgttcaggaatttttcctttacttccagcaacttattcttcttaatcacttccgcttccgcttccgcatctctcaggataccgtcgtatttgtttttcagcccgtgcttgaagaacaagtacgaggcaaaccctccgacaatgaagcaggcaatggataatactattgtaactactgtcattttattaatttgtttttagtatataaataaaaaagcactgcataaaagcttgctttgatgaagggcaaacttttgtacagtgcgcgaatttctctcttttaccgacccgacggagggattgcagcttattgttccttgaaataggtctccaatacctctgtcagttcctttattttagctgtatagggttcagtatcattacggtccttcaactgaaggttttctaaagcgaactgataggccaccatggctataattctctctagagacacattctgataatgctcccgatacgcattgagcctgatatctacctgcttggcggcttctcttaccatttcctcgtcctcacggttgattgtgagagggtaggaggctcctgccatctgcaggtttatctttatcttatcgttcatacatcctcttctctttattcattcaacaaagcgatgcatttatcgacttcacgcactaatttggacaatcgcagtttcgtctctttcacgtcactgccgttaaggctgattgtcgtagctgtttttaggttcgtgtagttaagtttcagttcccggtattcagcttgtaccttcccgtattcctcctctttggcttcaagaagttgctttagctcagcattttcgcgttttaattcatcgtgcagatagattaaatgccgcagtctggcttcaaaggtacttaatagcttcttttcttcgtctgtcatcactacaccaaaattgtacacaaaaatacgatttacttggagattacaaaaacttttcggagaaaatgtgttgtagaagtgccgaaataaccgaaatggcctatgaaagcttggtttcgggggattgaaaaggggtggactgtttatcaaaagataggatatgtggataggtgtgggactattggttttctgcaaggattctcttcctttcttttcaaacgcttagtatttctgttgctaactattaatcgtccgacagttgttgaattatcgtccaacaactgtcggacgataattagacatatgtcggacgataataaaacggttatcggacgattaatagttagtaaggcaggaattactttttgctgtttccggaactactgcttgggaatgattggaataatctatagtaaaggaggatgcaaagaaataaataaaataatttatataatagtttggtttataaaataaactaattatatttgcaacatcttagattgtcaatcggggaatatgtgctgaaatgaataagaatttaactgattaaagattatggaagataagatatttgatatggggaagcagaagccggttgccggagtggtacgggatagttggcagcatcagctttggtggatatttactgtactaacggtgatgtgtttgtattggctttccaatatcgtgttgtgggttccctggagtcatagcccccggttgggtatgttgctgatgcttactgtaaaccctcttttctgggggataggcatttatgcttgcttgtcttgtgggagtaatgccgggaatctgatgaagaaggcgttgtttgtatcattggttgctgtgggaatatctttactttcggattttctgttttttgcagtatgcatggagtcaaaggatgtatggcatatcactactttttatggttatgcctggttggtgatactggctttgggtgaggctttctttttgcgtaaaagcttgttggccagatgttatgtggtgacggtgagagtactgctggttttagtgggcattctactgtgtttatggattcttcagtatactcttgtttaattctgaaaggagggaatatggaaacctggtttgtgtatatgcttacggccaattggctactgatgcttttcttgatattgaatgtatttgatgttgaataataaatctattggttatgaatgacagagtgttgaatgagaaggagagtttggaactcattgctcaaatgatacagaatacgaagtcccggatgactcggaattccggagctccttttctgatatggggatatacgaccataatagtgtcgttattggtttggtttctgttgaaggaaacgggaaattatcattggcaatggctgtggtttttgttgccggctatttccctgccttctactttatggattgagcacaaacaaccgaagatgattaagacttatattgaccgtattgtaggatatgtatgggcggtattcggattagggggcttttttgtttcctgggtttccatcttcttctggaatatgtctgtcctttttgtcatattactgatgatgggaatggggacggcactgacgggactgattataaagatgaaggtggtgacagtgtgcggagtggtgggagctttggcctctgtggggtgtatctatgtacacggtttcgaccaaatactggtttttgcatcggcttttgtttttatgatggtgataccgggacattacttaaacggaatggcaaagcaggataaataaatatttattgattatggaagacaagaaactgaacgagaaagagagtttggaactcatcactcagatgatacagaatacgcgtcggaatttggacacaggtagcggaaacatgtttttagtgtggggatatgtgagtgtattggtgacattgacggtgttggcgggtgtgtactttacaaagaatcctctctggatgtggggattttggggaattcccgttatcgggtatttactgacatttcttttgatgcgtaagcgtcagaagatggtaaaatcttacattgacaagattttagttcaggtttggaggatgtttggactgatttgtatgatatttgtattgatggctacggatcttgaacggtatgaggttattcttcctatgggggctattgtcatgtcgatgggaagtatcattacgggttgcatcattcgttatactacattttttatctttccggctatggggcttatgtggggtatgaagagtttctttgatgcactgaattccggaacgtcatacgtgtctttggtttggtttgccggtgtggtggtctttgccatgattgttccggggcatattttgaactataaagcccggaaagaagttcacaacagaaagtgaggtataagatgaagacaataaataatgttttggacagatttctgctctcctggaaatttatggtatggatgattgttttgctattcattttatttccggttgcaataaaagaagttcaatgggaatctgttggaaatatggtattctatacgttgggacatgcttttattggggcttcctttgttgggaatatctctctatgcattgttgaaaaataaatggaagaataaaatttgatatgtttaaagaactgaaccctttgctccacagtgaactgcggcttgcggtgatgtcgttgctcatcagtgttgaggaagcggattttgtctatatccgccaacaagcgaaagctacggcaggaaacctcagtgtgcagttggataagctcagcaaggcgggttatgtggagataacaaaaacttttaaaggaaaaatgccttgtacactttgtaggattactccgcagggagtggatgcctttgaagaatatatagaggcgttgaaatcttatctggtgggaaaattatgattttcctgagaatttgatgggattgatggaaaatggcagtgtctgattaaaaacaatgagaaattatgaaaaggagtattgttttatttgtcctcttgtctgcatttgtagtaggcgtatgtatggtcaatgcggcttgtggagcctcattgtcaagaactgaatctgatgatgtactggacggcattcagaaaaaaaatgaactggctatgaacaattgctttgttcaaaatactgcagctccgctcgatagtctgtttacaaagctgaacaaacttgaagatgggaatggtatggttccgtattggaaggcttatattacctactataaaagtgttttctatttgaaacttggaaagaaggaagatagtgggaaagtgataaaggaagcctccgctattttgaatgatatagggaacaaaacttctgaaacctatgccttattagcgcttgtgcagagtttttccattcagtttgcttcgggtatggaggcaggaagaatatctgctggcattcgggaaaatgctgggaaggctttggaactggactctaccaatgtaagaggttggtatgtattgggcagtaacgattattacactccggctagtttcggtggcgggaagaaggtggaatattatttgaagaaagctacttcatctcctgacaagaatacagatgattccagcctgcctacctggggaagagaatacgcctatgctctcttgattcaatactatatgcagaacgataggacggatgaggccaaaaattgcttgctgatggcagagaaggagtatccggacagttattttatcggcgaatataaaaggaaactggacgaataatttatcattcttctggaaccactgtgcatttaattgcctcaaaggtaggaatcttcaaaaaaaggtttctacctttgtcttttcttcaaggagtaattttttgaataggtaggaactacaaacaatgaattgatatgagaatcttggttacttatgccgtacaaggcgaatttactgaattgaaatttcccggactgataggggaggaagaggtgcaggttggctatctccgtaccggtgtgggaaaggtgaaatcggctttttatctttctgaagcgataagccatgcgcaaccggacttggtggtcaatgtgggtacggcagggactatccgtcaccaggtaggagatattttcgtatgccgtcattttgtggaccgtgatatgcagaaactggtggagcttggtatggagtatgagattgattcaatggatttgttgtcccaaaaaggatattgtttacactggccggcaggcggtgtatgcaatacgggggatactttcttgacagaactctcggatgtgtccggtgatgttgtggatatggaagcctatgcccaggctttggtatgccgtgccaagaatgttcctttcatttcggtgaagtacgtgacggatattatcgggcagaactccgtgaaacattgggaagacaagcttgccgatgctcggaaggggttgggagaattcttcgaaaaattgggaggagtttgattaatgtgctaatatgccaatgtgctaattggctgcgctatgtgtatattagactctcacaccgcaggtcattggcacattagcacattaaccacattagcacattcatttatctcaacgtcttgaatgacagtatatgccaagtcacccccacagcgacaaggaacaatactatctttatttctgttagtggaatcaagaagaagatgcagtaaaccattgttccccacatcagcagtagggagatgattttggcacgtagagggatggctttgttctcgcggaagttgcggatgtagggaccgaggcatttgtggttcagcaaccattggtacagtctgggtgagcctctgaagtagagtgctgccgtgagcagcaggaaaggcgtggtgggcagcaacggcaggaagatgccgatgatgccgagtgccaaagaaactgttcccaaaatgatgcagacggttttcatgcggcaaatgtaggaaaaataataatatagataatatgtatgcgaataaagtaaagaaggttgttgccgtccacgacttgtcgggagtcggacgggtgtctctgacggtggtcattcccatcctttcgtctatgggtttccaggtgtgtccgttgcctacagccgtattgtcgagccatacccagtatccggaattctcttttctggacttgacggatgaaatgccgaagattatttccgagtggaagaagctggaagtacagtttgatgccttttataccggctatctgggttctccgcggcagatacatattgtttctgactttattgatgacttccgccgaccggacggtctggttgtggtagacccggtgttgggtgataacggacggctttatgcgaacttccacgagtccatgattgatgaaatgaaacatctcatcaccaaggccgatgtcgttacccccaatctgacggagctgttctatctgctgggtattccttataaggagatgaatacggatgaggaattgaagtcataccttcgccggctttccgattgtggtcccgaagtggtgattattaccagtgtgcccgtacgggatgataagcataagacgtccgtgtatgcctataaccggaacggtaaccgctactggaaggttacgtgtccttacctgccggcccattatcccggaacgggggatacgtttaccagtgtcatcaccggggcactgttgcaaggtgacagtttgcccattgccctggaccgtgccacgcagttcattctgcaaggtatccgtgctactttcggatacgagtacgacaaccgtgaaggtatacagcttgaaaaggtgttgcataatctcgacatgccgattcaaatctgcagctatgaattaatttaaaccaatctcatcttatgaaaaagaaaatattcctggcagtgtttctctgttgcggcatgtttgcagcaatggcgcagactgctgccgactctcttgccatcgtttctgccgactggcagactgagcccctgcagaaagggatgctttataaaaaggcagtattcagttctttgtatggagttcctcaggaagtgtctatttttgaaatatccccgaagcgctaccgtttcgatgtgctcgtccacaatcccaaagaggagaccagtgtagccgcccggcatgcaggtgcggtggcggccatcaatggctcctattttgatatgaaagccggaaattccgtctgctatctgcgtaaggacggggtggtgatagatactacctctaccggggttctggcaacagtgtccaatggagctgtactcataaagaaaggcaggctggaactgattccctggagcaagcaggatgaaaaggcatgtactttgaaaaaaggcactgtgctggcttccggtcctttgatgctgaaggacgggcaagtgtgcgacttgtccgggactaaccggaattttgtagataccaagcatccccgcagtgctgtggcgctgacaagagaaggaaaaatcctgcttattgtcgttgacggacgtcggaagggaaaagcggaaggcatcaatatacccgagcttgcccatatgattcgtgtattgggtggggaggatgcgttgaatctggacggtggcggttcttctacgctgtggagtggggagttgccggataagggaatagccaataccccgagtggcaggcagcgcagagcgtaaggttgccaattctctttgtgtgtacgaataagttagggaagtaaatggataaatcttaagttttttgtaattttgccgtcgcatcgaggtgacattagatgcggcaacttattatattaattagcgtattaacaatatgtacacagtcatcaaacgtatggaagtgtcggctgcccatagcctgaaactttcttatcgcagtaagtgtgagaatctgcacggtcacaactggattatcactgtctattgccgttccaaagagctgaatgcggacggaatggtggtagacttcagtcacatcaagcaggtggtaaaggaacagctggatcatcataatcttaatgaagtgctgtccttcaatcccacagccgagaacatagcccgttggatatgcgaccagatacccacttgcttcaaggtagaggtgcaggagtcggaatcaaacattgccgtctatgaggaagattaatgagatattctacagtttgcagggagaaggataccatacgggtaccccggctgtctttatccgtttttccggttgtaacctgaagtgccccttctgtgatacgcagcatgaggacggcatactgatgtccgatgaagatatcgtaacagaagtcagtaaataccctgccgctaccgtgatactgaccggtggagaaccctccctttggattgaccgtgaatttgtggattgtctgcaccaggcgggaaagtatgtctgcattgaaacaaacggtacccgtctgctgccggataatatagattgggtgacctgctctcccaagcagggggtaaagctggaaattacgcgtatgaatgaagtgaaggtggtgtatgaagggcaggatattactgtttatgagcagttgcccgcctggcatttctttcttcagccttgctcttgcagcaatacggccgaaacggtggattgcgtgatgaagcatcctaagtggagacttagtttgcagacacataagctgatagatatccggtaggcatttataaaacgaataatggctgtaagcaatgcttacagccattattcgttcatgcacgggaggagaggctcgaactcccgacacccggttttggagaccggtgctctaccaactgagctactcccgtgtttgtggctgcaaaggtaatgcaaactttcaaatatgcaagtaacagacgtacttattttataaagaaagttgcttacaacatctgtaagtcctgatacataatgcgatacgctgctgcttttttttccagtgccagcgggtaggctcttgaggaagaaggcatccggtagaggcgcatcggatggttttcgaaaagaaactccgtgaagtcgcctactttgggcttgtcgatggaaaactgcgtgcacagcgtgtccgttgccttctcgccggtggtgacgatagccttgcattgcggtatccggtgcagtagggcaggaatgtccgtaggctgcactacttccagaaacttgtccgaggcattgtcctgcaggcgccgtatggcagaggctgtgtcgaacaaggcaataccctttttctgcaggaaactgatgaggcgttctttgcagaaagccttcttcgtcttgtctacaaaataatccttgtcgttgaagaaaaggaacccggtaatcctccacatgtcattgttccagttggggtagtaaaactccatggaccaccgctttttctgcggaggaaagcttcccagcatcagcagacgggcgttgccgggaaggaagggttctaaagggtgttgttctatttccatactttccaatttcattgttctgcctgcaaaagtacggaatatatcttggatatgctatcctgcaatgtcctgattgctcattctgtcggtgatttggaaggggaaatcaggatattcgtagaggctgaaccgggattctgtcttgccttccgtatagttccagatggtggcatattcttcggcgtcttctcccatggcctgcagttggcggaggtaggaggctatggacttgttctctacgatatatatttgtcccagccggtctattatagggctgtggcgccgggtgctgtcatggtcgaaacgcaggatgcgcttgccttcgggagtgatgcctaccatgttgaaggtcatgctcttgccgatggcgggcaggttgagcacattgcggtcggtggcgaggaaaggcaggtggtgcgttttcaggaaacgccggatgcaggctgccgggtcatggacggttccaagcagtacggacagattatgggcatcttccttggtcagcttcccgaagcgcttttcttcccgttgctcttgtacggaacggctgttgggggtaaacacggcattgttttcttcaaaacctttcacggagaaggtgtagtagcaaaccactcccaactgattgagcacttggcgcaggcgggtggtatgccctcggcgggatgcagctacgttgtataccagttggttatcaatgagccagcctgccgccagcagtttgcgtattccttcggcagcttccggagtgacttcgagcggggtttggaaatgtgtctggataatgaactggcggatgccgatggtagacgccttttccttgaattcccttagaatctccaccagcccgtcattgatgcgcatgggcaggtaggcggggaggcgtgagccgaggcgtacacgttgcagctctgcatacttttctccctcgggccgttcctgattggctttccgcttgcggactgccatgcggtagacggcgtctaatatgttgcccagcgtcttgttttggctcatcagtgcgtcaccgccggtgatgagaatgtcccgcagttgcgtgtcttcctcaaaataggccatcagccggcgcagcttcttttcccatgtctccttgggacgcagggtgtcaaactcaaaattgagccgtttgctttgaaagtcgtacatacgctgacaagatgcgcagagtcctccgcaggcgcgtcccatggtgtcggggatgaggatggccacttccggataacggcggtggatgttatgcccgtcgggcagcagccagccggcggcgttgggtttacctggttctacgatatcctcccgttcccaggcacgtatctgtccgtaggtttccaccagttggggtgaatagagtatatagctgcgcagggcctcgtcgtcgtatccgctgccggtgcagttcagcagtgacagataatagggggtggcgaagaaaggcattcccttcttgcgggcttttgagagcaggtacatggtttcggcagaaagggagttgccgagaagacggtttagctccgtagggcttttgacggccatggcaagatggaaacggaagtcattccaccattcgctgacgaggttgaacttctcctcgtagctgagtccctcttcgaaatggaagcgggaagccgggttcttgcggtgctcaatcttctgcaccagtgcatgcaggatgcgttccttgttctttgcacggatatgctgcacgtcttcatccagtccgctgggccagcgttcggtcagggttttgattttctgtgcggagggcagggtgggggctggctggtggaggcgtttgaactgctggaacaagtcgatgaacaggtccgtttccgtttcctcttcccattgtcccgtgaggaaggaatgcagcattgataaagttgatatgggcagctgttctccgatggagagctcgtgtacttcctgcccgtcaaattcaatcaagagtcgaatttgcttaccggcctcgttgtccacttccggatgtccggcaatgtactccgtcaggttggccttgaaggcttccgcatcgtcgctttgaacggcgatgctgaccaattcagggagttcgtgccgataaagttgttccagttgtgatagagtgagtgcaagcattttcttttgtttcataagcggttgtttttttgaagttaatatttatgatggttgacgcggggtgcgtccttgtgttccgtgaggggaaaatgatttcatttgctaaaaataacaaaaaaaagcgggaaatttctttcccgccttcttgtttctaaagttctttagaattctttttcttttatttctcttcgttggctttctgtttcggttcctttttggccagcatcactacgttgtaaacgtactcggtcatccattgttccgaatatcccagacgctctttgtactggcgtactgccgctgccgtcttgtgtacatcgtcctttttccatacggtttttgtacagacgtcgtgtacggttttttcggtcatgctgcgcagtgctcccttgaagatggaaggcatgcggaatttccactgcatcaggtttcccatcagcatcatcaagtcattggagaagccttgatacataaagagataaccttgtacgtcgttctgcgtacggcagtgcttcttgacggaagtatcaatttccttgaagaagttttcactgatgccgtagtcctgcatcagcatcttgcgcgaagcggccttttccgcttgtcccaggcggcctccctgcgtggggattttgaacagacgcttgaagttggctacatccggcacaaagcggatattggtgatgcccaggttggcggctattacagactggaagtagacgcgtgtcagtgacacgaagtcttccacattcttcgaagatacttctccggtattcttgttgaatagtttggcaaataaactcatatcaaattacgaattactgattacaaattacaagaccgcaggtcatccggcggttccggctgcaaaagtacgaaataagttggttatcaccagcactctatgtctttttctacctctttcaggcggttcttggtgaaaacggggtctttgataccggcgcttttctgtgcgcggtagtcttcaagcagcctgaaagcgtattttccgagcaggctgatggcgataagattgcagagcgccatgagtcccatagtgacgtcggcaaggctccatgccaggtcgaaggtggcaacagcaccgaacatgaccatgccgcccaccagtatacggtagatgttgagcacccatttacggtgggtaaggtagcgcacattggcttctccgtaataataatttcccagaatgctgctgaatgcgaagaagaacaaggctaccgcaacgaagatggctcccgaaggtcctatctcgttggtcagtgcatgctgggtaagctgtacgccgtttgtggaaccatccagtggagcaccgctgaacagaatgatgaaagcggtgcaggtacatataatcagcgtatcggtaaatactcccagcgtctgaatcaagccttgcttcacggggtggctgacgtgtgcggttgccgccacattgggggcggaccccataccggcctcgttgctgaacagcccgcgtttgatgccctgcatcagcgccatgccgacaccccctcccaaagcctgctcccatccgaaggcgtggccgacaatgagtgccaggactcccggcagctctttgatgttcaacagaacgatgataagtgccagtgcaatgtatcccaacgccatgatggggacgatgatgctgctgactttggctatgcgctgtacgcctccaaagatgattgtcagcgtgagtgcggtgatgatgcctcccacaacggcatggtcgaacccgaaagcgccttcgaaagcggcacacagtgtattgctctgtaccgagttgaatgcaaatccgaaggtaatggtgataagtacggcaaacagtgcccccatccacggctgtttcagtcccttacgcatatagtaggccgggccgccgataaaggagtctttgccctttatcttatacaattgggccagtgtagattctacaaacgagctggaagcacccaggagggcaatcacccacatccagaatacagcgcccggaccgcctactgcaatggcggtggcaacccctgcaagattgcccgtacctacacggctggcaatggagatggcaaatgcctggaacgatgagatatgcttttccttggcatcgcctttcccgcccgagtcgcccagcagacgtaccatttcctttatcatccggaactgtacaaagcgggttctcagcgtaaaccatacggcgcatcccaacagcagggcaacgaggatgtaggtccagagcaggtcgtttatcagatttattatctccatcatgtatatttattaggttatgtgtaccttattaagcggctgttcctttcaaaaaataaattactttacaaaaccgatgggtggaaagaacagtcgcaacctcaaccgcattcagtcgtatattgaaccctattcagtcgtatagtgaatgccattcagtcgtatattgaattaggccctatctgatggcgctgaaaaccagctaattgcatatttcttgcaaggcgtgtataaatctttacattgcactttccgctattatcgtttatttcagcctgaagtggaacttgtgtccttcgaataccgcttccactatgtcataacgaacaaactttgccagcagatgttcggcggcgcgtcgggaaagatgcgccaggcggcagtaacggttcagtgaaaggcggtcgttttcttccagcagattgagcaacagttgttcccgttcggtatattctatcagttctcctttcggacttccgctttgctgccagacgcgcagatggacgggagtagccaggatgttttcatccttgatgcggagataggccaagtattttcctgtttcgtccttggcatataccggcttccggtcactttcctcgatttgtaccaccagcacactgcggccttccaccagataggtctgcatgatgtagttcacttcggggctgcaataaagttcggcagccgcttctatcatatattgttcttcgtccgaacggacaccggcaattttcccgttatctttcactccgatgagcagttttccaccgtctgtattggcaaaggctgaaagggttttggctatcttgcgggcgtcggatatttcgaacttgaaatcctgctgttggtgctctccttcggctatgagagcgtgtatatattcggtgtcagtaagcgttttcatgcttgcaaaagtagataaaaaacgcgtaagagcccctttttgcggcgattttaccgaatatttcaaaaaaaatatcgtttttctgcatttatttcaagaaagaatgtatttttgccagacattattaacgaagtaatttaaaaaggattatgaaagaattagttgaaaaagtagctgcattgtatgcagacttctcaaaagatgcaaacgctcagttggaaaacggtaacaaggcagcaggaactcgcgctcgtaaggcttctttggaaatcgaaaaagctatgaaggaattccgcaaagcatctttggaagcttctaagaagtaagaaaaaaagcatatttgatgctgcgaaagactgccactactggcggtcttttttgtttttgaaaagtattattgctacttttgacgcaggtattatggatgaaaacgttctcaataaactgaagatactggcagagtcggcaaagtatgacgtctcttgctcctccagtggtacggtgcgctccggcaaggcaggcatgctggggaacactgtgggtggctggggcatctgccatagttttgccgaggacggccgttgtatctccctgctcaaagtgatgcttaccaattattgcatctacgactgcgcctactgcatcaaccgccgcagcaacgacctgccgcgtgccacgctgtcggtggccgagcttgtagacctcaccatggagttctatcgccgcaactatatcgaagggcttttcctgagcagtggggtggtgcgtaatcccgattacacgatggaacgcctggtgcgcgttgccaaggacctccgcactatccatcgtttcaacggatatatccatctgaagagcattcccggtgccagccgcgaactggtgaatgaggcagggctttatgccgaccgtctcagcgtcaatgtcgagataccgaaggaggagaacctgaaactgcttgccccggagaaagaccataagagtgtatatgcgcctatgcgctacatccagcagggagtccttgaaagttcggaagaacgcaagaaacaccgccacgctcctcgtttcgctcctgcaggacaaagcacacagatgatagtaggcgctaccgccgagacggacaaggatattctgtatctttcgtcggccctctacaagggacctacgatgcggcgtgtctactattcgggctatatttccgtcaatacctacgataagcgcctgccggcattgaaacagccccctttggtgcgcgaaaaccgcctttaccaagccgactggctgatgcgcttctatcagttcaaggtggaggaaatagtggatgatgcctacccggaccttgatttggaggttgaccccaagctgtcctgggctttgcgccatcccgagcagtttccaatcgatgtgaacaaggtggattatgagatgttgctccgcgtgccgggcatcggcgtgaagtcggcacggctgatagtggcttctcgacgtttctccaagataggtttctaccagttgaagaagataggggtggtgatgaagaaggcgcagtatttcattacctgctgcgagttgccgatgcgcacggtcaatgagctgactccgcaaggggtacgcagtctgctgttgcccaaaccgaacaagaaaaaagtggatgagaggcagttgatgcttgattttggcgaatgaatatctttttatacgataagacttttgagggattgctgacttctgtttttgaagcctactcccgccgcactttccccgatgcactgttgttggaaggagagcctcttccattgttctacgatgaaatatttacagtgataaccgatgaggagaagtccggtcgcgtctggcgcggattgcagaagaagctgtcgtctgcggcacttgcctgcctcgcccaatgctggctggcagaggaaccggaaactcccatgctgctgttccgctatatccgcaaggcgatagatgctcctcgctccattgaaacgaactttgccgaccctgatgtgctggagttctcccgtatgtggaagcgggtggattgggagcgtatacgcctgcttcagtttgtccgcttccagaaggctgcggacggtactttctttgctgccgtcgagcccgaaaagaatgcccttcctttggtgacggggcatttcaaggaccgttttgccgaccagcgttggctgatttatgatatcaggcgagcctatgggtactattacgacttgaaggaggtgcgccaggtgacttttggtgaggacagtcgcgaaggacatcttgtcaccggcatgctcgacgaaagtctgatggacggagacgaacagcttttccagtctctctggaaaacctatttcaaggcaatctgcatcaaggaacgcctcaatccccggaagcacaagcaggacatgcccgtgcgctattggaaatatctgacggaaaaacagcagtgattccctttattcgattttctccactgtcacttcgggaaattcctgcatcagttgcagcaaatatccctcatcatagcttttcttggatttgatgaccatggtcacttgatagttggtgtactctccctgcacttgccggtccaggttgtaggacaccaccagatagtctttggagttgaatcgccgggacacttgcggcagtatctctttgctggaagtggaaaaggttatcacggaacttttcatgccaatgcttttgaaaataaggctcaacagttcgagccctgccagagtcagcagggtggcggcaatgctgatggtgtacattcctgcacctactgccaatccgatgcctgcagtagcccatattcctgcggctgttgtcagtcccctgactatctgtttctggaaaatgatggtacccgcaccgatgaatccgataccgctgactacttgtgcggcaacacggctggggtccagcgtcacactgctttccttgatgatttcctgaaaaccatattgggatacaatcatgatgagcgcgcttcccaatgataccaggaaatgggtgcggtagcctgcttctttggcacggtattcccggtccagtccgataatggcacccaatattccggctaccagcaacctgagcacaaaatcaaagtttaacatcatcatcgtatcctctctttcttttttattaattgatgacccaattcttattgtggggcactgttttcttggggttgtaatgcattccggcttgtgtcggtatttttagtatgtatgtacgtccgcttttattcatcagcgaggtatcccgcagccacggattggcatctttcagttgggcataggtgatgcctttatctttggcaaactgtgccaggttgccgatgcccgttgtgacggtcacttccgtgtaggggatgggcggataaagatgttcccgtttcaacagaaagccgtactgctgtggattgctgatgactgctttggctgccagcaggcggaacatgtagcgcgaagtctcttctaccagccataagtcgacagcctggtccaccatttgcttctgcagctgtgtggagatgcgtccttgcccggcattgtaggcggcggctacgcacagccagttcccgtatttctgataagcatctttcaggtacttgcaggctgctttggtctctttctcgatatggtatcgttcgtcgatgttgctgttcacctccagtccgaattcgcgtccggtggcaggcatgaactgccataggccggcggcacccgcaggcgatttggcaagcgggttcaggttgctttctatcacagcgaggtacttgaagtcatcgggaaggccgttggcttttagtataggctctatgacggggaagtagcggttggcacgcttcaccatgagcatggtggtggagtgcatgtaggtgaaggacatcagttcgcggtccatacgttcgcggtggtcgtagcgaagcaggtcaatagcttgtccggcaaaagtgatcttgtccggtacgctgggggaggtcacgcagtagggaacttcggatttcacggaatcgcgttcgggattcagcgtactgctgcctgcgaggaaggggaggctggaacctgcgcacagtgcaatggcagcggtaagcacgatatattttgaatttttcttcatgtctgtatgtctatttctgtttggagacgtgaagatacgaaatcaattcgttataggcaacctttcccatagccatcgtggaatcatacgccaaaaaaataccagtacccggtagcgtccgtcaatgacaactacccgtctcttttctcttaaatccttgattatgtgctgtgctacacggtctgctttcatcagcatcgggtatttcccgcttttcaataaatcggtggcaacaaatcccggacggatgtcggtgaagtgtatatcaagatgctgcatccgggcaagttgtgccagcgcttcgatataggtattctggaagcgtttggtggcagagtaggccggtgcaacgcccagtcctttagtgcctgcaatggaactgatgacagcaatatgtccggagcctttttccttgaaatagttgaaggcggcagtcaccatgcgggtaaatccctctacattggtacgtgccgtgttcagttcgatgtccggttgtaagtcccggttttgatgtcccacgccggaactgaggaaaaacaggtctatgcctcccagcttttttatcaggttatggaggtgtagagtcgctgtctcttccgtaacgtccagctgttccgtgactatccggtcgggtgcggtggcttgcagggcatgcaatgcttcctctcttctgccggcaatacctatatgccagccttgttgtacaagtatcctggctacttcttgtccgatgcctgaagtggcaccgatgatgatggctttctgcatgatgataggggattatccgatgacggttgctacaattcttcttcctccgccccggttgcggaactcgcagagatagatgccttgccagatacctatgttcagacgcccattggtgatggggatggtgaggctggttccgctgagggttgccttggcatgggcgggcatatcgtcatcgccttcgcatgtatgttggtaataaggttcccgttcttttacgaggcggttgaagatggcttccatatctgtctgtacgtcagggtctgcattctcgttgatggtgaggcctgcgcttgtatgcttgatgaacagatgcaggattccggcagacggaagcggtggaaggttgcgtataatctcctctgtcaccaggtgaaagccacgccggcgaggggttagggtaaattctttctgtgcggtcataaatcattgtttttcgtttgttgtcaggatggtcttgtccggcagggcagttccacggtgaatgtgcttcccactcccattgtcgaatctacggtaatcactccattcattttctcaacgatggatttgcagatggagagtcctaatccggcaccttgggcaaaagagtccaccttttcgaaccgttcgaatatcatttccagtttgtcggggggaataccgcatccagtatcggaaacactgattcttatgccgtctgtgtccgtttcgtagtacacttcgatatgtccctgcacggtgtttttcagtgcattcgatatgaagttgttcagtatctgtttgatgcgcatcgggtcgtgctctatctggccgggggctgccggatacctggcaaagagtttcactcctgccggaacgttccgttcgtactcggtaatactttcctcgatgagttctgccggattgaaccattcggaatggagctctatgtgtccggcctctatcttggaaaggtccagaacgtcgttgattagtttgagcaacagttggttgttgtggtttatcaaagagatgtactgttccctttcctgctcgttttccacgtagtgcagcaggctggagaaaccgataatcgcatttagcggcgtgcggatttcatggctcatattggcaaggaaagcggatttcagccggtctgcctcttcggccttttccttggcttgtatcagcattgcctccgtctgctttaattgggtgatgtcgtaattgatgcagataatctctatgatgttctgttcaggcatgtagcgttctacaatgatgttgacgtgggtccacatgaaagaaccgtcttctttaagaacacgtacttcccggctgagcttgtgtgccagtcctctctttacgttctgtaggaagtcaagcatgatagtacggtcgtctgggtggagatgattgtaggttccgatgatttcagacaatggtgtttctgttttctcacccaagttcttgtaccagctgcgttgggcatagccttgctcattaagaaggtcataattggcatatcccactttggcatagtcacctataagctcaaagtggctctcgaactcttgtattttgttgtaagcgacggtcgtttccgttttgtctgcgttgattagcagatagttggtcaggttgtgattatcgtcgtaaaggcttgtgactttggttacaaggtctatggtgcccgtcttcttctgtgtcttgtagtaattgcctattttagagaagtcataccggaaagtgaagtctgcattttcatgttttcttaacttgcttttcatctcttccgggaaaatcggattctcgaaaatattaattccaagtagatcttctttctgtttgagatggaacatttcctgctctttgtcattcatatctatcaatattccctctcggttatagagctcaattcctaccggaagatatttataaatattatggaggagacggttacgctcttgtaaggcttgggatgccgatgacatgtcgggaccgtcttgtgtttcggcaatgccgtagactttgacattaccgttttcatcggttctctgcaggcatatcttgcttcttatccacgttggaccctctactgtgttgagcagatatacagtctcttgtgtctgccggatattgtcgaaggaatgtgtggtagtatgccgttgttcctctttcaggatacgtttgttgaaatctttaaagctgatggttccatcctcatccagtcccagcaaccgggagatatattcggagcaaatgtagctttcggtctttaaatcagcttcccaccatcccatattggcattggtcatcattgctgacagtaagtcataatcaaatttagaattcataccggaatctttgatagtgatgtttttgttctgtcacaacaattaagatattgacaaagatacattatttccaaattaatctgtgatgaacggaaataaaaataagggttatatgtgtttttgggaaatgggaaaaaggtacccgagtttttgtacttgccggaataagacgtatatttgttgcaatttttacattctaacaagaaaatgccatgaagcgtattggactctttgtaatagtttttttctgcatatcactcttactccatgcaagcggcccgcgtgtcttgtttatcggagattctatcacggacggtaactggggaaatgcctgcgggatgcccaaaccgactgcggaacgaagcctttgggatatgaaccatatttacggtagcggctatatgtatttgtgtgcaagtcattatcaaggagatttcccggaaaaggaatatgctttttttaaccgtggcatcagtggaaacactctccgggatttggagaaacgctgggaagaggatgtcattggaatgaaaccggatgtgctttccgtcttggtggggacaaacgatgtacattactatctgcagggtgacaaaaaagagccttttgattttgaaggatgggagaaatgttaccgttccttgcttgaccgttctttgcaggccaatccggaattgaagatagtgctgggcactccttttgttgtcaatgtcggcaatatgcgtaagagtgaggactttgcagaacgtgatagtctggtgcgtcgctgtgccgccatcgtagagaggatagcgaaggactatcagacggtatttcttccttataatgcgatgttcgatgaaattcttggcattgctccggcttctcaggacacctattggatttgggacggtatccatcctactcctgcagggcataaacgaatggcggatatgtggataaagcgcgtgaatttataatttatcaataaaatagagagtaatggaaaaagtgattatcaactcgtacgaggattttgaaaagctggtaggccagcaaatcggtgtttcggaatatgtagagctccctcaggagcgtatcaatctgtttgctgatgcgacattggaccatcagtggatacacgtcgatacggaacgcgccaaagtggaaagtccttttaagagcactattgcacatgggtatctcaccttgtccatgttgccatatctgtggaaccagattattgaagtgaacaacctgaagatgatgattaattatggtatggacaagatgaagttcggtcaggcggtattgtccggacagagcatccgactggttgcccatttgcaatctctgtcgaatctgcgcggtgtggcaaaggcggaaataaagtttgccatcgaaatacaaggtgaaaagaagaaggcactggaaggggtggctatatttttgtattatttcaattgattatgcgtaagatggtatgcccccaatgcaaggtgggggcattttttgtgatgaacggacaaggtgagcgcctgccggtctacatctctgacaaaggtgagattgtacctaaggacggcacctcctcgttggagggatacgaccaggatacggtttattgtttgtgctgttcctggcgcgggactccgaaacgtttggtgaaatactgatggacatactcctgccacaaatggcggagtgccgccacgggatggtacaacagcatccgtggtccggcataccgcatgacttcacgcatctgttctttcatttcgggcttgtagcagtgaatgctgcattgcctgcaggtggatttattctcaccgaaaggacagcgtgaaagacgaatgcgggcatatcccagcaattcctcgcatcggggacacaattgcttgttaccttcctttttccggcagtagaggcggaccatccgttctactgtctgtttttcctgctcgatacgggatggcatgtttattgtttggactgccagcgtttcaaggtcgggaagaattctttcataccggcaatggcttcctctttagtgaaattcattccggaatccttgttgaattcgtcggtgaactgtgcacaatgttctatcatttcgtccatagtgcagtcttgtgcaaaattgccgtgctggtagcaataggtgcaatattcctcgttgaggctaccgtcggcattggttccgagtacttctgcagatgacaagggcattccgcagctttggcaaagtttagcttccataatgtgtggagttaagtgatatgcaaatatagaatattattttggttgaagcgtccttttcagataaatcatgtctttcagttgcttgcctccttcaaatatggggtggtcgtaattatcgataaagaaatcgggtacccggtgtgagtatgcaaatccgcagctttcatagaaggggatggttagcggactgtctccagtgccgacaagcatagtatggcaccggtctttataatgttcaagaacgaatgctatcagttgtcttccatatccctggcgctggtattccggatagacagctatgctctttatttcgtagattcctttatcctcgcaggtgattacacaagacgctttgactgtatcattatcggataggatgaacatctctccccgttccagataacagtcaatcatggactcttgttcgtcggcaagcagcagcaggtcaagatattgctttttgttgccggatatgggatgtattcttatcatatttctgaatttctggtgtgaagttagtcattttctattgaattacaatggatatctctttttaactgttgaatggttgagagttgccggtgaacaaaatctgccatacgccgttcttctcataacatgataatctgatgaagttatgagtaagttgaaattctcttttctggttttgatgctgatggtatcagtctcggcttctgccgattgggcacctgctgatgtacaggctgcactgaagaaaatgtatcctacggcagatgatgttgcctggtcgcatgatgagtcttattatgtggcagatttcctgatgaacggttttgatacgaaagtctggtttgacgggcaggcgcaatgggtaatgcaacagacggactgggagacaatggacgaagtgccccctgccgtttacaatgcttttgccgccagtgaatattccggagggatggtgcagaatgtcacttgggtacagtttcccaaatggcagtccatcgtggcggtagaggtagggatggcaaatctccagacgaaatatcagatattgtttaccccgacgggcgaaatcatccgtgcccgtaatgtcacctatacatacaatccgctcggcgcagccactttcttgtaacgtctgttcgcatacctgctgaatttatcatatctttgccttcccaaaccagacttttatggacaaagacacttttcagcaggaggtttataatgtagtggccgcaatccctccggggcgggtggtgacgtacggacagatagcctatcttgtcggaagacctcaatgttcgcgcatggtgggacatgctatgcacgatgtgcccgacggcatgtgtctgccctgccatcgggtagtgaacagccagggcaggctggcaccgtgctgggcggaacagcgggctttgctggaggcagagggcgtgacgttcagaaagaatgggtgtgtggacatgaaaaaatgccagtgggaattcatgaaagagcaaatacaataagattatgaaatttataggtgcacatgtatcggccagtgggggagtggaagcggctcccgtcaatgccagtgagataggggcaaatgcttttgccttgtttaccaagaaccagcgtcagtgggtggcaaggccgctgacggaggagagtatcagggtgtttaaggaaaattgtgggaagcttggcttcgattcccgctatatcctgcctcacgacagttatctgataaatttagggcatcccgaagaagaagggttacagaaaagccgtgccgcttttctggatgagatgcagcgctgcgaacaattagggctgaagttactgaattttcatccgggcagccatctgaataagatttccgtggaagagtgtctggacaaggtcgctgaatccattaatcttatattgggcaagacgcacgatgtggtggctgtcatagagaacacagccgggcagggtagcaatgtgggaaatgagttctggcagctgggacatatcattgaccgggtggatgacaagtctcgcgttggagtttgccttgatacctgccacacgtatacagcaggctatgatatagtgaatgagtatgacaaggtgtttgaggagtttgacacagcggtaggtttcggctatctgcgtggtatacacctgaatgactccaagaaagcactcggctccagagtagaccgtcacgacagcatcggcaaggggctgataggtatggatttcttccggcgctttatgcaagatgtgcgttttgacggtatacctattattttggagacgcccgatgaatcgctttgggcagaggagataaaactgttgagaagctttgtctcctctgattgagagactatgccctgaatacacattctatacggttaccgtccgggtcgaggacgacactttcaaaatatccgtcgccggaggtacggggctctcctgcgatggtatatcccgctgtacgtagccgttctgtctgtcggaggacagcttcctggctgtcgaaggcaaaggcaaagtgggtcagtcccagtctgttttcctcaataggggtattctgtatgtccgtacggctcatcagttccaaatccgttccttcatcgaagtgaaggaaataagattcgaatccttttttggggttgatgtacttttcattgctgctcccgttgaagtaacgtgtgtagaactctttcatctcttccagttggaaggtccagatggcgatgtgatgtatcttcataagtttgctaaattataatctgtgttcaatctgagtaatctgtggtggggttggtaattgcaggtgcagaatagggaaaggctttcccatcgggtcggtttcgtcccggccggccacttggaatcccatatgttggtaaaatcggcaagcttgtccgttctgctcgtttacatccactttgtggatgtgtttttggtggacggcgtactccatgagccgttttccgtatcccttaccttgttggtcgggacggacaaacaacatctcgatgagttcatcgctcagtcccataaaggcggcaatttcttctttttcgttgcggatgatgtaaagctctacggcaagaaagtactgctctcttatcagtggtttgtaaaactgtatatccttttctgccaggaagtggtgtgtgctgcggacagaggcttcccagacggtcaacagttcgtcataatcttgtggggtaggtcggagtatcatcatttattgcattactttgctggttattaatcagtaggcagtcagaattcagcttctttggtaatccttacggtttctcccgttatagggtgggtaaattctaagtattcggcatgcagataaagccggtctgctttctccccgtaaagttcatcaccgatgatggggcagtgcaagccaagcgggtgtgctgcatgtatacgtagctgatgggttcttcccgtgcgcggatagaaagcgatacgggtccgtttcccgtccagacgttccagaacttgataatcggtgatggcgggctttccgtgttcggtgtgtaccatttgccgtgggcggtcaagtggattcaggcaaagcgggaggtcgaccgtatctttgtcctttgggacaataccctcgagcaatgcgacataacgtttcctgaccaggcggttcttgaactgggcctgcaggttctggtgtacacgcttggtcttggcaatgagcattaaaccggaagtggccatgtcgagacgatgcaccgtcaggggaccgtcagcttcgggatattgctcacgcatcaggctatagacggagactgcatcttccttgccgggaacagacagcattcctgccggtttgttgatgaccgaaagccatgggtcctcataaacaatctccaaattttgggagggtacctgcattcttttcaacatggggttttcctctacttgtagaccttgcagcatgtgttgcagtataggttcgcactttcctttgcaagccggataatagtgaccgtgatggcgtatctctgtctttggggaatcaccccaccagaactcggccatggcaataggtttccacccgtgcagataagcttgttgcaacagtttgggggccgcacattcacccgcgccggcaggaggtgtcttgtgcacggtctgcccgaatatctcacagagattcttgagttctccccggtaattcagcatcccgaactgttcgaatagcttttgctgcaatgctgcagagcgggttttacgttcagacttcaatgctgaaatccgtctttcccagtcttctgtctgcgtttgcagtgtggtaatccttgctttccatgaacgttccagacgtttatattccgccttttggaactggctttcccgtatcagttcggcttcttcctgcgcattgagttctttttcttttctgcgctgttctctggctgttttggcttctttcaactgtgctttggctgttgccagtatgtcttctgctgactgaatggtccgggcaagctctgctgataaggcggcatatgctttgtcattttccaattgccggatgttgcggttgatggaagagatgttctcttcttctatcttgaaaaagccttgtggctgtagcaagtcatatacgggaggaacaaaaaagggatgtaggttctttccggccaatatgcctgagaatgcagctaaatatccggtttctccatgctcggtttgtacaatcagtaccccgaacattttgccttggcgcagttcgtccttccatgcagtttgtcgggtaagatagctttgtacttctttggctgccaatatacataatgggtgcggagtatagcagaaaggataggtgaacctttccggaagcggaatgtcggttatggaagtagtaaaacggtgcaacatgatgttgcaaagatactatatttctcttataacagaccgtttgtactgcaaatctttatttcgttgtatataggttgtagcgcttatgaagagaaaaacatctttgggaaagttttacttattctccgtttatacaaatatgtatatatgtgtgaattaactttgtttttgataaattggcaactctgttatccttaaaaaatgactattaatctgtttcggatattttcttcttccatagacttctttttgtatactttagatgttatgccgtcgtatgaatacggatgaagagcttttgtcttagtgatacttgtaaaataaattaagttattgccttttttgttttattggagaatggttgttttttaaacttcctggatatataaaagaaacttatttctctttaaaaagttgtatattagtgccttaaagcttttcaaaagattatatgggcaaaaacaaagagaacttaaacatattcttgcttcattttttagaacggttgaatagcaatgaacccaatgaaaggaaagttattgaatcgttgaccgatttctgcaactactatgactttacgaaagggtttatctatcagactgacggattccgttatttcttattgaaagaaacgattggaaatgaaggtgggactatgaaaccccgtttcgatatgggagagttgaaaaaggagcatgtcgatgccatgaaagctcgggataaacctttctatggaaacagaaatgcggatgcttcatgggatgatattgacattcttgatttctacggtgaggattctttgttaatcaggcattttgaagatactgagggtaaaatcatcggattcataggttttgcaggcagggaggaagagacctatctcacggaagaggagttgcaaatcattcatctcttgctgggctcgttctctaaggaaattgcggtcagggaatataaggaaagggaagtgagggccagcaatacattaggcagtatcatgaataatatgggcgttgatatttacgtcaactctttcgattcccacgatatgttgtatgccaataggtctatggtggaaccatatggcggtatcgagcatttctgggggaaaaaatgctgggaggccctctactcggacaagacgggggagtgtgagttctgcccaaagaggcatttgatagatgaaaacggacaccccaccaaagtctattcgtgggattatcaacggccatttgacaagtgttggtttcgcgtgttcagtgcagcctttgcttgggtggacgggcagatggcgcatgtcattaccagtgtggatatcgaccatcagaaaaagatagaggaggaattgcgggtcgccaaggataaggcagaacatctggaccgcttgaagtctgctttcctggccaatatgagtcatgaaatccgtactccgctcaattccattgtcggttttgcaagcatcattgccgaactggacgatagggaagaacgccaggaataccttgccatcatgcaggagaatacggaactgctcttgcaactgatatccgacattctggatttggcaaagatagaagcgggaacacttgattataatatggggtatgtggatgtcagtgacttctgtaaggacgtgatgcgcaactatgatataaaggaagacaaggctgtaccggttctgttggctcccgacttgcccgattaccgtatctataccgacaagaaacgtctgatgcaggtggtcaccaattttataaacaacgctttgaagttcaccagtgaagggcagatccttttggaatatcatccggtggaaggtaccggtcagatagagttttctgtgacggacaccggtatgggtattgctccggatgccgtggctactgtgttcgaccgctttgtaaagcttaatacctttgcgaagggcacgggtttaggcttgtccatctgtaaaagtatcattgagcatcttggcgggactatcggtgctgagtcggaattgggagtcggcagccgtttttggttcagacatccgtgtgccgaatgattttatttgcctatatttgtgcgaacttcaatatttatggataaaaaactctgtaccgatgaaaaacaagacatggacgtgcctggttgttgtgtcagcagcattgctgatggcgggttgcggcagcaggacaaagaaacaaacaaatgaagatgtaagtatggatagtgtcggtgtaacatgcagtggcgtaaagaccttgcaactggagggagtgcaggccacttggattcaggataatgctggtgagcatttgatgccgagaacgattttcccggatgcaagcgatgaattgatggaaagtttgtcgcttcaaggcggtattccttcttccatgagcaccttcctggtagatacgaatggtatccgtatcctttttgatacgggaatgggagctcccggcagtcgtctgttgcccggattacaatctttgggtatctctccggcagatattggatatctgtatcttacccatttccatggcgaccatatcggtggaatgatgaagggagacagtgtagtcttcccgaatgccgaagtgtacgcatcaaaagtggaatatgatgcctggatggcaatgcctgccgaaaggaaggcgcaggtcgtaaagacgatggatgcctataaggaacggctgcatctgtttgagtttggcgataccttgccgggtaatgtggttgccatggaggcagtcggtcatactcccggtcatacggttttccagagtggcaagttactggtgattggtgacctcatccatggtgcggcccttcagttggagcatccggaatactgcgcttcctatgatatggataaggaagctgccgtgaaagcacgcaagtatttcctccaatatgccaaggacaaccaattgacgatggcaggtatgcatcttcctgctccggccttcaaatagaatgggagagtgtcaaaagtatatgagtactttcattatgctatatttaggcgcggatagttctgagcccctcgttattcctttttacttttagaagcggcagtcttgttcgatgtatgtcatatattcgtcgtaactgatgtgcctgcctcccattgttttgaggtgaggggtttcgaactggcaatctatcatgacgcctccatgttccctgaagaattgggccagatggatgagggccagcttcgaggcgctgggaacaagtgagaacatgctctctccaaagaaacaacgtcccagggtcactccgtacagcccacctaccaattgctcttcttcccatacttccacgctggcggcgaatccttgttcgtgcaggtgcgtataggcttccatcatcttcgttccgagccaggctccttcttgttccatccgcaattctccgcaggtttgtatgatgtcttggaaagcttcgttgaaggtgatttcgtactttcctttgttgatgagcgtacgcatggagtgggagatatggatttcgtccggaaagatgacgaaacggtccatcgggcaccaccattgtatcagttcttcccgaaatgcgtaccaggggaagatgccgttggagtacgccaggatgaggcggtcaatggataggtcaccgcccacagcgagcaacccgtcggggtcgccgtagtgagggtcggggaaagcaagtttatccgtcagttgaaagaccatatcgttattcggttgcgggttgtagtttcaatgctccgttttccacttgcacgcggacttttcctcctgccttcaatgtaccgaacagaatttcgcgcatcagcaagggtttcaagtgggcggctatcacgcggtccatctcccgggcgccgtattcgggaataaaaccccgttggagcagccattcgtgtgcttcctggctcaataccatttccacctggcgggaagacagcttgctgcctagttctccgagtttcttgtcgaggataagtgatgccatcgggcggtccatgtcatggaagaccaccgtggcagagaggcggttgatgaattcgggcttaaaggttttcttgacttgtttcagcatggcttctccggcggtgacctgactgttgaagccgatggacgcttggcgggcatattgtgctccggcattggaggtcatgatgaggaccacgtgtcggcagtcggctttccgtcctttgttgtcagtcagtacggcataatccattacttgcagcaggatgttgaatacgtcgggatgggctttttctatctcatcgagcagtagcacgcagtttggggtcttgcgtatggcgtcggtcagcaggccgccgtcctcgtaacccacgtagccggcaggcgagccaatcagtttggctacggtatgcttttcggtatattcgctcatgtcaaaacgttgcagggcgatgcccagctcggcggcgagcactttggcaacttcggtctttcctactccggtggggcctacaaagagcaggcttgccagcggtttgttttcgtccagcagtccggctttggacatttgcacagcttccaccacctgacggacggcttcttcctgcccgtagatgcgggagctgatgcgttcgtgcaggctttccaaggcggtggtgtcgtcctctttcatggcgagggcattgactttgcaggtacgtgccagtatgtcggttatcagtgccttgtccacggtctgttctccggagtctgtgggatgtatttcccggtaagctcctgcttcgtccaccaggtcgatggctttgtcgggcaggaaacggtcgctgatgtagcgggcgcttgcctttacggcgtaggggatgacgtcgggctcgtaggtgacgccgtggtaggtttcgtatttctctttcaggccttctacgatatgtatggcttcttcaatgctcggttccagtatgtctatctgctggaagcggcgtaccagtcccttgctgcgtgcgaagtagcggttgtactcgtcgtaggtggtagagccgatgaaacgtattgccccggtttccagatagggtttcagcatgttggaggcatccatggagccttcacccgtgcgtccggcgcctatcaggttgtgtatctcgtcgatgtagacgatggcatttccctcacgaccgatgccttccatgatacttttcagccgcttctcgaaatcgccgcgatattgtgtgcctgccagtagactgcccaagtccagctcataaatgcggaagccggcaagccgttcggggacgttgcccgcttcgatacgggcggcaagcccataggcaagggctgttttgcctacaccgggttcgcccacatgcaacgggttgttcttttctttgcggcagagcacttgtatggttcgctccaactccatctccctgccgataagcgggttgtggcctgccagatggtcgttgaggcaggtcacgtagttacgccacggttctgttttctcttgttcatcgggagatggcgtaccgcctgcttcttctgccagctccgcttcttcgtagtgggtgatgagcaggctgaggaattcgggcaggtcgccgccgactgcttccttcaggaaatggcatgcccaggaatcttccagttgcagcaagccttgtatcagatgaggaacatccagctcttcggcgctggaatactctgtcaccgtataggcatgttgcaggagtgagctgagctggacggaaagtcccaactcgtattccacattgtcggggacagtgtccacttcttccgtcagatagttttccagcgagatgctgagctccacataattgtagaaggtatcttgcagggtgtggataaagggttcctgctctataatggcgctcagcagatgttcgggcatgatgaactcgtgccggtaagactcggcctttctttgtgcggaagcgaatgcttggtttacgaatatcgtattttttatatccatattgtttctttcttcttattcttcttcctccggggtgacggtgagccggagggggaaaccttcattgcgtgccatgcgggtggctttctgtactttggagtgggcgatgtcgtatgagtagatgcccactaccgcggagttgctcttgtgcacctgcagcatcagtgtttccgcttctgccgatgatttgtaaaagacggtggtgagtacttttaccacaaactccatggtggtgaagtcatcattgtagatggtgactttgaagcgtcggggttcccgtaattctatgcgttctttttctttgaaagaagattgctgttgttccatttctttttaaaaactactgttaagacattgttctaccgttgtgtgggcaacgaaaactcctgccagtcatattcgtccccatactcgtcggctatggctatgcgtatggtgacgttacccgtctttatccgttctccggcactgatgttggcggtgtatttcacaccgttgtgcggagttatttgctctatcatgaccgacggtgatatgtaaatgcgcttcatgcccgtggtttccgccaccaccggcactacgttgtaggctgttttgtttccttcgttcatgatttcaaaaatcactttacagttttcgcccgaattgatgacgtggttgcggctgtcgtcaatgaaacgtatattccgtaccctcaagtggtcgatggccgatgcttgcggctgtcttccggattgcgggagatagggctgtgtcctttctatccggtagctgtactcctcctgctttttgggggctgtggctgcattggcaatggcagctcccgcaatggttcctatgatggtgccgatggcggaaccccggtatcctcctcgccagcctccgttactgtcacctatcagcccgccgatggcaccgcctacattacttccgatggcagctcctgcgagcactgcgttagggtcgcctgcagccatctggcttgtgccgcatccgctgaggatgatggttgctgccaggattcctataaaagactttttcatgttcatatcctataattattatgttgggcagattgttttataaaagggctattcccgataaatcatctttttggtcatgcctccgtcaatggtgatgttttcgccattgatgaagtcgttttcgtcttgacataggaataggcacatacgggcaatatcttccggtttgccaacccgtccggagggatgttgtgaatggtcttctgcccgtaattgttcataatcgtgtgtctgaatccagcccggagagatggagttgaccgtgatgtgccactctgcaagcgataaagccaacgcatgcgtcaatgaatagatacctcctttggaagctgcatatccttcactgcctggttcactcatcagatagcgggtagaacagagattaatgattcttccgtaggtattcgtgctgttttgacttttgcggtgtactgccaacgcatgtgaagtaatgaacaccggacgtaaattcacagacaatattttatcgaaagtctccacactcgtttctgtgatgggagagaattcactgatgccggcattgtttataatgatgtcaatatccccccattccttgaaaatattttgcaggcaaagttccaatgcttctttgctgtttaggtcgacggggtggaattgtgctccggtggcttgggcggtttgttgtccttccagttcattcttgtcacaaaaggctacttggtaattaagcttgcagaaggcttctacaatggctttgccaatacctcctgcacctccggtaacgaacactttctttccgccttttttgaggggaagtgtcggcttatgtagcgtttgtgccttaccggattttttcgctttctcccaagctgctttgcgtgcccggtattgctcgtactgattttcaagataattatcggccatatatgtttccggttttattgtttaactgtctttctccgaataagttcacttccttgcattgggagatgatatagagatgatgcccccaagggatggagaaaaatttctcttcacctaatttggaaacaacttgttgccaaattgtatgtggctcattataaaatagataccactgctttatactgcgtatgtttctatatgagaaccctttcatatcaggaaattctgccatcagctcacgactcaactcttcgagaaatccgcttccccaagtcatttctttctgccgttctataatttctgctcccagttgccagtaaaggtgaagcagttcgctgttcacgcgtacagccgctttaatctgtgcactacgaatgtcttgttttaggtggtttacccaatccttgaacggttgatttatagatagtgctgttttcatatttttattttcttcatcgtcatattcgatgtttctatttcacaaagttaagaaaaagaatttatttcaactgtaatccttttcgtcttttctacctctccacttttaccacacaatataccatctccccctctctttcctttacctcatcccgtgttgctgcaatatcctcccgaacacgttcacccgttttgcagagaataggtatcgcactatgtcgctgtatttcctcctatattttcgtaggcgataattattccccttgtagggcttcaaaagggaatccgtctgtttccctaaggagaacggtttgtttcaatatggagaacagtttgtttcattagtaggaaacagtttgttccgttaaagaaaacagttcgttttattgagtgcgaacagtttgtttcatagtatgtgaacactttgtttcttactgttgtaacaaagtgttcaccgttgtgaactaaagtgttatctatattttcagtgataaaatgacatgaaaagggggctgaagattacctttctaccatttgtattcctcgctgtaagagtcgaaagccggttctcccggaatgttgtattggtggaaagttctgcggatatagttctggtcttcgggggaaaggtaagattcttcccggtagaagcggtagtattttccgcggccgaaatgggctatcaactggcttttcagaggttggagattcttgtagggaacttcatcgagcaagtggctgattccccacgcaacatgtatcttttgtgtcgattggaaataggcgcattgactgctatcctctggaatgcacagtggattgatgatgcggatggacgggtactcgggggtatcgcgaagggcagctaagcgatgcaggcagttgtcggctttcgggcattggttgttgaaacagcgtgagtagttggcaggtgctaaaggtttttcggaagaatgtttcatgtttatatatactttgatgaagctacaaagataacactaactttttgatatagccttctgttctcttgtttgaaatgcctcttcattgaaaaaacagtagccggaaccactgaatccagtaattccggctgtaccgttctttcttataagtatggatggactatttcacctggatgatgtcataattcaagtcactcactgcttcctgcaggctgtcgttgacaaggcgcagggtagtgtcgttcactactacgaagtacaccggagtgtcgccgtcgtctggagtcagtttgatggctgttttcttcttgttattgacgtctttctggataacttctttctttcctttggaagtaaagcttttgttttttccggggccttcggcatccaaataagttgttaccaacgtataaccgctttctccatcaggacctacgctgtccacgctcaatacatactggatgcccggaccgtcggcagcaggaagaattccctcgtatacggccacggcagacgagtcattgccggcaactgccattaccccttcgtccacggcaacagcatcattgttctgggttccttttgattggcaggataccaatgcagcggcaaaggctgcaatcatcattacttttttcattgctttaatggtttaaattaattataaagacgcaatagcgttcgttattcatcatcttcttctttcttgatgacaagcagtttgtccactcgtccgcggtccatatccactacttcgaagtccaggtttttgtagctgaacaagtctccggctttcggcacctgtcctatcaggaacatggcaagaccgctcaaggtggtgaagtcttcttctttcaggtcatcatagttcataatgcccattgcctccataaagtcatccagattcatggaagcttccaccagcatggaaccgtcttgacggacaacgatttcctcttcttccgtttcattctcttcgaggatgtctccgaagatactttccgtcaaatcgtgtagggtgatgataccttctgtatttccatactcgtctacaacaactccgaacttgtttttgttcttcttaaacagctctaaaactttctttgcatacaaactttccggaataaacaaagcagggcgtgcaatactacgtaagttgaagggttgttcgccgcccatcatcaagatgatgtcctttacggaaaccacaccgataatctcgtcctttccccgctccaccaggagatatttgctgaagtgttcttcgtggatgatgcgcagcacctcttccggtgtgtctgtgggatggagcacgacgatgtcgcggcgataggtcatcaggtcattcgctcttttgtccgagaagcggaacacgtcacgcaacatttccgtttcgtctttgtcgatgacgccttgttccgagctttggtgcagaatcatcttcagttcgtcttgtgtcatttggcgttcttcgccgctgttcagtccgatgagtttgttcatcagtttggtggaagcgctcagcaggcatacaaacggataggaaatcttggtcagcacaatcatgaaggggctgagcatggtggcccatcgttccgggttgttcaaggcgatggacttgggcaccagttcgcctatgatgagcgacagataggtgatgatggctactacggtaatcatggcgagagtcttggcataggcggctactcccggaatgagggcgaacagcggttctacgtcatcagcgatggtggcaccaccataggcaccggatacgataccgataagagtaataccgatttggatggtggagaggaatttttcgggttcttccagttgtttcaatactcctttggctcttttgttcccttttccgacaagagtttcaaggcgtgctttacttgaggagactaaagcgatttcatacatggcaaaaatgccgttcagaataagtaaaagtagaatgataataaactccatagtggattttgaatagtttgtgaggcaaagataatgatttttcagtatttattgttaatattgccatccgttagaaaaaataaacaataaatagatgaaaaaaagaattattgccttggggcttttgtggtgtctgtctgccgtaatgttgcaggcggcacgtgtagacacggtgttggtgagaagtgcagccatgaataaggatgtaaaagttgtgtatgtattgcctgataaggctatcggcaagcaggcttgtccggtggtttatctgttgcacggttatggcggcaatgcgcggagctgggtgcaactgaagccggaattgccgcagatggcagatgagaaagggatcatatttgtatgtccggacggcaagaacagttggtattgggacagtccggagaatcctgcctaccgttatgagacttttgtcacctcggaattggtgaagtatacagacgggaactatgctaccattcccgatagaaaggcgcgtgccatcagtggattgagtatgggcggccacggtgctttgtggagtgctatccgtcataaggatgtgttcggtgcggcgggcagtatgagtggaggagtggatatacggccgttcccccagaattgggaaatgaacaagcagttgggagagtttgctgccaacaaggcatcttgggatgcgcatacggtggtcaatcagctggataagattgtaaatggagacttggcgctaatcatcgactgcggtgaggccgatttctttcttgaagtgaacaaggacttgcacaaccggctgctggcaaggaagatagaccatgacttcatcacccgtcccggtggacataccggaacgtattggaacaactccatagactatcacgtccttttcttcgacaagttctttaagaagtaagtagtttattattcgatggtatagttcacggtgcgtgtgtagtcctgctcgtagccgttccttatatgcctgacgactgcatggcaggaagtgacgataccccggttatctaacgtataagtataggtggtggtctcttcactttctccgttgctgtccgggatgagttgggtaatcagatagtttgcaggttctcccaatatcttcccgtatatggcaaccgcatgcatggaaagcggatacatgtccgtaatgaataggcttggtatttcggagatatttgcaatttcattgcctgatggtgtggtagccgtactgttgtgctcaaaagtgtcaaccttttgctgtatgcgcaatgcccggaagttgctgtagtctattgtaatgaatgagtattcttttccgtcgtccagcttttctgtgatgttttccagatagtatttgtcttcggtgttgatgaggtaggagaaggtgtaagtacgggtatttcctgccatatcctgactggtacaagtggtggcataacctttgtcattcagcgtgtaggttgatactgtacctgcttcgtcggttatcacggcttgatggtccttgtattcgacagtagtggtattctctatctcgaagagttcgtctcctgctgtaaagctctgtttgccggtgtagccggtcagcctgcctgcactgttgtaaaggtaggtgtgggtggcagtaaccggttgcgcatcgctctctatcacttctttgagttcgattttggagaaaggagtagtggggtaggttgatggctccggttctggcgtatcactgtcattgttatcatcgctgcaagctgccagtccgccgagcaacagcaggctgaacatgattcccgaaaatcgggtgatgattgtaactcttctgtttagtttcatcctatttgtctttttatttgatgcgtacggcatggcttgcccgacgttcaatggagtttgcgagagtggtcactcttaaagaacgggtatcttcttgtgcgggcggttgtatgcttccgtcgatggcgccgagtgcagtgctcaataaggcttcgttggtatctccaaagggcaggaaacgtgacatgtcgctcatctcattcactacatatcccgagtaggccagttggaatccggattcataatcagatttcccttccgaattgtatatcttgcagacgatgggattcatcgttatcatcagttcggggctggagaaattcctggaacctacattcttgcctacggtagtaccgccgattatgacaacatccatatacgggtcgaggcagttaatcaccatttcggaggcggaggcagtctggctgctggtaagtacgtagagagtattcaggtttaggtttgctccgtttccgatgagtccggaattcagggtgaacggtactatctgcggattgaagcggttgttgaattccaggtaccccaactcttgtcccaaggcggaggaaggtgcaagcatggtacacagcaattctgcgcaactcagtaatccaccgttgttgtagcgcaagtcaaggatgaattcgttgacttgctgtgatgcgaaatattggaatgcgctgcgcaggtcgttgtcatattcattactgttgtccgtggggccggaactgaagtggttgtagaccagataacctattttcttgctgcctgatgtatatacattcttatagtgcaccgggttgtcgttgacgggacgcgccgatgctatctgtctgggtttgtcgtaagcaacgatggcatttttctccacgtcgtaataacctactgtaagttccatggcactacttccatacagtttcttataattctgttcagtaataaagttcccgtccatcttcataatccagtcaccccgttttagcccgatttccgaggccgggcttccgtcggcaacgtaaagaatctgtgcaacaatggcattctcttctccttctacttctatctggttggtagtgaactggaatccgtagctgtaatccgtataggggatgctgcgggtagtggtgatgctgaccagactgtcgatggtggagaatttgtcttcttcggatttgagcgaggcaaagaaagtgaaaggggcttgaaaatagttcaagtcgttggtatgggggatagcgtctacccaatagtaccacacacgcatggtatcgtcaatccagcggtctgtctgggtctgtccggcatactctttccagcggtccaccccgcaggaagtcagataaatgggaagaatcagggttcccaatatgagtatcagtatatttcttgctttcatgggggcaaagatagtgcaaattgagtgcagaactttcatgcttgcatgaaaaagttttgccgaaatgcagtctatcttatctaaagatagaaaatagcttgcttatctaccacaattgtggtataaaattccctaatctgtgtcattgtctgccccggcttatcgctctatctttgcaacatccgaatgagaaacggtttattcacctaaaatacaaacgacaatggaaacaaagaaattgcactttgagactctacaacttcacgttggacaagaacaacccgacccggcaactgatgcccgcgccgtacctatctatcagacaacttcgtatgtattccgtaattcggcccatgcggcagcccgctttggcttgcaggacccggggaatatttacgggcggttgacgaattccacccaggatgtgttcgagaaacgtgtggcggctctggaaggcggtgttgccggattggccgtagcctcgggtgcggcagccatcacttatgcctttgagaatatcacccgtgcaggcgaccatatcgtggcagctaagaccatctacggtggaacgtataatctgctggcccacacattgcctgcctacggggttaccactacttttgtggacccgggcaatctggacaatttcgagaaagcgattcaggagaataccaaggcagtattcattgaaacgctgggaaatccgaattgcaacatcattgacattgatgccgttgctgaaatagcacaccgtcaccggattcctctgattatagataacaccttcggtactccttacttgattcgtcccatagagcatggggcagatattgtagtccattcggcaacgaagttcatcggagggcatggtacgtccttgggtggtgttattgtagatagcggcaagttcgactgggtggcctcggggaagtttccccaactgacggaaccggacccgagttatcatggagtacgtttcgtcgacgctgccggtcctgctgcctatgccatccgtatccgtgccgtattgttgcgtgataccggtgccacaatcagtcctttcaatgctttcattctgttgcaaggattggagacgttgtcgcttcgcgtggaacgtcatgtggagaatgccttgaaagtggttgaattcttgaagaagcatcccaaagtggttgccgtgaaccacccgtccctgcccgagcatcctgaccacgcgctttacgggaaatactttccgaatggaggcggttctatctttacgtttgaggtgcggggcggtgtgaaggaagcgcagacgtttattgacagtttacagatattctcgttgcttgccaatgtggctgatgtgaaatccctggttatccatcctgccaccactacccattcccaattgagtgcacgggaattggaagaacaaggcatcaaaccgggcacggtccgcctctccatcgggacagaacatatcgatgatttgctggacgacttgtcccaggcatttgacagaatttaaaagaataacagtatacgatagaatgaatattgctgtattattgtcgggaggtgtagacagctccgtggtggtacatctcctttgcgaacaaggttaccgtccttctctattttatatcaaaatagggagggacgatgccgattatatggactgctctgcggaagaggatatggagatggcttctgccattgcccggcgttatggattatcgttggaagtagtggacctgcaccgggagtattgggaccaggtggcggcttatgccattgataaaataagacgtggcttgactcccaatccggatgtgatgtgcaacaagctgataaagttcgggtgctttgagcaacgtgtggggaaggatttcgatatcacggcaaccgggcactacgccactacggtgttgagggatggaaagacatggctcggtaccgctgccgattccgtgaaagaccagaccgactttctggcacagatagattatctgcaagtttccaaactgatgtttccattgggcagactgatgaagaatgaggttcgtgacatagccctgcgtgccggattgcccagcgccagacgtcgtgacagtcagggcatctgctttctgggaaagattgattataatgattttgtgcgccgtttccttggcgaaagggaaggggatattgtggagttggaaacgggtagaaagttgggcaagcatcggggctattggtttcataccatcggccagcgtaaaggattggggttgggtggaggaccgtggtttgttgtccgcaaggatgtggaggagaatgtgatttacgtgtcccgcggatgtgatacggcattgcaatacggctatgaattccgtatgtacgattttcatttcattacggataatccctggaagggagcgcaggaagaggtggaggtgactttcaagatacgccatacgccggagtttgtcaaaggcaggttgcaaaaggaggcggagggttaccgcattgtttcggaagaaaagctgcaaggcattgctccgggccagttcggagtggtgtatgatgctgatgcccggctgtgtgtcgggagcggggagatttatatataatattccaccaagtctacgatgcctgccttcatggcatatttggtggcttcgtgcgcattgtttacacccagtttccggaagatattcttccggtggctgtttaccgtatggaagctgaggtttcgttcggcagctatttctttggttgttttccccagggctatctcttttaggatgctccgttcggcagtagtcagtaaatcatctttgatggtaggatgagtgggggaggaggaaccgttgcctgcgagcagcaggttactgacgtgattacagatgaatcgctccttgcgtgaggcgcattgtagtgcggtcagtatctcttcttttgaattatccttcagcactacgccgaatgccatgctgctgaacaatacctggcgcaggaacggtaggctcaattcgtcggaaaagagtagccaatcggcttccttgaagcgttcgtgaagtaccatcagctcttcggctcccgaaaaatcaaaaagggtatagtccagaatgacaatggcggtgggatgcaggcgtagttgctgtatcagttccgccttgttgtcggcttccagcagcagggaggtgtctttctgtctgcccaataggaacatcatgcctgctttggtgatatcttgattgtctgcaatgataaattctctcatgacattggtatataaaaaactccgctacaaatgtacactttttagtgtgatttgcggcggagtgggaatatatatatttatataagggttttaccaggaacgtcccttgaatatgttggattgttccagcggaaccaggttcccgctcaaagtcatggtgttggagttgaagttcgggctgatggttacggttgcgttgttcccgccatcggtcagcgtaaggaatatctgggcggaaatgccgataccctggatgctgaagttacaattcacgttgccccgtttgtcggtagtcatttggatgtccgatacggttccgtctactgttacaccgccaatgccgttaggacctgggtatacggtgttgaaggctacctgcacggtgccacgtccttggttgaccaatacgaagttggtgttggagtttacaaatgcggtctgtccgttgcggaacatcacttggtctgcctccattacgaactggtgagctttcaaggccgccattgcgtcatcgtacgaaatggcatcctgtgcttgttcttcagctttcaggcgtgcacgttctgcgtctctttgggctttacggtctgcgcgcttttcagctctactctcttgtgcatacatggtcgttgttgccatgcttaccaatactactgctgctaatgcaataaactttttcataatcgaatctttttttgtttaggtttaaataaattgttcgttataagtttattgcaagaacaatgcctatccaggattgttcaccggttttttaattattttatatccgatagcagcaataaagatactcattaccggactgataaggttgaagaagcaatagggaaggtaggtcagtgtgggtacactcaaaatggtggcttgcgtcatgccgcaggtgttccatgggataagcggggaggtgacggtaacggcatcttccgtggtacggctaagtagccggctttcgtagcctttctttgcgtaaacgttgctgaacatgtttccggtgaggataatgctgatgtactggtctgccgtggcaaggttcaggaacaatccggaacatacggtggatgctaccatgctggctgtattcttcatgaagcggacgaatagggaagtgatgcttcctagcatgccgcttgccgtcatggctccaccgaaacacatggcgcagatgatgagccagatggtattcatcattcctgccatacctcgtgtggcaatcagttctgtcaacatgtcactgtcagtttggagactggtactgccatagaatgtcatcattatccctttgaacatattcccaccttccgctatctcattcagtagtcccggttggaagatgaaggcgaatatccctgccagcagagtggagagaaagagtgtgatgacggaaggcactctccgggcaatcagtattcccgtaatcacgggaacagccagtaaccagggagtaatgttgaatttggcgtccaatgctgccgtaaattccgcgatctgttgtgtattgttcgtttcgtgtgtgagtcccattactgtaaagatgacaagggtgatgaggagagaggggacggtggtgatcatcatatagcggatatggctgaataacggtgtttccgttacggatgaggcaaggactgtggtatccgataacggtgaaattttgtctccgaaataggctcccgaaatgatggcaccggctatccatccctcttcaaaaccttgtgccttacctatgcccaaaagggcgataccgatggtggcgatagtggtccatgaacttcccgtcattactgataccaatgcacaaataatgcaggtagaagcaaggaaaaaattcggatggataatctgcataccataatatataagggtaggtaccaccccacttatcatccatgtgccgctcaaagcaccgataatcaatagaataatgatagctgtggcaacacctgaaatgttgttggtgatggcaagttcataatctttccaagggatgcggtagaaagccatgccgataaagacacacataccagtggtggcaagcagggaaatctggcttcctccactcaaggcgtcacttccgaaagtatggatggtggcgaacagcattcctacgagaaaagcgatgggaaatagagaaacgagtggagagggtattttctttgctgaattcatagggttgtttttgactatgcttggttgacgaatctattatcaatctgtcgtttatagtttgatgcgacaaaggtataacaattctgttcaatatcttccttatcctttgcatgacaaataaaaattatcaaatctttgcgtttgcttggaaaaatgatagtatccttgttatttcttgctgtaaagggtgatagacaacgatattattgttaaaataacgccggtgccgaccacgccactccatccccaagtctgccaactgcttcctgcaaggaaggtacccaaagagccgccgatgaagtaagtggtcatgaaaatcgtatttacccgattggaggcagacgggtagatgtcgaaaatactggtctggttgctgagttggatgcattgcatgcctatgtctataagaatgacaccggtaatgatacctgcatagttgtttccgcagaaaaagagcgaggcccatgcaagcagaatcattccgcaaccgataaagttgaaattgcgtatgcctactttttttacatattttcctacaaaagatgcggttaaggctccggcaatgccgcagagccctagtatgccgatgacatcgctggatgcatggaacggggcttctcccattttgaatgcaaggcaggaccacatggcaaggaatgagccaaaggccagtcctgcacgtatcgagtagattcgtagagaggggtattctcttactaatgagaaaagagacttcatcagcccggaatatttgccttggaaagtcggttgtatgtccggtagtacctttaatacaacgatagcgcatagtaacatcattccagcggcgatgaagtacatttcacgccagccaagcacttcacccacaaatccgctgacaacacgtgatgcaagtattccagtcagtaatcctgagatgacgacacctacattccgtcccttgttttcggggcgtgagaattgcgaggcaatcggtacaaatatttggggtatcatggagcagatgccggtaatgagtgatgctgcccagatgatgtagatgttcggtgccatggcaatggctagaagggaaaatatgagtaggaagaaattcgtcaggatgatattcttgcgtcgatagaggtctcctaatgggacgatgaacaataatcccagcgcatatccgatttgtgtaatcatggcaatgaggttcgttttgaattcagaaacttccaattcatgccgcatgatattaagcaggggttgattgtaatacaagttggctacggacacgccagctacgatagcaagtgtccagagtatatgtgccggtaatcctccgttttctttcagttctagtttcatgctgcaaagataatgtctttctgtttcatgcgcaagatatgtgagtatgataagaatatgtgtgaagtggtatcatctttttagcctttccgtttgttatactactattttgtttgagaataattgattggagctatcttggataagcggaatgttgtattgatatttaaagatacgttgggcatgggaaatgaatggtttagagagttgctgggtatgaaatacaggtggacgaaatgcaggctcttctagcaaacgagggttggtaaggtgaattcgatgactcaaggaacctaccgttcccccattagaccgcctcctgatgacatacttgggattatcctgctattgactgaaaactcgggtatatattagtatgaatcattattacttaaacttataatagtatgaaacatttatcgataataataatagtagtgtcattatgcgttttcctgctatccatcggcgtatatcataaggttccctggtctgttctgccaatagtggctagtggaatctgtatattatgttggcttttgttccatttactctgtatcagtgaagaaagagatttactgaaagagggaaatcagtatttcattgatacctttcaaaacatacgtaatcccatttctttgattaagacaccgttaggggcagtttacgaaggagactgtccggaagacataaagaaggaactggctgttgcacttcatcatataggcgggctggagcagcacttgatagcgttgatggagttgaaacgactatttggcaattctggtagcctggtagttgcagaacatgaaatcggcgcatttatgaggaagaaagtgtcttttttacagtctcatgtggccgggttacagatgaagctggatttggttccggattttgactatgcaagcgcttggtttgatccgggaaagatatctccggttatcgaccggtttgtattgagtgccatcgagtgttctctgccggaaacgcatctctcgatgcaggtttcgttgaagggagattactgggcaatcaggattaaggatacaggcaacaagcgatttctgaaatgttgcagatggtactcgtcgcggcttcctattctgcgacctctgcatggcaagcagtatggcatgggcggtgtgttttttgacaagttgatgaatatatgtgacgggaaaatactgactttggaaaaggaggctctgcttcgatttcccataagatgttcgtgtgcggtttcgggggggtatacatccttaaatattccggacacttttcaggtgaatgagtcggaaatagctttctatggtttctcgaagaaaaaaaatatggatagacctttagtgatacttgcggataatgacaagggattcagggattatcttgagaaacgtttatcggaatgttttgtagtgaggagctttgatgacggtcaggaagcattggaggtaatatgtgaagagtatccggatttggtgatttgtgatatcatgttgaaaggtatgagcggtgaggaactttcttctaaacttaagacgtcgtgggatacctcctttattccggtgatattgatggggtcgcacattgatgtgaaacggcgggaaaagcgttgttcttctcaggctgatctctttgtatgtaagccctttaatctggaggaccttaaagtggaaatatccatattgataaataatagccgttttcttcggaagacatttcttcagaaagtttttggagaagattttttaacgaaacctatggagcgggctcagcaggatgtcaatctggcatttttgaatgaagtgaagctttacattatggagaatatggataaagaggatttgacagtagatgatattgcctccaggatgtgcatgagccggacaaccttttataataagtggaagttgttgacgggagaagcacccaaatatttgatttcgagaatcaggatggagaaggcacgggaacttttggaaagcggaaaattttctgtgaccgtggttgccgaaatggtgggtatgcgaaatctgaaaaacttcagaggtaggtataaggagtattttggaaaaacaccgaaggagtttatgaaaaaagtatgatatttacctgaaaaaaacttttatggaaaggctgtcacatattagataatggacagcctttgttttgaaataggagataggagaactaaacatcctaagctagctataaagaaaaatctctcatcgttttcgctttggggataactgggtatatatgattagatttatttgccgatgcagcatatttacatcactgattatcagtgaccattcattttaatcggtacaaccacagttttgacaaatgcacagaatgtagggacaaatgcaaaccgctgtatttcatagctttgcatatacgtgttgtaccgcctcttttcagcctttttgtggaatgtccgctatcagatacaaggtgttgagtgatagggcatttccgtaggtgtgttacagaacgcttgttgaatacaaaggtagtggttttcttgggatttctgtggtttgcgtggactttttcttccaaagaggttgatttacagtagaaaaacggttatagagccagaaaacttttgtagatatacactcgattcgcttgaaaaagtgtagagaaatgggttatattcgtttgaaaaagtgtaatgaagttgaattattcgcttgaaaaaatgtaattgcttccgtttgcccacaatggaaaatgtttgtatgtcccaacagaaacacttatatgcttgtaacaactattatatcctatcgggtataattctgcttattgtatcaatattatacccgaaatggtataattaatatatttgacagaactccataatgtcgagcatctaatattggatacatagtttgaacaccaacagattaaagtctcatgaatatcaccggaaacaattattgtcttagtttcgggaaaagatagtgagaatatgccgttatggttcatcttatgttcctgttaatagtgtttatagatagaattaatccttaccatacccctccttctctttccatatcttgatttctttatcaaaatccgaaagaaactccttgtcttgtataaagcgaaatttatcatattcagcgtatgccttttctttcgcttgttcggcagaaatggtgccagcctcattgtatttgtcatactcatatagagtcaggaaatcatccaattgctttttccaatctgccattgtggagatgatttgccgttcggcacgaagttcggccaaatcaaggaatgcggttgatagacgattgaaagctgagacttctttgtcggacaagtaattctgggcgataattgtatccgacttttggactctgccgtcaggagcgtttttccacgtggtaagtcccatgtggggcttttgggcatctgctcttgaatagatgatttcggttgccgtttgatgggaagtagcccaatacatcatatcttgcaccctcttgaagaattgtagggtggtctcagccttaggatcataatcggcactacattcggcatagacatcggtgattttctgataataccgacgttctgaaactcgtatttctcggatacgttctaataggtcgtcaaaataatctttgccaaaatgtttgccctgtttcaagcgttcatcatccaatacaaatccttttatgatcatttcttttagaaccgatgtagcccacatccggaattggcccgcttgataactgcccacacgaaacccaacagcaataaccgcatccaaattgtagaacaatgtatcatcgttcttgccatcaagttcagttgttcgaatttttcgaataactgaactctcctccaattctccgcttttgaatatctctttcagatggttattgatcgtattcgtttcaacaccaaacaaatcggccattcgcttttgcgacatccaaaatgtttcattattgaagatgacctctatacggctttctccttgtttcgtcttgtatagcaatatgttggaagatagactgttgtctattaattcaggagttgatatttcttgtttgaaatattcttttgctatctgtacttgtggcttcttactatcggcattttcagcaatcatcaaacaagcgattcgtgatagatgtatattctccaccttacgaaaggagccggaatttagtttgaccatctcaaacgtagcattaaaatgctcggtagtgttacaacctttcttattggctatggcgatagctttgtttagagtacgattgaatttttggtatgtgccatagcctaatgcggtgcacaactcacgagaagtccaatactctaaacctttattatcttgctttttaatccgttcaaagtcgggttgaatagagggtatattgttctcgtctatcattatttcatgttattggagttatacaccgccaatcctttaatcgtcaacatgtatttctgacgaggatgacggggcttgtctgggtagagcatagaaacaaatccctcttttatggctggattgagagagtattccatgaaattttcacggttctttaaacctacggctgccatcatctctttgactgataatctattgtttgcaagtacctctattaaacggttgatattttcattatctatctgtaatggattatctaagcttgtcggggtacttgtcggggtacttgtcggggcggagatacccatgtcttcgggggcattaaccaccatgaaacgattcctcaattcattgttttctcctatcaatagatttcggaagaatcgttctaaatacacaggctctcttttgatgcctttttgtatgttttgataattggctctaaccaaagcattacggaaataccaagaatgattggcaaaaaggtcgttctcgacattgaatcccatcgagcgtaaatactggatggtgaacactgctgttgttcgggtattgccttctccaaacggatgaatctgccacaacccggatacgaattgggtaatatgagtgacaatttggtctatatataatcctgtataatcaaacgccttttcttgttcaagatcatactctatggctctgcgaatgtcgggagcagatacataaaataccgtatcgccacgaagcacccattcttttttggtgatattgtaatctctgatttgtccggcaaacttgaatactccatcaaatatacgccgatgaatggcggtcaatccggctacggtaaaagcaaatgaacgctcattcaatagtttggttatattggcagaaactttatccgcttcttctgtttcgttatccttttcagtacgaatgtcttttgaatcgtagtaactcttgataagttgttgtacttcatcaatggttatgtctccctcaatatgcttgcgagcagtttcaataagataatccgagggcttcaagccatctaccgcttgaagtcctattgccgtttgccaagcatagcctctttcacgcttttgcggttcgccttgctggatgtattcatcgaaattgaccatcgtaatatcatttcgcatgttttcgtatagcagatactatgctttctgtattccaatgaacaatttcgtcggctctatcatttacaatagcagaaattcgctcttgtcctcttgggattaccccaataattggaactcctttttctatagctttgtcaagctcccatttcatccaatcactatatgaagcatagattccagcgatacctaaaacaatatccgaagccgctattctttctgagattcgctgtcttatgtaatatgtattcattgaatttatagaatctgttggtggaaattctgtaaattcaacattaaagtaccctcttgattcgagaaggtttcttaacgattttaagtcatttacatgtgaccaagaatgactaatgaaaattttatatgttttagccatgtttttatttctttaaaattgattttgttttctcgaaactatctatttgccattgtaagggttgctggtcgtgaaatagtctctcatacttttcagcttcagcatggttgcctaatgcaagataggcattagataaagaagcatatttccaaagcaactcttcggcttctgggtcttcaagagatttcagaattatatcaataatctcagcatatgtgagtttggcttcaactatagaatgtgtctttagttcttctgatatctcatgcaatgattttatatacatacaagttgcatagttttcacctgtataataatctttatattgattccatccttttttatatgaatctatggctgagttaagataacttttatcggatgttatttcccataatcttttatttattgctcctaaaattccaagagtttctgtatctgtttggtttcctattttcgccattattagcatagcatcggtcaacgctctttgtgtagatggtacttcacttttgtaacggcacaacgctcgttgttgaatatagtatttttcattttctgttttagaacacaatttctcccacaattgttctgctttaacaaaatcaccttttgccatattatctttcgccatctcagtcaaagcataaatagaatcttcattatttttcaattctccaatgatactggagatttcttcttctgaaatttccggtttttttatttgatgaatgtaagaataaagtgggctatccgttttaggctcattgatgacactttgaattaaagttcgaagctgcggaatacatttctttgcttctgcttctgaaatttcatttcctaaatgtttgtaacttattattctatcgtgtccaatatcaaacggtattttcccttcatcttctttaatgattattgtagaatatggacgtaatgcatgacgtactcctaattcgtatattgcattagggttaaaagttgatatgtctgcaataacaatgtcagcgtaatataagagtgcatacatacttctatcaattattccagattctacaatctcgtcagcgcgtatgcatttgcatccagcggattctacggcaggacggattatttttttatacgtagcatctaaatcaatagtacggttagtatctggatcctttttcttgccgaatcccattactataaaacataaattcctttccattatttataaattcatttaggtctaacaattacttcacttgctataggatgattacgcttattgaatgcttgttcaatataagcgttaggattacatttgaagtcatcccatttaactaagatgcaaaatcgatcatcttcatcatatgcacattttccgtgattatttaagtaataatttttactaaattctttaatagtagtcgcatcgttaatagctacagtattatgacttttaccacagatagagcatatatgttgtcctttgtatattgaatcatacattgaaggtaatacaactcctaaaattccgtttcgagtattaccttcgctattatacaatgacgcttgtagctctctctttataaatttctgttctttccaccccaaagtctctgcactctgtgccccaatcaagaagattgtaaccgttgaatcagacaaataatcttctctgatttttcgcataatatagtcttcgtcttcagaattaataggggtatttagcgacttgtctatcatgtcaactttttcattggcactccatttttgtatttctcgtttataccaactatcttctgttttaaaagaaatataacatttatgtcccatatgcttatgtttttgcgtacaaaaatacaaaaaagacccgaattatcgaatataattcactacatttgcactataaaatcatattaaagaatgaaactgaatagaataaagactgttttatccgaaaaaggtatttctcaaacgtggttagctaaacagctcaacaagagttttagtatggtcaatgcctatgcctgtaatagaattcagcctaatttggaaaccttgcaacagattgcggagatattacaagttgatttgaaagatttgataaccgataaaaaggaaaggttacaatagtatttaattaggttgggaggatcggagaccttttgcagtttattgcagatgtatctatgaacttccgataatatacaatattaagaacatgactcctgaagaaaaagcaagaataaagatagaccagtggtttactgatgcaggttgggaagttgtcaatagggatgcttatgaacctacttgtacggctgtagctataagagaaggtttattgaaaggaaatcttgaagcagattatttcctttttattaatgggaaagcagtgggcgtgcttgaggctaaacgtgaagaaacggatgcttttgcttcaaaagtatgcgagcaagcggccttatacgcaagaagtgttccgaatatctatcagacataccaaaagccattgccttttatctttacctcgaatggcaaggaactatatttctgcgattttcgtgaaccggattcttatttcaagccgataatggctatccctacgccacatgaattggttaagaaactggggattgaggatacatttgccggacttccaacattgaaaaagaaagggcttcgtgattgtcaatatgaagcggtaacagaacttgaaaagagtttccgtgctgggcaaaatcgagcgttgatggttcttgccaccggtgcgggtaaaacatatacggcttgtcttgctgcctaccgaatgctttcttatacacccatgcgtagagtgttgtttcttgttgaccgaaataatcttggaaaacaagccgagggagaattcggaacttttcgtctgacagagaacggggatgctttcaatactatctttacggtcaatcgtcttcgctcgtcttctatcccttctgatagcaatgtcgttatttctacaatacaacgtctattctcattcttgaaaggagaaactattgaggataacgataacgatgatgagaacgaaccagcagaggaggtaaccttgcctcctaatcccaacttaccgcacgattactttgatatgattatcatagacgagtgccatcgctccatttatgggaactggcgcaaggtgttggagtatttcgatacggctcgacttgtcggtttgacagcaaccccgattgaagagacaaagaaattctttaactataatatcattgtcaattataccttagaaaagagtatcgttgatggtgtgaatgtggattgtagggtgtatcgaataaaaacgcaagttacggaaactgggggagctatattagagggtgagagagtaaaggaagaaacgagatatacgggtgaggttaagactgtgagaaacaaggaaaccaaaacctacaccaataaagaacttaatcggagtgtcattaatccggcacagataaagttaatcctttcaacctattgggatgtggtttatacagaattgtttaatgacccgcaacgtgagccgaatatggactatttacctaaaaccttgatatttgctctcaatgaagctcacgccacaaatatcgtacagatagctaaagaggtgttcggacggactgacgaccgctttgttcagaaaatcacttattcagcaggcgatagtaacgaactgatacgccaattccgtaatgacaaggatttccgtattgctgtcacctgtacgttggttgccaccggaacagatgtaaagccactggaagtggtaatgttcatgcgtgatgtggagtcattgcctttgtatattcagatgaaagggcgtggagtgcgtactattggtgatgagcaacttcgcaatgttaccccgaacgcattcagcaaggattgtttttatttggttgatgcggtaggcgtgacagaacatgcgcaaacagtggcacctatagacgacggtcctacaacaaagacaattacgttgaaggagctgttagaacgtattagtcatggctatattcctgatgaataccttaaacggcttgcggcaacgcttgcacgaatatacaataaagcggatgattcgcaacggaaagagtttgtccgtctgtctcatgatgacatgaaggagctttctgccagaatatacgatgcactggagaaaggcattcttccacagtttgtaagcactgatgagcctaacaatgaacgtaaggggctagtcgctccgcttgccaatcatgcggatgcccggaaataccttctgatacttgcagccggattcgtcaatacattgatgccgggtgaagatacgcttatctccaaagggttttccattgaggaagcaaaaaatacgacagaggcttttgaagatttttgtaaaaaatactatgacgaaatagaggcactgcgcatcatttacaacaatgagggagagcctataacctattcgatgctaaaggatttggagaacagactcaaaatggcaaacaatcattttacatccaaacaactctggaactcttatgccatagttaatcctaaagtagtaaggcgttccactaccaaagaagaaagcgatgcattgaccaatatcatacaacttgtacgctttgctttccaccaaatcgaacgattggatagtgtagttactacctctaaacagtttttcaatctttggttaggacaaaaccagcgtgaaataacagacaaacagcgagaggttatcagttgtattgtggattatattgcttctaatggagcttgtacggtcagggatattcgtgaagatgatgctacccatgcagcccaaatgattagagcgtttggtaatatgcagaaggcagacgaggcacttcattcactttacacatttgtagttttaagaaaagcagcataaagaaatggcaacaaataatacaacagagcaatcgctcaccaaaaaagtatggaatctggcaaccactcttgccggacaaggcattggattcactgattatattacccaactgacctatcttttattcttgaagatggatgtcgaaaatgtagaaatgtttggagaagagtcggctattccaactggttatcagtgggcagatttgatagcacttgatggtctggatttggtaaaacaatatgaagagacccttaaattgcttagcgagcaggataatctgataggtacaatttatacgaaggcacaaaacaagatagacaaacctgtttatctaaaaaaagttatcaccatgattgatgaggagcaatggctcattatggacggtgatgtgaaaggtgctatctacgaaagtattcttgaaaagaatgggcaagacaagaaaagcggtgcaggacagtattttactcctcgtccacttattcaggcaatggtagattgtatcaatccgcaaatgggtgaaacggtttgtgacccggcttgtggaacgggtggattcttgcttacagcttacgattatatgaaaggtcagtcagcaagtaaagaaaaacgtgatttcttgcgtgacaaagctttgcatggtgtggataatacgcctttagtggtgacgctcgcttccatgaatctttatttgcatggtatcggtacagaccgtagtccgattgtttgtgaggattctttggaaaaagaaccgtcaactcttgttgatgtgatacttgccaatcctccttttggaactcgtccggctggttctgtggacatcaaccgcccggatttctatgtagaaaccaagaataaccagttaaactttctccagcacatgatgcttatgctcaaaaccggaggacgtgctgctgtggtgcttcccgacaatgtcctttttgaggcaggggcaggtgaaactattcgcaaacgcttattgcaagatttcaatctacatactatcttgcgcttgcctacaggtattttctatgcgcaaggcgtaaaagccaacgtgttgtttttcagcaaaggacacccaaccaaagaaatatggttttacgattaccgtacagacataaagcatacgcttgccaccaacaaactggaacggcatcatttggatgattttgtttcttgctacaataatcgagtagagacctacgatgccgagaataatccgcaaggtcgttggcgtaaataccctgtagatgaaattattgccagagacaaaacaagtcttgacattacttggataaaacaaggtggtgaggtggacgaccgttcattggcagaactgatggcagacatcaaggataagagccagaccatcagtagagcggtgactgaacttgaaaaactgcttgcaaatattgaagaaaattgagctatgcgaaaagatattagcacaaatgataaagatataaacgatctgttcttaaaggttgttgaccttgtcacgcaggcaagggaacgtgtggcaacagccgtcaatattgctgaggtctatactaagttccatattggacaatatatagtagaatatgagcaaaagggagagacaagagccgaatacggaaaggctgtactgaaagaactctctaaacgtctgactgataggctgggagatggatggtcgtattcaacgcttaagaatatacggcagttttatattgtcttttctaaagggctaaccagtggttgtccaaagtcgagccaaaaggctaaccagtggttagccgattatccgaaggcagaggaacatctttctgaaacgacattcgctctctcatggtctcattatcttatactgatgagggtggaaaatccggatgcccgcagcttctatgaaatagaatgtacccaacaacaatggtctaaaaggcaactcagccgtcaagtaggaagctgtctttatgagagattggctttgagtcgtaacaaagatgaagtaatgcggttggcgaaagaaggacaaactattgggaaaccatcggacatcatcaagaatcccatcacattagagtttcttggtctaaaacccgatgcagtttactcagagtctaaattggagaatgccattatcaacaagatgcagcaattcctattagaacttggcaaagggttcctctttgaagcaaggcagaaaaggttcacatttgatgagcaacatttctttgttgacttggtgttttacaatcgtttgttacaatgctatgtgcttatagatttgaaaatagacaaacttactcaccaagaccttggacagatgcagatgtatgtcaactattacgaccgctatgtcaaacaagactttgaaaagccgacaattggcattctgttgtgccgggagaagaacgatgcacttgtggaactcaccttgcctaaagatactaacatctatgcttctgcttatcaactctatctccccaacaaggctttattgcaagccaaggtgaaggaatggattgaagagtttgaagaaaatgaggaattaaagaaactggaagaaaatgaatagtaattgtgcagtttttggctgcacaattacaaacagatatacaacaatggatacaaaagcgttacgtcaaaagatactcgaccttgcgatacatggaaaacttgtaccgcaagaccctaacgatgaacctgcatcagttctgctcgaacgaatcaaggctgaaaaagaacgactgataaaagaaggaaaaatcaagcggagcaagaagtctgcaaagacttctgatacgccccattatgagaacgtgccgtttgaagtgccgagttcatgggtgtggtgcaggttagatgatattgttagttttcaaggtggttatgcctataaaagtaatacatatgttaatcaatctgattggcaagttataagaattgggaatgtcaagaatgacaatctgatacttgatatacagcccgtgtttgttgaagatgtaatcggtaagacaacagaaaaatacttgttgaaaaaggacgatattctattcacgatgacagggacaaaagggaaacgagattacttctacacggcaaaagtcccatcaattaaaaagaatttacttctgaatcaacgtgttggttgtcttagatgtttttcttcagaaatcaatatagatttcttatgtcttgtattgaaaggagaatatgtgttagatgcgatattttccacagaaacaggaaatgttagtcaaggtaacattggttcagaaagtaccttgaatttgaatattgccatacctccccttacagaacaacatcgtattgtagtagaaatagagaaatggtttgctttaattgaccaaatagaacaaggtaaatcagatttgcaaagcactatcaagcaaacaaaaagcaaaattcttgaccttgccattcacggcaaactcgtaccgcaagatccgaatgatgaaccggcaagcgaacttttgaagcgtataaatcccaattttacaccttgtgataacgggcattatacgaacttaccgaaaggatgggctatatgcaagttatctgatttgtgtagaattgagaatggctttgctttcagcagcaatgattataagtcacaaggaataccattagttcgtatatcgaatatcactcataatactatagatataactgactgtgtttatgttgagggcattacggacaataaatttaagatttcgaaaggagatttgctgattgccatgtctggagcaacaacaggaaaaatgggagtatatttgtttgatgaaatagcatacctaaatcaacgtgtaggaaatatcaaaatcttaaacaagtcctcattgtttcccgattatcgaaatatttatatgcaatcgaaagttgatgaaatactaaaaattgcatatggaggagcacagcctaatatcagtgcttctgttattggtaattttgattttcccttaccaccatataaagaacagatacgaattgtagagactgttcaaagaatttttgaccaattagatactatcacggagagcctataaactctccgtgatcaaatccagttgtttaaacgcaatatttattgccattacaatcctttgttgttccttgtaagatggaataggaacttctattgctttgaataatttcttattcaagtggggaatggcagaaccaaccttgctttctcgcaagactttcctatgcaagttgataatttgtagtacatattcttcgttcatattttcgttgataagtaactgtttgaaagtactaccttgataaccgtcaatcggagtcctaaatacctcaccagagttctcgccatctactaaaatcaaaagtgaatttgcagtaacatactttccagaagtcaaagtcttggcatcacgctcacctcgcaaatatttgacatcaagatttgttcgttctatgccattttgcttatcaccatcaaccaaagagcatagtacttgcatcggtgcaacagtccatccttcgggcaactgcgtataatgcccgatacgtacctttatattattaccatattcattctaattcaatgtagtatggtaacaaaattcaaaaatcaattggcaaagagtaatttggccaaaaacacagtctcctcttatgtgtggacggtgcagtatttcctcaatcattatggagaagtgaacaagaaaaatcttttggcatacaaggggtatttggtggagaacttcaaaccgcagacagtgaacctgcgcttacaaggaatcaacaagttcctagagtttataaaacaggagaaactaaaagtgaagttcgtaaaagtacagcaaaagaactttttggaaaatgtaatcagcgatgccgattacaaatttctcaaagcccaacttaaagccgatggttacgatgaatggtattttatcgtgtggtttatggctgctacaggcgcacgtgttagtgaattgctccacattaaagcggaacatatcaaggtgggttatctcgacctgtatagtaaaggtggaaagattcgacggctatacatcccaaagaacctacgaacagaagccgataaatggttgaagaatcaaggcctgacatctggctatatcttcctgaaccgtttcgggcagcgcattactactcgtggaattgcttcccaactcaagcattttgccgaaaaatacggaatgaacaaggaagtagtttatcctcattcattccgtcatcgttttgctaaaaacttcctcgaccgctttaatgaccttgctctactagccgaccttatggggcatgagagtatagaaaccactcgaatctatcttcgtagaactgctagcgaacagcagaagattgtggataaggtcgtaaactggtaaagccgcattagcccttagaagtgtattgatttacacttctaaggctttttgaatattatcaagaacagagaatagtttttttatcttttgaacaatgcgttgttgctcggcaagaggaggtagtggtatttcaattttatgcaaagcattagaagatagtccaagtaatcctatacctttccctcctatcaaattgttctcttttaaatacgccaatgtatagtagtaaaatggtacacataaatcaatctttggacgaagtctatgaatgtgattttgaatgcaaatatcgtaatcatagttccaaattgcagagcgtccaatatcgccgccttcacacacaagtaaatccccctttgttacagtgcatttatctaattcactctctttgaaagacatttgctttatcactgtaaaatcaaacttattccaatacacatttgaagtagtcaaataatctttcattacaccgtccctgttgactgaattaagggctttacctgtattatgattaaaaagttcccctaaaattgtttgttgccatcctgcgggataatgcccgttatcacaaggtgtaaagccgggatttatacgtttcaagagttcaatggctggttcatcattcggatcttgcgatacgagttttccatgaatggcaaggtcaagaattttgtttttggtttgcttgataatgttttgcaaatcatttttcccattctcgataatatcaattaacgagaaccatctttctatttcagctacaatacgctgttgctctagaaatggaggtaaagggatataggtctttactattatttcttttgaaatgttcggttgggctccgccaccaccttttgcgatgaatgctgttctttgagacaaaaggaaataaaacaaaaacattgggtcgatagcatcgtattcaatacaagcacaacatgcttggtttgttgttgccgggaatgtaagaatacccagtttgccaatcgtcgctccatacattgcaattaaaacacttcctacaggatttaattttgcagaagaattcacgactgcttcttctgtaataaattcaggaatatgagtaatatatccatcgtttaagtctccagttttaagccaaggtatattcccaccataatatgatttatttgaacggctaggtgttccgcctgattgccaagtaccgataactcccaaagttgtccacatccatccctccggcacttcaaacggcacgttctcataatggggcgtatcggaaagagaaaaggagaggaaaaatcccctccttaacttaaagaccatgtatcagatatttaaatctttcagtgctagtgcataattgggacaaaaaccgtccattatacactttaaaccaagtgtctgatagtacttgtggtcatcatcttcggtacataggtatttgtaaccatagcgtggcatgtactccttgaagaaccgagccaagtctttcaggctttcttcttggttctttttgaaattactgcgcacaatgatgatagaccagtcgggaaagttgcctcttccacagctatactcccagaagcggatatagcagtctaaatcacgttcacgaatgtccacacaaaagccgttggcatgggacatcacgctacagctttctctgtagccaaatttctcacacaagtagagattgaaatcaagaattaaatctttttgtaccataaataattgggttttaaaaattaataaatagagaattataaatgaaagcctcgcttacgcttagcctttttctttttcattaggcgattgaactctgcttcttctgcggcagtggcatcgtaggatgagctaccgtttagcaaaccgagactgatgccaaagctatcatcggaatgggaaacgctttgctgtacctcttctttttgttgtttggattcctgtttggcagactccaacaaagatgcacaagcattctcttccagtcggttgtcgatattcaagtagctgaactctcgacctacttttgagccggagaaagaaaagccgttatgttcaaacttgacaccttgtatttcccgtgtagtccggctgactttgaatttcatatcaatctcccggtcggcaagcgcatctttcaaattatcccaactatgagctgtgggcagttcttctttcaatgccttgtatatctcgtgctttgccttatcgtatgggcgcaagcgttcctctttgatatggtctttaccattggcaaagtgcaagcgatatttggcggtcaacattttgcaaactttctcattcctgcgaaaatcattcttgtcgctaatcgtcttgccatcattgtccactcggttgaaaacgatatggcaatgcggatgctcacggtcgatatgccgggcaatgatgtattgcgtattttcgatgcccatcagtttcatatagtcgtgggcgatttgcaacatcaacgcatcatcagacttcaagcattcgccatcttcaggagagaagttgagcgaggtgtgtccgacaatattctttaccttgtcgttgagcaacgcctgtaattcaaattgctccgccatctgttcgggtgagccattcactccgacagcttccagcaatttggatttctcctctttgaggacatagcggacacagccactgaacgatgtccctttggtctgcttacctatcatctttcagttgctttatgagttggttaatacgctgcgccatctcctcgcatctttcggcaacagcaaagaatccgtaggtgtttgcctgcttcgccaattggttaagattggtgctttcacctatcaactgacggatgatgtggatatgctctttcgtgattcgttcacgtactgttccgctctcaatgagcgaacggatgactgcgctttgggtctgcttgctccgtctgcaaagcgcaccgagccatgcgaattggtcgtatgacagacggagagttatcgtatatttcttttccatttggaattgcttttagtgaataatttgtgaccatcgggagctgcctcctcagactttttgaggagcaagtggtcgggaaatgtaatacaccgacattaacttgctacagtaaaaaagtctcgattcctcttccggtattcaaagtctgaatcctcgtttcttaggctgtgaaactttcggcagcggagtgtctttttgtatgctgatgagcttcagatcgaatatatctatcagtgttttcaagactggatttctctttatcatctgttgcaggatagcttcgtcgggcttcactttgagcagataatcggctatgtcgtacccctcttttcgctcgttttcggtggcattggtttccatataatcgaacattcgtacctcaatcccgtagcttttcatcagaccgattttgctctgccaatagtcggtcgcccccaaatcggggaataacacaacgcttcttcctaccagaacggataggctgttggcattgaagcaaccgttctttccacctgatgctatccatagaaactgcggcagatagtaggaagcaatgagtgccgttttctcgctttcgaccagtgcgacaggacggcttttgtcttcaggaagcagatgctcaccgaagaagcattgcttcaaattgtaatcacctttgtgtaatacggagtgcacccacgtaacatgattgtatggttcttttatccgcttacctgtttcggaattgtaaagcattatcttacctgtacggattttattctgattgtccgtttgccagaatacggttgcaccgtcccaatacttggaagtaccaaccttgtatcttttcatgagttccaatgtctccgtctctccgaactgagccgatagaaattgaaacaacttgtttgcagaatagccacgcaatgattggttgactatatccaaatcaatgtaggaagtagctattggttgtgcttccttaataggggcatagttcctgaaactattctccttctccgcaaacttttctttctcagacgggttctgctcaaagtaatcacgaggcgtgaagtgataaccgcatttctgctcatggtcacaacgccccacgtactcagggaactggatttgcttctccgtatcaatgtacttggaaaaacatctttggtggtggcagttcgggcaagtgtgtcgagtgctgacacctttgtagggttctaatatgaatctatgtgtactcattgtatgtttctttttgggtgtgtcacttttgtcgttattgtcgttttcgctggaaaagtgtcaaaaccgacaaaaatgtcacgggttaatctttgaatattctccatgcttctctttgcggaacaatgtcccgatgttgtcattgagaaagcgttgaaatgtgcgctccttcattccattttgctcggctatctgtatagcttgggcagttgtaaaggatggaggaagtagattgactatcgcctgttgttggctgttgagcatgttctcattgagtatattttgaacgctcaatgcggattccttgaaatactccgtcagtttaatggctcgttctaccgtcaacaggtcgatatatgttttaccacactctccgcaggtccatcgcgctaattggataatcaggcagaaacggatgatgtatatctccagcttgcaatagatactcacaatggtgtcatttgtctcttggtcgcacaattctgagaagtggtgctgccattcgtaaagccgtctcttggcatcctccgtgaaaagaagaatctgcggttctatctctccaaactcattgagggcatactcttgttgtatcagtttgtcaataatggcattccattcttgttcgatgttctccggtagttccttgtcattccaacgagccttctgttgcagattgggcatcacaaacagaatgcggtcgatgaatccgttactggaacgttcacctttagccaactcactgagaatcttcttttgaatagtaccaataactgagatatacggtcgcttgatgaagatggaactcttggcatttttgcggtcggatatagtggtcttggcactgaacaccgacagccagaactgttcttccgaaccgttgttataacggttgaagttcttgaaccaagcggataactcgtcagcccacaagcataaaccacgtttgttttgcgcatggataaggctcaaaccttcaggcgttacatccgaaattaagaagcgtttacgaactggctcctgaggaaattgttcttcaccgctttccgctcgttctttgcggctcatactcatcagttcatcatacttggcaagagccttttcaaagacttgattctgctgatagtcgtaatcaagaaacggtttcatcgcaaagctgagcggatgacttttgtttgctcccggtcttcctatcaatgccatatacaggatagggctttctatccagccttgcttgatttgggcaagatgcgtgttaccgatgccaactgcaatcgctgcaaaaattgcagaggcaatgtagtcagtcgggtagttatggcattcgtgaacctcactgatgatgcgttggatttttgtcgggaatatgctgacaggaaaatcagtgccagccaatcgcatacttaaatcaaccgcttcgtcaatgatggatgccggattaatagaggatgtatccatagttctactcattaaaacttcatggatgatttggacttatgacggacaccgccttgcatatttgccagcatctcctcgtaagtctgttctgcactctttctacgcccgttctcaatccaagaaagaagttcgtcttcatagaaatagagtttcttacctttcttataggcaggaagcagtcctttgcgtaccaatgtataaatggtaggcttggcttttcggatgatacggcaagcatcctctatttctaccaacacatgtttgtcagatggctgtggctggagttccgctaccatctttttcaactcgatgacctgttcggtcagataacctaccgcttcgggcagcttatcaaatgttactgtttctttttgcatacgccaatcgtttttaattgttcgacggcaaaggaaacaggtgtttcaatggtggaatcattcaccaaaatataactgatgaataactttttgatggtaataagtgatgattacgagtaatttaagtacctttgtgtcatgaaataccagtggttattgaagctataaaacaaatttgtcgtttatgataccgcaatttgaagaaatacggatacaggcattgaaagaattaagtgccgggatagttatgagagctaaagatttacgcattcctttggctaagcattttggattgaccgatgaggaaatgaatgcttggtatccttctggtaatggcgaaatattcttagaccgtatttcgtgggctttatcgtatctttttattgcaggtcttgtagaaaagccccaaagaggtgattataaaatcagcgaaaagggactgtctatgctttcttcatgcacggagaaacaaataaatgagttcatcaaagtaacagtgaatgcgaaaactccgaagaaaagttctaaaaataaggatgctaacaacacttcttcccatttgggaaatgatgatgaacgtacaccggaagaagaattagctgattcttatgataggataaagcagaatgtgcaatctcaaattctgacaactatattaagtaaaaagccacaagaatttgaacggttagttgtgaaattacttcaagcaatggggtatggtggcgaggtcaaaaactcaggtgttgtaacgaaactatctaatgatggtggtatagatggtatcattaaagaagatattttaggatttaatcatatatccatacaggcaaagcgatatgctttagataataatgttcagcgtcatgaggttcagagctttgtaggagctgttgcaggaacaccatccaagaaaggtgtattcatcaccacctctgattattctaaaggtgcgatggaatatgtggaaagccttaacggttcaccaactattatcctgataaatggtcagcaattaacagaatatatttatgactatggcttgggattgcaaacagagaaagtccttaaagtcatgaaaatggatatggactactgggatgcaatggacaatgcctaatggtattgcgttatgcaatttttctatctaatttaatcttgcattctgattctgtatgcgacattttacgttcaatagtagatatttccgaatcacggagggtatgggtaaataccctctttataaaagtggcggtctgtaagcgtggcttactgaatgccttgccgatattccatccaaagtgcatgatgtcaatggtctttaactgagaatcgacctttattggttcaactttaggcagagtatctaacaagtaatattctgccacatatccacacaagcgattaagtgccgtttcatcaagataggaaaccaaagtttgttttgtgtatgcgataaccttattgagtttttcttgtgaggcacgttctttctctgccatagcgtttgcacgaagagtctcgtattctgatggctggtcggattcttcgatagatgtgttgttggtagaaggcgtggtttcctcctttggaagttctgccacatcttcgttgggttcgtaatatgatagagtagaaacttcttctgttatgtcagatgtagtttcgatttcaatttcgggttcaggttcagaaatgataggttttgaatttatagaacttccggcaagttccgagtttgctgctggagcttctacgactacagccttgttgcgatagcattcaaatctcataaagcacttctctattgtaggtgaaaggagttgtctgaataccatttgcagattgagatagatagctcccatgataatggagcttaccactaaaatgaggtagctgctgaactcatcccaaccatagtgtagcacggtctggcgggctaaaacaccaatgattgcgattgtaccaaaaacaatcagatgcaatgttatatgttctatctttttctgctccatagtggtatgtattaatcgtttgtgtgcaaatatataggattaatttttgaaaaaatccatagttttgcctgttaatgggcttttgacgatatatttcatcacttttcaccacgttacactcttaataataagcgcattgcaaatttcttgtttttggatgaaaatagttgggtaaataggcttgtgtatcttaaaaacaaaaattatctgcatcatttaatgtaaacaatgcagataatcaatagggtatagagatattgcttattagcaatacaatgtatggtttgtatccttgttgaaatataacaagaggttgtaatcttgtttacgagcgactttgtttattagctatttcctaaatgctgcggaatgcccggtgtctatctgataggatagggctataaccatatcgagattatacacatcggcattgttcccattctccaatttgatgtacttacaaacttcgtggctcctcaaaacattagctttcaggattctcttaattgctgcatggatagtccaagcagttgtataaaacaagtctgcaagctcccaagcggtcatccatatttcaccatcggaaatatggatgctttgttcgttgtttgttatgattcctcgtttcatagttatatctatttgagtgatattttattggctgtttctcgtttcttggaattgaccaaatcggcataaatctgagttgtggacacattcttatgcgttagcatctttgataccgtgtaaatatctgtacctaaggatatttgtatgacggcgtagctgtgcctgaagcaatggaagcttatcggtttcgttattcctgcttttttgagccagcttttcagcggataattaatcatgctccgtttcaaatccttgaatactttgcctgttccgggtgttccgcatagttcgtaggcttcgtaactgatggggagtgtcgcttccgtttgtgttttctgtgtcctgatgcgcaagcaataaccttggtcgggagcgatagtgaaatcttcccattgcagattgagaatgtcactgatacgtaagcctgtcagacaagcgaatagagaagcagctttcagaacaggaatgtcgcaaggtgtggcagcgagttgcttcacttcgtccagcgtcagatactctttcttcacatcttgtggctctattttatcaagatagtcattgatgttttctcgaaaccatttgtctcgataggcaatctttaacaatcctctgaatgtagagtagtagccggatgccgaattgagggaaatgtggcggttgctgtgtttgagttgcttggcgttcagcaagtactcacggaacttcttgcataaatccacattcacatcgccaaaggtacattgtcccttgacgaagttgtagaaatgctgatagacaaactgccatttctggtctttattccggcacattttcttgaagtaggcgaggaagtcggctttctgtttggtcttatccaagaagccaaactcttcattgatgagcgattgtacccggatgcagcggatagcctctgccttgttcaacatatcgttgttgaactcccgttccatttcgttcttcggatgggcatagatgtagatgccgaggtattccctgcggctcatctgcatcgtttcggggttacggactgccggataataatccagatacaaggagatgcgattattccgaatcgctctctgacgaactgttacttttgtacatgtgtgtgacatactgtttgatatttagaattttacatttgtttggtgcaaaggaataaggtgattcaatggtgggtatattcaccaagaaataacttattcaatctttggggctgcaagcaacttatctaattcgggcttggagataaacgtgtatttgcctttcttgaccttggggatattatggtacttcgcatagtgatagagttggtcacgagtgaggttgaacttctccatcgcttcggctaccgtataatattgcggttcttctggtatggcaattcccttggctatatctacgtgcttcttggaatagtacaccatgatgccctctttcttcttggggatggcattcttggaaacgaaacaatagatggcagatagggtcatgccgaacttctcctgcatttcttgggagctgtaccattcggtaatgtctggattcggggctttcttggcaaagtaagcgtcaatatgtttcttgctccagtaggtcttaccacgattgaaagttcgggggatgttgttcttcttggctaccacaaatatccatgactcgtttacatgatatttctctttgacttctgcggtggtgtagaagtcggtgataggggctttctcaatgggtactctctttttgtattccgctgcattttcaaacagaagctctatatcttttcttctgactaatgtcttacctttgaattgaactacttttatgatgttatctgccatatagcgataaatactggctcgactaatccttaagagttttgctgcttcaggtggggtatagaattccttgtcctcaatagatggtttttccgtctttattgagaactctttttgataagtcgctatacgctcttgcctaatccgttctttataggctgcattgttgcacctatgagaacaatagttcgtagtcgttttgcgagctatgaaaatttgcccacaccatttgcatttcttcttgatttcgatgttgctgctcattcttttctccgtttatttctccaattttgtttcagtgcgtctcaccacgtctcactgtgtctcaaatctctactaccttgctggtgagaaacaaggctttaacaagcgagcaacaaatgcggtacaaaaatgagctgaataagccctataaacgataactatcgcttataaggctaaaaagaaaggcgctcaaaatgaacgccttgataatcgttgatgatatatgctaatcgttggtaatcaccacttacttgccgatgcaaaaatgttcgaaaatattcccaagtaccatatcgttcgtaacttcccccgcaatatcgcttagatggaaaatgcattcgcggatatcttgtgaaacaaaatctccggatagattttctgctatcccttgttggacccggtggatggcttccaaggcatgggtcaaagcctcgtagtggcgtatattcgtgacaatgacatcgttttgggtaaccgtgggcaggttagcggcagagattagcatttgctgaagcttgtcgaggttggtacgccctttggcagagatggagatgcattgcacattagtagcggccagggtgaaactgggggtgaggatggttgaggcatcctgcaccagatcggccttgttgaatacgagaatgagccgtttcccttcgcaacggggaagtatctgggtagttagttgtggtatccgtgagacggcattcgtggcatcaactatccagagcacgatttccgcctgctccaatttctggaaggttcgctcaattcctaggttctcgatggtgtcgttcgttttgcgtatacctgccgtatcaataaatcggaaagttatcccaccaagattgactgtgtcttctatcacatcgcgggttgtcccgtgtatgtcgcttacaatggctcgttcctcgtttagtagtgcattcaacagggtggatttaccagcgttcgtttcgccgatgatggctacgggcacgccgttcttgatggcattgcctacactgaaggattgtactaaacgggaaattacctgctctatgccgtctgctaggagacatagctcggagcggtctgcaaattccagttcttcgtggtcgctgaagtccagctccagttctatgagtgatgtgaagtgcagcaattggtcgcgtagtgaggccagctctttactgaacccaccgcgcatttggctcatggcgaggcggtgagtggcggcagaggtggaggcgatgaggtcggccacggcttcggcctggcttaggtccattttgccgcccaagaaggcccgttgcgtgtactcaccgggagcggccaggcggcaaccattaccgatgagcagttgcaacaccttctgaagaatatagctcgaaccgtggcacatgatttccgtgctatcctcgcccgtgtacgagtggggggcacggaataagcttacaagtacttcgtctatgatgttttcttcttcatggatatgaccgaaggtaagtgtgtatggcttggcatccttcagcttcttccccttccgggcaggggtaaatatgcgggatgttatctctatggcatccggtccggagacacggatgcatcctatggctcccccttgggcggtggctatggcacaaatggtatcttggttcattttatccggcttatttttattcagcaaagataatggtttctttacaaaaaagagagatggtgattcaacttatgggcttttatcgtaactttgtgcaaatcgataatggatagatgcttataaagcctaatccgcctctgtgcccattgtgggtatagcaggacattgctacactatacagaccagcaacgggcacgtcaggcaggatgtgatgaagtcattactaaaccttactcctaggattggctgaaggaaagggaggagcatttcttgaaggatacttagatacggtcgagtactgttttgataagagtatctattgtatttttgtatcccgtgttcgcttcttttatcaggcggttggcaatgaccatgcataccgtcatggccttgtgtcccatcagacggctcaagcctgccaaggcagaactttccatctcgaagttggtgatatggtagccgttgtattcaaatttttcaatcttctcgttctgatgcgggtcggcaagcggcacgcgtaactcgcgtccttgaggtccgaagaagcccccggcggcaatcgttacgccacgtaccatgtcgttttgtgcgatgcggtctatcagttcagtgcttgcatcaatgacgtagggggcaggggcacacatgttgccggaccatcccatatggtttaggaaggcacgctccatgggcaggtcgcacacggagttgcgtccggcatagaagttgagcagcccatcgaaaccaatggacttttcagaacatacgaatgtgcctaccggagtgtagggttgcaagccgccgcaggtgccgatacgtaccagttcaaggctacgcagacggggcttttcttcgcgcgtctcgaaatcgatgtttgccagggcatccagttcgttcatcacgatatcgatgttgtcacatccgataccggtggaaaccaccgtaatacgtttcccctggtaagtaccggtgatagtcttgaactcgcggctttccacttcacattccttgttctcgaaatgggaggcaaccagtgccacccgtccggggtcgcctaccaagatgactttgtctgccagccattcgggctttacgtgaagatgaaatacagaaccgtcttcattgatgatcagttcggaagaggcgaaatatttcttcatatgcttgaggctttaatcttttgtttataaatagaaacgccgggaaccgattcttgttcaccggttccggcgtttctgtcagttacttttcgagttatttgctcaacggctggctggtattgcccgtcgtcggtttggcaatgttttcgcgcatggaagtgtcggcttctatattcttcatccggtaatagtccatgatacccagattgccgttgcggaatgcttcggccatggccttgggtacttccgcttctgcctcgataactttggcacgggcttcctgggcctttgccttcatttcctgctctgtggctacggccatggcgcggcgttcctctgccttggcttgagcaatgttcttgtcggcattggcttggtctatctgcagggcggcaccgatattcttacctatgtcaatatcagcaatgtcaatggacagaatttcgaatgctgttcctgcatccaaccccttgcgcaataccagtttggagatagaatctggattctccaataccgatttatgattctctgacgaaccgatggaggagacaataccttcgcctacacgggccagaatcgtgtcttctccggcacctcccaccaattggcggatattggcgcgcaccgttacacgggccttggcaatcaactggataccgtctttggcaacagccgtcacgggaggggtatcgattactttggggttaacggacatctgtacggcttcgaacacgtcacggccggcaaggtcgatggcggttgccatctggaacggcagctcgatattggctttagaggcggataccagtgcgtgtaccactcgctctacatgacctccggcaaggtagtgcgcttccagttcgtcgcgcgtgatgttttgcaatcctgctttatgagcttcaatcatgccgggcacaatgatataaggaggaacattacggatgcgcatcaggaaaagttgtaccagcgagatgtttactcccgatactttggcggacagccacaagaagaacggtacataatggaagaaaagtaccaggaagataatgcctcctataatgaggaaggcggttaaatacattgtgcttggatccatgagattaaatattaattgttagttataaataataggttgatttctgaaatttcactgcttgagccgttccactaagaggactccgtcggcaatacgctctacgataatcggagtcttttcgttcatgaagccatctgatgacttcacttccacgatgtctccgttgatttcggcatagccgataagagccaggcgagtagtggttacgcctacatcgcctaccttgactttgtcctcggcactacggtctactttggaggtgatgttttttttcaatgcaattttgtcgagtgtcttggagcgcatgaaccataccaacgagccgatacaagccagggcagatatgataagcgtaatgacacctgccgtggtgcccatataggcaaaggcatagtagttggcaaagatgatgcaacctcctgccagaaaaccggcaacgctgatgcccggaattacgaataattccactaagaacaagattactgctcctataatcaatgaggcgataatgagtatatccatagttgtctttatttggtggcttgtttttccaggttgcgcacttgaatggcagtttgctccatctcagtggacaattgccgtacacgttgctccaggtcgaggatggcggcggacatcttgtccttttcctgcttgttggctcgggagtattccgaacgcatatcttccagtttctcctgcagttgtttgtagctctgctccagctgattgtatttgccatacgaggctttggcctgcggggagcggaaatcgtccagctggtagtaggtggagtggtcgtcaatgatgaattggaaatcatgcttcttggtggtctgcggctttgcgttggcagcggtccgaagcctttctcgggcgccctttaccgcatcggtgtccgtccatgtgtccttgatagagtgaagttgcgccaatgatatcatcttgtccgggtccatcccttcgtagttgtacacttgcttggatgagttgggaatgaatacatagatacacactttgccttcgggctggtagcggtcggaggcaaaccatcccaagtcgttgaattcgtcgatgacgtacatatagtcgttgtagggcgaattgaacggcatgcccacattttccggcatcagataggagtcggtattcgtattgtaacgggtgacgaaaatgtcatatcctcccatcgagccagggccatccgaagcatagtagatagtgataccgtccgtaagtacatagggatagtctgcattcatggcctcattgatgcttccgggcaacaagctgccatcactccatttgtccagcaacttgttgcgcgaaaggatactgagggtgctgtccggttgcatttcgctataatatagtttattgcccagctccgtttcgtataccgttccgccttccttaccggaatcattgaagtaggtgtcgtacatgaacagcttgcccgattcggggctgattttgtatgcatccaggaatttttccttgtctaccacaaagctgtcgatgaagcagacctcttccacgcctttcagcatgcgcaagttggatttgcttttttccaataattgttcggcctcttcggtggagcgttttctctttctcaggtcggaaatgtaggtctcataagtctcgatggcatcttcgaactgatataaatcattgtatgcccgggccaaatagagttgcccgctggggacgcgtctcttgacggcgctttccaggtgtttcaaggcttctgcgggttcgccggtttccaggcaacatacaccgtaccataggttgtaatttccattgccaggttgtgtcttgacgagttttttgaaggcgggcttggcttcttcgtattctcccttctcgtacaaggctttggcttctgccaggctttgtgcggaaattgttatgctcaaaaggccgaatagaaagaaaaggatatattttttattcatattgatacatgctgatttgttcagaaggtcaaaaatacaaatttatcgtgaataaagctggtttccgtaattctattttgttaattcttctttaaatcgttcttttgccttacttttgcagccggaagagctataacttataactcataactcgtatcaatggcacaatttactgaagaagaaaagatgttgcgccgcatagacaagcggtttagcaaaggtgtggtggaatatggactgatagaggacggcgataagattcttatcgggctttcgggaggcaaggactctttggcgctggtggagttgttggcacggcgtgcccgtatctataaaccccgtttttccattgtcgccgtacatgtagtgatgaagaatataccttatcagagcgatgtagactatctgagggagtatgtagagtcgtggggagtgccttttgttctctttgaaacggagtttgatgccacgacagatacccgcaagtctccttgttttctttgctcttggaataggcggaaggcattgtttaccgtagccaaggagcagggatgtaataaaattgcgttaggccatcacatggatgatattctggaaactttgctgatgaatatcacctatcagggagcgttcagctccatgcctccccgattggtgatgaagaagtttgatatgacgattatccgtccgatgtgtctggtacatgaggcggatttgatggagttggcgcaagtgagggggtatcgtaagcaggtgaagaattgtccgtatgagtcacaatccagccgtagtacaatgaaaggcattctgaaacagttggaggaaatgaatcctgaggcacgctatagtctatgggggagtatgacgaatgtgcaggaggaattgctgcctgcaatcataaaacattaaccattaattattaaaaaatatatgaaagcattttataccattttgctattgattgtatctaatattttcatgacgtttgcctggtatgggcatctgaagctacaagagacaaaagtcatctccaactggccgttgtatgccgtggtgctgttttcctggataatagctctggcagagtattcttgccaggttccggccaatcggataggctttttaggcaatggaggcccgttttcattgatgcaactcaaagtgattcaggaagtaatcactttgataatctttacggtgtttacaacagtccttttcaagggggaaacgctgcattggaatcattttgccgcttttgtatgtctggtactggcggtatattttgtattttataaatgatgggttaatcgcatttgcacattatttcatatacttctccattcctcttgttaagaacgtttgaagctttccttcttcatccgtataaatgaaacaggcgtcgatatccggatgtgcatccgccacgcgttctgcttcttccagccccatcaccatgaatgccgtggcataggcgtctgcactcatgcaatctttggcgatgacggtggcggacaagatgctgtgctgtaccggatagccggtacgcgggtcgatggtatgcgcatatttctttccgtctttatagtagtagttgcgataattgcccgatgtagccatgcctaaatccgtgacttgcagcactgcttgcagttcctggttcactgccagtgagtcgtctatcggcttgttcaaaccgatgcgccaaggtccattttgagggttttgcccgtgaacaaccacttctccgcctatatcgaccataaagttgcggataccctttttcttcagaagttgggctatgacatctactgcatatccttttgccacagcgctgcacgagagcattatacgtgggtctgttttcaccactttcccttcatcggacaattttactttttcgtatcctgtcatctccagcaggctgtctatcatggcagagtcggggaaattacccttcttgaacccaaatccccaggcattggcaagaggggcaacggtgatatcgaaggcaccatcggtctcccgggagatttccatgctacgtcggaagacgttggtaaagaatgtgtcgggcacaatgtcctcgttgcggttgatgcgcgtaatggtcgccgtgtcattgaaaggggacaaggaaccgtcgaaacgtttgagttccgcttctatctctgccttcagattttggtcacattgataagtcactttatataccgtaccgaatatcagtccgttatccgtctgataaggagtgacttggttgtggcgggcaagtatccagatggttcccagtaccagtagggcaatccataaaaaattccgttgtactttcttttccatatcctatctgagtttttactttttaattaaaagaagagatgctctaccaatatcttggtaccgatgatgacgaggataatccctccccaaagttcggcgcgcagtctgcgggctatgccacatccgaaacggatgccgaacatcaggccgaccatcgacaaggcgaatgatacaaaaccgataatgccgatgggggaaagaatagccgagaattgcttgataccgaggaatgcaaacgaaacacctaccgccaatgcatcgatgctggttgccacggccagagcgagcaccaccttcaggctggtagggtcatactcgtgcttgcaatcttcgtccttgaaggattccattatcatgcgtccgcccaggaaggcaaggataccgaatgcaatccaatggtcaatactttctatcaggtggctgaaaaaactggcgcctatccatcccagcagaggcatcaaagcctggaaaaagccgaagctgatggccatcaccagcatagggcgcagccgggcgcgtttcaatataattccgctggctatagaaacggcgaaacaatccatcgcaagtcctacggccagtagccaaatctctaaccctgtcataagtcgcttaaagaggtagtttataagttatcgtataggttactcccatcgtgttggagccatatttcccgaaaccgggcacataccacgggtcaccgtattcatcggccgaggcagacaatttgaacttgaagcgtagtgaccagcccatgtacaatgccttccagacgtgcgcccggataccgacacaaaattccgcccattgcatggagcctttcattcctttatggttatagggcaggctgcctccccatatctcgtcgtccagattcggattgcctacgatgccaccgtatatcgggtcgtccagtcccaaggcgtctacatcgtacttgaagctacttacaccgtaacgcaagcctacgagtagcatgtgtccgtgctgcttcttgtatagcgtgttatagtccattcctatgcggaagtagggggcgttgcttttgtagtgtatgcctttgtcactccaggtgtccgtggagccatatcccagttcggcaatagggaagaagcggttcttgaggtttacgtccacggccacttcggaactcaggaaatctcctccaaatacggagcttccgattccccacaagtccaagccgacggacatgccgttgtataacggatagtgcacttcttctttcgcgtccttcttctccttcttgggaggtgctccctgggggggagcggtaggattcccgttctgcgcccgtagggggaggaacatcagcaggcagagtgccagactaatagaataacttaagattttcctttccatagatgcctgcttcattgtctttgatgtatatcgagtccagagagatgcgggtgcacgttacgtctgtgatggcctgcttcatctgatagccgcaatccatcgatagaaaatagggggtgttggtgtggcgtatcaccatcgtgtcactcttggtccggctatacttgaatatcagcttggtggaatcctccgtatagcgcagtggcagggagatgtcgtgtaccttcttctggttgttgatgatgatggagtcggtgccgtatgctgtgacggtgagcgagtcgagcgtgtcgttctccacatattgggtttcggggtctactctataaagaatgcaattcaccatggggcgtgccgtcatggagcaatctgcctcctccgagcaggagatagctatgcttattatcgggcaaaggatagctccgagtatgacaagtctgactaattttttcatcgttaaatggttttctctatttgatatttgtttcgttccggggcattacgtgaaatcagctctccgaggaatcctgccacgaatagttgtgtgccgataatcatggaggtcaacgagaggtagaagtagggagagtccgtcacaaggcggtagggcatgccatggtgcatgtagtacaacttgctgacacccactatgaccacggctatgaagccgaagatgaacatcagcgaacccagcaatccgaaaaagtgcatgggcttgatgccgaaccgggaaaggaaccaaagggaaagcaaatccagatacccgtttacaaaacggttcagcccgaacttggtctttccgtatttgcgtgcctggtggtgtactactttctcgccgattttcttgaagccggcattcttggccaggtaggggatgtagcggtgcatttcgccgtaaacctctatattcttgaccacctctttgcgatacgccttcagtccgcaattaaagtcgtgcaggtttttgatgcccgatactttgcgagcggtggcattgaacaatttggtggggagggtcttcgacaacgggtcgtaacgtttctgcttccagcccgatacgaggtcatagccttcttgggtaatcatgcggtagagttcgggtatttcgtcgggactgtcctgcaggtcggcgtccatggttatcacgacgtcgccttgtgcttgttcgaaaccacagaacaatgccggcgacttcccgtagttgcggcggaacttaatgccccgtatcttgtccggagcttgcgcctgcaattgctcgattacctgccaggaacggtcggtacttccgtcgttcacgaaaatcacttcgtatgaaaaaccgttggcattcatcacccgctcaatccatgcgaacagttcggggagtgattcttcttcattatatagtggtacgacaactgaaatatccattgatgtatgatttttctatttacaattgaaataacatttctttttactgttccgtcactttgccggagcgttgtctttcttgcgtctcatcacgaacaaggcggtggggaaagccagtatcgaaccccaaaacacattggacgatatcatctgtagtgtaatgtcgataggactgagcagtcgggctgtctccagagcttcctgataggtggcgatgtacgaatccatttccggcatgttgctttgggcaagcgtgtctaccatcgtttcgcacgtgtttatcacatatccgtggtctatgaacctgaagtagatgtagtgtgccacagcggcaagcagcgcggcaaacatatacatgaaaacggtgaatatccatgcatgcaggaagctgatgccgcctccgcatacctgattacgatacatccgtgcataataatatcccataaaaggtacgcatagcgtgagtcccatgaaaaggaaaagtaaaaaaggaaccgacagtcccaccggaaagagtatgaacttcaatatccaaaaacctcccatataggtaccgaacagcattgcgtatcgttgcatgtaacctctattttctgtcatctttcttagaaataatgtgcaaaggtacaaatatagttggattcaagggcaagccgatgtgcagattttaatttttaattctttaatttttcattattaattaaaaaagaaaaggtgatacatttcgtatcaccttttctttttctgagcctcttgtcggattcgaaccaacgaccccgagattacaaatcacgtgctctggccaactgagctaaagaggcgggtgggtaagcttgctatatcgcgccgctacaaccaactacctttgctgcgatcaagccctggaggattcgaagggagctggccgtataggacttacccgttttcgttttgcggttgcaaaggtagacattattttggaatctgcaatagcttgcggcggtttttttatttgtttttttagattctctattctatccctcttcatggccttcttatatagacactttggaggggaggtacggattctttccggcattacgatggacaaatattcctcttactagaaagtattcgtccgacatatgtaaccttatcgtccgacggctgttgaattatcgtccgacagctgtcggacgataattcaacagccgtcggacgaatacttcttagtataccggaatctaaagtatagttatgcaaaagattgccatttgagaagaaaataataatcggggacgaaaaaacagataggctattgtgcgctaccttgaaaataagcattatttttgtgcaactaactatatagtcattatacgcatgaacaaacacatattgtcattttatctttttttctgcctttttctttttccccctttggtcgaagcaattgccggctggaatagctttatcgtcaattttgataaaagtgtttatggtaaggggacccagacttggcagatagcaccctatgatgacaagtgggtatatttcgccaacaagaacggtatggtgcaatttgatggcaatgtctggaatgtgtttccattgaacaatgcttccgatgtgcgttccgttctggcttctgccacccaaaaaagaatttatgtggggggcatcaatgaattcggctattatgaaccggatacggacggttctttggcctatcattgcatgtccgatactttggagagttccgttcgttttcttggaaacgtgtggggcattcatgagactgacaatatcttgtatttccaaggggacgggtgcgtggtgaagttcctgaacggaaaatataccgccattgaaatgaatgccaagatagactgttccaatatggtcaatggtattctttacatcggtacggacagaggcgtatggcttttggttggaaacacttttttccctcttcagggtgccgatgcgttggcttccaagcgtattcgtggcattataccttataagaaaggtgttctggtggtgactgcatacaacggactttactattgtgacgggcgtacgatggaaccgtttatcaccggtgccgaagagtttatgcgtgagaatgaagtcttttgcgtggccaaaaaggatgataagattgccttgggaaccattcataaaggattggtactggtggattgcagcaccatgcaactgaaatatttcaatgagaacaacggcttgcgtaacaatacggtgctttctgtctccttcgatacaaccggaaacctctgggccggtctggatagcggcattgactacgtctgtctgagttctccttttacgaatctctattcctatccttattcctacggcacgggatatacggcggccgtagaaggcggctatctttatttaggtaccaatcggggtttgtattacacctcttatccggtacagatgaacggcgatttgccggatatccgtccgatgccccaatccagcggacaggtctggaacctttgccgtataggtgatgaactcttctgtctgcacgaccgtggtattttccttatcaatgggacttccgtaaaacgtgtgacggacattaccggcgtctggtgttgccagcttgtggcaggacgtacggaccttatgtatgtcggggtatataacggtatttatttggttgggaaaaagaatggagaatggcaggtggttggcaagattgagggtgtgaacgattcttgccgtctttttgagcaggaaagtgataaggtgatttgggtgtataatacagaccacgttacccgtgtggatttggataatgatttgacaaaagctgtccgtataaaggaatatagcgcgaaggatggttttccggtaggacgtgatatgtatatagcgaagatagaagaccgggtgtattttgccactccccggggaatctataagcataatcctcataaagatgtcatggagccttgtccggatatgaacaaccttttgaatggcaccacggcctattcgcgtatcttggagtatcacgataagttgataagtttgagccctcacgaaatctgtattgccaatctgggtacctataagcggggggcgaatacaagcattaatcccatccagcaatcgctgattgaactggtacccggttttgaaacgattattcctctttcagattcgctgatggtggttcctaatgaaggaggtttcgctttgttcagtatcccggccgtaagggagcatcaggatcgtagccattccttatatataaggaacatgtatctgtcttatcccaaggattcattggtatataccgcaaactttttaggagagaagccggttccggtgatagcttattccatgaattccgttcgttttgactatgccctttctttctttgcggtaggagatgatgtccgttttcaatatcgtctgaataaggggagctggtccgattttacaacggtacgcaccaaagagtatagtaatctgtcggaaggtgaatatacgtttgaagttaaggcggtctttcctgacggtacgacatcatcggatacaattgctttccgtatacttccgccgtggtatcgtagtgctgctgcatacgtttgttatatcatcttggctttgcttgccttatggtatgtctatcgttgggatgatgtccgtgtgaaacggaagaaacagcaggcggtaatcgagaaagataaagagttgcacgatatggaaagggagtacgaagaggagaaagcccgtcaggaaaagcagattatgcagctggagaaagaaaaattggaatacgatttgcaacataagagtcaggaaatggccaatctgatgataaactttgtccgtaagaatgaaatgctgactgaaatcaagtcagagatacttaaagtatccgccttgctgaagggtgagggggctcgggaaggaaaacagcaactcatacttattaataataaaatagacggtaatatacagagtgatgaggttttgaagcgtattgaagaccagttcgatttgatacataacaattttatgaaacgtcttcatgccaagcatcctgaactttcccacaacgaacgcatgatgtgcgcttatctaaagatgaatctttccacgaaagaaatagcgcctctattgaacatttcggttcgtggagttgaaacaatccgttatcgtcttcgtaagaagttcgctttagagagagaggatagtttgacggattatttaagcaataaactgtagtctttagatattaacttcctttaaaagaaggaagtgcatggaagggaggaatttaatattcctcccttttgtgttctataacatgttgtgacgtaatacttaaaagtatatattaattattgattattagtaagttatttgctgatgacgtattgataacgtatttgaatttcagatttgacgtatttaagaatgattgtttcttatttgttttattgcattttactctatgtttgcactgttcgattgagaacaaaaccgagaaacgttaatcttaatttagtaaaacttatgaaaaagttattatcagttttatttctgttaagctttaccttggcttctgtatatgcccaaaataacaggttaaaaggtacagtggtaagcggttcggataatgaaccgttgcctggagtaaatgtggtagttaaaggaactaccaatggtggaattactgatttggacggtaattttacattgtcggttcctgccgacgcaacactttctattacctatattggttttaagtcacaagaagtagcggtaaatggaaaaaattccttgaaaatagttcttcaggaagattcagaaacgctggacgaagtagtagtggtggggtatggtgttcagaaaaaaagtgtggtaacagcatctattgccaaagttagtagtgaggatttggaaaacaaatctccggtgcgtatggataatgcattgaaaggtttggctgcaggtgtggatgtaacttcagcttctggtcagccgggtgattctcctcgtgtacgtgtacgtggtattggtactattaacaatagtgatcccctttacattgtagacggtatgcctattgggggtggtcttgattttgtaaatcctaatgatatcgagtctatcgaagtgttgaaagatgctgcttctggtgctatctatggtgcgcgtgctgctaatggcgttattctagtaactaccaaaaaaggtaagatgggtaaggcacaaattaattacaatttttcttatggctggcagagtgcatggaagagacgtgatgtgactagtgcgacagactatgctatccttcagaatgaagccaatgtgaatggtggtcaggctccaatttatgcagatccttataatttgattgatgctaatggaaattctatcaaaggatttggcactgattggcaagatcttgttttctatgacaatgctccggtagtgaatcatgatgtgacagttagtggtgcatcggaaaaagtaaattattatttgtctttggggtattattcacaagatggtattgttggtggtaatcacggacattctaattatgaccgtttgactattcgttccaatactcaatataatctaattgatgcatctaaagaacgcggtttccttaataaattggatttaggtgtaaatttggcttatatgcgtacgcattcaacaggtgttggtactaactctgaattcggttcaattttgggatcggctctttatctgtctcctattttgacccctacattgactggtgatgcagctgaaaagatgattgaaacttataaagattttgatttgcctcgtgatgcaaatggtgatccttatacagtacctggctatggaggagcttatcaggaaatgaataatccgctggctatgatgacattgactcctacaaagaattggtcgcataagtttgttccaaagttttctattgatcttcaattgtgggataatttgaagtatcacttcaattatagtgctgatatgggattttggggtaatgaaggggcaactaagagcaagtattatctctcagctaataataaggcaacacatactaatgcatcttcattcaaggcacagaatgtgacatggcagattgaaaacacattaacttatgacaaaactatcggcaaacatacatttggtgttgtattaggacagtctgcccttaaatataagggagatcaacttggtggtaaccgttggaatctggtgaatcctaataaaccttctattgattatgctacagggaatgttgaatatacaaaggatgcagatggtaatattactggtgctacagttcagtatggcgtttatggaggtccttatacagaacatagaatgtcgtctatgtttgctcgtttgagttataactataatgaacgctatatgattcaggctacaatccgtcgtgatggttcaagtcgttttggtattaataataaatatggtacgttcccttcagtatctgtgggatggaatgtgacaaatgaagaatttatggctgatacgcgagaatggttgtctaacttaaaggttcgtgctagttggggtaagaatggtaatgataacatagccgaatttggttatacttcattgacagccatgggtaataatgttcttttgggtaaagatgccatcaaatggaatggttctaaagcacaacgtttggcaaatcctgatttgaaatgggaagagagtgagcaaactgacttaggtattgatttgggattctttaataatgctttaacgttcagtgccgactattacataaagaaaaccaatggtatgattattacgatgcctatcccgagttatgtaggtgaaactaaacctcttggtaatgtaggtgatatggaaaatagtggctttgagtttgaacttggctataaatggaatattgctgatgctaaatttgctgtaaagggaaatgctacttatcttaaaaatgaattgaagaacttgggaaatgatactggctatatggatttagatggtattcaaggattctctggtggtggtacacgcggttctaacggacaacctttcccctatttctatggttacaagactgacggtgttttccagaatatggatgaagttcgtgcttatgtcaataaagatggtaaaatgattatgccggatgcggttcctggtgatacacgttttgtggatgtaaatggtgatggtagcatctcggcagatgaccgtactaacattggtaatggtactccggattggacttatggtttgaatcttaatgctgattggaaaggctttgattttaatattttcttccaaggtgtagctggtgctgatgtgtttgatggcacttatcgtacagatgttgcttctggtaactatccttcttggatgttgggacgttggactggtgaaggtacttctaataagtatcctcgtctggctgtcggtaatgcaacgaactggatggtatctgatctttatgtttgtgatggttcatatcttcgtcttaagaatattactttgggatatacattgcctaagactcttactcgcaaacttactattgaacgtctgcgtgtgtatgtgcaagctgaaaatcttgtgacttggaccaaatattggggatttgatcctgaaatttcttcaggtgcaacttctcttggtgttgaccgtggtatttatccgcaggctcgcacatatacagtaggtgtaaatgtttctttctaatctaaaaataagaactatatgaaaacaaataaaatattagcaataggcttacttgctgccgctacagtgttgactaccggttgcagtgacagttttcttgaggtggaaaatccgacaggtgaaccattggaagattattatactacggatgagcatattcaggaagctctgattgccgcctatgaccctctccattggccagattggggattgggacagtacaatgccttgaatattgacggtgaaattatgggcgataatttttgggtaggtggtgcaaccaagaccgatatgcagaattggcatatgttatttaattatgaagctaatgaaaataatacacttggctctctttggactgtggattattctggcatcaaacgttgtaatgacttactgaaatatcttgattggggtactgatgttactgaggccaatcgtaaactctatgagatgcaagcccgtttactacgtgttttctattataatatgttgtggcattattttggtaatgtacctttctatttggagaatctttccgaacctccttatacggctccgcaatatactgccgatcaggtttatgctgagttgatcgcagaacttgaagctgtaattgactctaaggtgttacctttgaaatattataaaacaatcaaagaaggtaaagaagttgacgacgaaggtcagttgggacgtgtcactcaagctatggcttatatggtatatgctgaaatggtaatgtatcagaatgatgaaagtcgtttctcaaaagctttaggttatatgaaggagcttattgatagtcctagctttagattgaatcctagttttgccaacatctgggaaacggaaggtgaatggtgtgacgaatctatctgggaaattaattatgagcaaactaataacgaacgtggctggggaagtccgttagctgttggtggtacagtgcttcctactctgatttctcctaactctttcccaggtgatgatggttggtcaaagggtaatgatggctggggatttatgcccatgcgtcttgaaacttatcaaatgtttagtgaacaagacaaacgtcgtgatgcaacttgctgggtgattgccgaagatgtagaatatacgaaacgttatcaagatactcatatttggttgcaaaaatatcgtccgtatgataagaacttcaagcagtcttccggtgaccagaatttgaactataataacaactatcgttattatcgttatgctgaaacattgctcaatgctgcagaactttctcttcgtacaggtggaagtagtactggggaggctaagacatggttgaacgaagttcgtacccgtgccggtttggctgaacttgcgagtgtcacagttgacgatgtcctcacagagcgtcatttggaatttgttggcgaaggtaaacgctattttgatttggtacgtgctgaaggaattagtggagcatcatctaaaaacaaggctactactgcacttgtcccagatgaatatggctaccgtaccaattcttggactgccaagaagaaatacattcctattgcacaaagtgagttggattctgaccctgctttggttcagaatgcttataaatagtttaccataactccattaacaaataattgatatgaaaaatatatttaaatatatagcaggcgtgttggttgctggttttgcaatgacttcatgttcgcctgaagattttacgggagccaatggcaatatcccacaagcatcggattatactgataactttaaagttactgtagatcagacaaccaattatgcaaactttgaatttacttctgctcctggagtgtctccgatttggataattgacggcgcttatcaagcctcatatggcttttctaaatattatcgtaaaaaaggttcatatacagtagaatgtaaagtaaagaacgcaaatggcattagtgatggttcgataaccaaaacctttgaaatagagaagactattatgaacggttttggtggttttgtggaagatagtgaatttaacatgtttaagggagtaactttcaatgtggcatctttctactatgctccaggatgggggcagattgcagatccaaaatatacttatcagaatggtgcatttgttgtttccttaccggaagctactaccgatcagtggcaagctcagatgcatgtggaattggataaggtagttgctttgtcagtggataaaacctatgatttttcggtgataatcacttctactaccaaacatccgggcgtgacggttaaagtacagcagaaaggtgatgacaatacgtttatcaatatgcagcgtgtggctttagatgctaatgaacctaagtgtatatggttcagtaacgtacccggtgtgaatattaccgacttgaagtttgcacttgattttggtggtaatgaagctaatacggatattactttggaaagctttgtcttgaaagaccatgctaatgatgacggtacggaaattcctgaagtacaagagcctgaaccttcttgggtgaaggtggatagtgaagacaatctttggaacggggcaacctttaccaatactttcttctatgcaaacccggattggagtgctagacctaatccagatttagtggtggatggaaatgcttatacactcactttccctgatgctactgaagcacaatggcagaaccagttctcgtttgttacagatttgtcagccgatacagaaactgcctatgatttctgtgtcactctaaatcctagtactgatttgaagggggtaacagtaaaactggttcagactgatgaacctgatgtcaaacatgatgataacttcttctttgcagaacagacggacttgttgggtaatgaagataataaattttgggttgcaaataaaaaggcgcctaaagatatgcatgctatatctttagtcttggattttggtggaaatcctgctgacacaaaagtgactattaaagatattattttccagactcatagagattgatgactagtattagatagaatattggtctgctaaaagcagtgaataataaaaagggggaaggatgtgtgttatcttggcaattgctggagtttcatcttttcccttttttctctacttatgttgtaaaatatatatatgaaatactattgtctattatctattcttttgttttcgttgattgcttgtggcagtagcgatgacaaggaaccgcaatccgaggatgttaccattaaatgttctcctgaaaagatagaggctgttgcacaagctagccaatatgtggtgaatgtggtttgttctggtaaagagtggacagcttttgcctctgatgattgcagttcatgggtcaaagtaaatgtaatgggttcttcttctagccaaggcacagcgacagttatagtcagtgctcatacgggtactacttctcgtactggtacggtggtagttaaatctggtgctactcgtgtatctattcctcttacgcaagcggctcctttatcagtgtcacagactgagttgtattctaattctataggagaatcttttgtcttatctgttattgcttctggcgaatggaatgtgaaatccaatgatagttggattagcgcagaaaaaaatagtggggaaattgttgtgaccactttagctaatgatgcaaagatttcccgtacgggtacagttgaggttgtggctggtgcagagaaagtaacggtaacagttattcaagaatcggctgaagatctggatatcaatactcctgaggggtatcggttggtttggcatgatgaatttaatgagggtacatctcttggcaatgattggacacacgaggttcaaggagcagggtgggtaaataatgaacttcaaaattacgtcaatggttctgctgacggaaagcgtgtgacagaacttgtggacggtaagttgaatattaattgtttcaaaggctccgatggtaaaatttactctggtcgtgtgtatgctaaagtgaatactggttgggaatatggctattttgaagcacgaatcatgttgcctgaaggcaaggggacgtggccggctttttggatgatgccagttgataatgactggaatactaatccatggcccatgtgtggtgaaatagacattatggaggaagtgggagtcatgcccaacgaagtctcttcgtctatccatacgcaagattataatcatactataggtacgcagaaaacacatgccatgactatagaacaggcagaaggagaatttcatctctatgctttagagtggacagaagatgccatcactacatacgtggatggcaaggtacagttggctgttaccaagcaacaattgggagctggtcataatcaatggcctttccattatgctttctatcccattctgaatctggcttggggcggtgattggggtggaatgaacggtgtggatgagtctgctcttcctgtaacgatgaaggtggattatgtacgtgtatttcagaagaagtagaactgttttatttaaatgagatttgaatatgaagactaaatatctttttttaatattaatagttctatctttcttcttttcttgtagtcaagaagatggaattgtgatagtggaggaaccttttaaagattcagctctggagttagaacaagctaaattggctatttatgctatggggcttgacactacatttatggtggaatggaataattattacattgtagaagaagatattttgctttgcaaagatagtattaatcttacttctactaggcaatatcatgcaacttattatgtggataattatcaaacaattacagttggagttgataatactattgctcaaagtaccaattggagagaagctactaaagaggctatagatgtatataataaatatacggggctccgttttgtatataatgagtataatcctcaaataccttaattccgcaacactattacaaatataactttttaagtacctgagcaacaaaaagttgctcaggaatttgccatgtcagatttttcacctatcttagtgttgcaaatcaaaatatgtatcaaacccgacagacatggcaaaggtagcaattaaatccgagaaactcactccttttggaggaatattttcaataatggagcaatttgactccagactctcatctgtaatcgactcaaccctcggtatgagatgcaggctgtatggttatcaatacagcgaaatcatccgttcgcttatgagcgtttatttttgtggcggctcatgcatcgaggatgtcaccactcatctgatgtaccacctttcgcttcatccgacacttcgcacatgcagtgccgacacgattcttagagccataaaggaactgacccaggataacatttcctacacatccgacactggcaagacctacgacttcaacacggcagacaagctgaatacactgctcctcaattgcctattgtccacagggcagctgaaagagggcgaggggtatgacgttgacttcgaccaccagttcatagaggctgagaagtttgatgcgaagcctacatacaagaagttccttggttatcgccctggcgtggcggttattggcaacttgattgtcggcattgagaacagcgacggcaacacaaatgtccgtttccaccagaaggacacgctgaagaggttctttgaaaggtttgaacaaaacaagcttattatcaaccgtttcagagctgattgcggctcgtgttctgaagagatagtggaagagattgctaaacactgcaagaccttctatatccgtgctaaccgatgcagttcgctctacaatgacatctttgccctcagaggttggaagaaagtggaattgggcggcattgagtttgagctggcctccattctcatcgagaaatggaaagggaaggcataccgtcttgtgattcaaagacagaagcggatagacggcgaactcgacctgtgggaaggagaatacacctaccgctgcatccttacaaatgactacgagtcttccgagaaagagattgtcgaattctataacctccgtggagggaaggaacgcatcttcgatgatatgaataacggattcggctggaacaggcttccaaaatcctttatgggagaaaacacggtgtttcttctgcttatggcactcatacgcaacttctataaattcatcatggcgaggcttgacgtgaagaggttcggactcaaagcaacaagccgcatcaagacgtttgtctttaagttcatctctgtgccagccaaatgggtcaggacatcaaggaagtatgtgctgaatatctattcatgcaacaatgcttatgccaatgtgttccagaatgactttggataacaccgacaacttatagtcgtgattttgcgtattgcctcaagtcgcatggtggggtaaggggcatttatatgtctttatggtgacattcgatgcactgtgccccctttttactaacgatgcagattcttttcgcttctgtatcatattaggcgcgtagttgcggatttgaggaaataaagatttctaagagcaatttatataatgctatagcatgtgcacaaggggagttccctttatcaggcaaacctggtagtaaaataattatcaatgatagtttttataaaaatatagatacctttttgagtttaagtcaaaagaagtttttattagtgcatgagcttgggcataatttgggattacgtcatactaatgggcttggagagggagatggtggcgttggattagttcaaattcctggaactcctacatcagattctcaatcttttatgaattcaactacgtgtggtaattcttggaatggagcttcaacttatgatgttgtggcacttaaaactttatggccaaaatgtataatatcttttgccgatggaagtagccttcctcaaatggaagtagattatggtagttatctgagtagaaatttaattcctacatctgctaagggcatatttgccggatggtttaaaaatgcagctttaacaattccatttagctacggagaaacgataataggtgatattactttataccccaaatggcgggataagactaatgtcataagattaatggctatttctgatactagtgctagtaccgtaagatttacgctttctcaggttactcctgtaacttttttagatattgaggtggagcgtggatttaatgaatggtcggaaatatctcgatttacggaagaaactggagttactttaacaaagattcctgcatcattctcaattcgtacttttatagagccatatatttggaatgctaatccaaatagttatgcaatctataattggcaagatgctactgttcttgacccaggcgaatatgtattggaggcacgctttacaaagagtcttggattacaaaatggagcagatggaaaacacggagtaataagggcggtaatagaatattaactttttatgctttagaacaattgataatgaaaaaagaaaaaatatttatttttatctgtttagttttgttgtctgcctgttctccttcttctttagacggcattgtaatagagaaagcggcagacggttataaactttccattgacggaagagaaacctatattaaaggcgtaggcggcacatatcggttggacattgccgcccagagtggtgccaatgccttcagaacctggggaggtaatgtggaggagataaagaaaaacctggcattggcttcggagcacaacatgtacgtaatgcagggaataggcatgaccaaagactccatacgctattacgatgatgaatataagaacaagatgcgcgaagaagtccgcttgttggcagaaacgttcaagaatgatacgagtttgctggcttggggtattggcaatgaaattgagttgggaaatgccaatatagctgccgcatggaattttgtggaagaactggcacagctgattaagtcgatagacaagcgtcatctggtttcgacagtgatttcctacaatccgtcggcattggactctgtggcaaagtatgctccgtctctcgattatgtgggcatcaatgtatatggtccgatgggagaggtgcaggctgttgttgaccggtcggactacaagggtgcatttatgattaccgagtggggaccgaccggttggtgggaaacagcgtcaaccgagtggaaggcacccatagagcagaccagtgaagaaaaacggcaggtatacgaagagcgttatacgcaatatatttctgccaatacccgttgcttgggctcttttgtattcttgtggggacaaaaagaagaacgtacgcctacttggttcagtatgtttgtagaggataaggtggattcactgccattgaaaggagagaaaactcctatggtggaggccatgcaaagagtgtggaccggcaaggaattggatgaaacggctccgatagttcggggcatgactatcgatggtaaaagtgccattgataatgtccgtatcaaagcaggtactttatttaaggcggaggtttccgtcacagataaggagaacgattctttggcttatgtgtgggaagtactgaaagaggctacagtcttgggttttggaggttcttatgagccacgtccggaaagaatgggtgacgtggccgtgtcagacaagaatgtgtatgagactatgattaaagttcccggggaatatcgtttgtacgtatatgtacttgataatacgggctttgtctcaacagcaaatattccatttcaagtaatagattaaagatgaaaacaatgaaaatgctctctgcttgtttattgctgcttccttttatatcttgtactcaagtgcaggatacaaaaaatgacgcagtcatcgagcagaaaatagaagcgctgttgtcccgtatgacattggaagaaaagattgggcagatgaaccagatttcttcttatggtaacatagaggatatgagcggattgataaagaaaggtgaagtcgggtctatcctgaatgaagtagatccggtgcgtgtcaatgccttgcagcgtgtggcaatggaggagtcccgcttgggcatccccttgctgatggcgcgtgatgtgatccacggtttcaagaccatattccctattcccttgggacaagcggcatctttcaacccgcaggtggctaaggatggtgcacgggtagcggctgtggaggcttctgccgtgggtatccgctggacatttgcgccgatgatagatgtggctcgcgatccccgttgggggcgtatggccgaaggatgtggcgaagatacttatttgacttcagtgatgggtgttgctatggttgaaggtttccagggagattcgctgaacagtccgacttccatagccgcatgtcctaaacattttgtaggttatggtgctgccgagggcgggcgtgattataattccactttcattccggagcgtcgtttgagggatgtataccttcctccttttgaagctgtggccaaggcaggggcagccactttcatgacttcgtttaatgacaatgacggagcaccgtctaccggaaacacttttattttgaaagatgtgcttcgtggtgaatggggatttgatggaatagtagtgtcagactgggcttcggtagccgaaatgatggcacatggctttgctgccgattctaaagaggcagcaatgaaggcggtgaatgctggtgtggatatggagatggtcagctatacgtttgtcaaggaattgccggaattgataaaagaaggtaaggtcaagaagtctgctatagacgatgccgtgcggaatattctgcgtatcaaattccggttgggactgtttgataatccttatgtggatgagaaacggatagaggaactttatgctccttctcatctggaggctgccaagcaagctgctgtggaatcggccatcttgttgaagaacgaaaaggagacattgcctttgcaatcttcggtaaagacggttgctgtggtaggtccgatggcaaatgcaccttatgaccaattgggtacctggatatttgatggtgacaagacaaaaaccgtgacaccgttgaaggctatcaaggaactggtgggggacaaagtgcaggtgatatacgagccgggtctgacttatagccgtgacaagaatatggcaggtgttgccaaagccgctgctgccgctgcacgtgctgatgttattttggcgtttgtaggcgaagaggctattctttcaggagaggcgcattgcctggccgacctgaacctgcaaggtgcgcaaagcgaactgattgccgctttggcgaaaacaggaaaaccggtggttactgtcgtaatggcagggcgtccgttgaccataggaaaggaagtcgaactctcgtcagctgtactttattcgttccatcccggaaccatgggaggaccggcattggccgacttgctgtggggtaaggctgtgccaagtggcaagactccggtgactttcccgaagatggtaggacagataccggtttattatgctcataacagttccggacgtccggctacgcggaatgaggttttgctgaatgacattccgttagaagcggggcagacttcgttgggatgtacttctttctatatggatgcaggtttcgatccgctgtatccgtttggctacggtctgtcgtatacgacgttcaaatatgataatgtgaaactctcgtctgccaatctgaagaaggaagatgtgctgactgtgactttcgaccttgagaataccggaaagtatgaaggtaccgaggtagcccagctttacgtgcaggacaagtttgcttcggtgacccgtccggtgaaagagctgaaacgctttgctcgcgtcacattgaagccgggtgagaagaaaaatgtatcgtttgaacttccgataagtgaacttgctttctggaatatagatatggtgaagacggtggaagccggagactttgctctttgggtggcaccggatagccaaagtggagaagaagttttctttaaggtagtagattgattgttgatttaaggttaaaaagagaaggggcggaccgtgatggttcgccccttctgctttcttctttataagccccgccttccggcaaataactcatcacttattacttataactttcttatatccatacaccgcattgcttcccagttcttcttcgatgcgaagcagttggttgtactttgccatacggtctgagcggctcagcgaaccagtcttgatttgtccgctgttggtagctacggctatgtctgcgatagtcgcatcttccgtttcaccggaacgatgggaagttacggtagtatatccgtggcggtgtgccatttcgatggcattcagtgtttcggtcagcgaacctatctggtttactttaatcaatatggagttggcacagcctttttcgatgcccattgcaaggaagtccacattggtgacgaacaaatcgtctcctaccaactggcaacggttgccgatacggtcggtcagttttttccagccgtcccagtcgttctcgctcatgccgtcttcgatagagtcgatgggatacttgttgattaactcttccagatagtcaatctgttcgtcggcagtacgtttcttgcctttttcaccttcgaatttggtataatcgtagatgccatcatggtagaactcggaagaagcgcagtccatggcaatcattacatctttgcccggttcgtatccggcagccttgatggcggcaatgatggagttcaaggcatcttctgtaccctccagattaggagcaaaacctccttcatcgcctactgctgtgctgaggccacggtctttcaggactttcttcagtgcgtggaacacttcggcacccatacgcaaaccttcgcggaaggaagtggcacctacggggcgtatcatgaattcctggaaagcaatgggagcgtcactatgcgaaccgccgttgatgatgttcatcatcggtacaggcatcacataggtatttgtaccaccgatatatcggtagagtgggatgtcaaggtaagcggcggcagccttggctacagcaagagatacgccgaggatggcattggcacccagattggctttcgttttggttccgtccagtgcaagcatggcatggtcgatacccatctggttgagggcggacataccgatgagcttgggagcaatgatattattgatattgtccacggctttcaggacacctttgcctccgtaacgttttttgtcaccgtcacgcagttccaatgcttcgtgttctcccgtggatgctcctgacgggacagatgcacggcctatgaagccggattccaaggttacgtctacttctacagttgggttacctcttgaatcgaggatttcacgtccgataatcttctctattttcatattcagtcaattttaattataaactatcttactaacaaatgaaaacaaggaattgtttttcgtttttaatcctttattgtaatgcctaaaagagcagtcaactccatggcttgggaagtattgacgatggctccccgtatgtcgggcaggttgaggcgtatacctcctatgtgcgagtcgctcaagtcgattcctcttagaggggtgtgtgaaaactcggattctaccagctcacagttttcaaaggcgatggaggcaagtttgcagttgttgacgtcgctgttgcgcaagtcacaagaggtgaagcgggcttgattgattttactcatggaaagattgaggtatctggcattgcagtccttcattgtcagatggttcaatattgtttccggcagattggttcccaccagtttgcaggatatgaattccactctgaacagagaactttcggcaaatgagatgttggaaaggtcgcaatgttcaaaacgtacatcagtgaaatggcaggatttcagtttgcaggcgctgaattggatatgactgaaagtacagttggtgatgcttttgtaggaatactccatgtgttcctctgtccgtttaccgaagtgaaggtctctgacagtttcttccgtattcagccattcttccaatgatttggaactttcactttgtccctctaaggtaggagggatgatgcgtacgggaggcatgacaaaaggcttgctgggtttcataggggtgtttgggttatatacagcgtccgaaggcgccgccggcgaaggctgccaggactcctaatgtgatacttaataaggtatataaagcaaacattccgtagaattcttgctttatcagaatcagtccgtcattgctgaaagtggagaaggtggtgaatcctccgcacagaccggtagtcagcaacagccgtacctcagtagaaaggttgaaacgggcggataaggtatagaatagcccgatgaggaaacttccgaggatattgactgtgaatgtagcccatgggaaagagtaggggactatgcgctcgtggagcatcatctgcacgcagtagcgcagtacgctgccggtaccgccgccaaggaatatagctatcagtaatctagtcataggttttctggggttggttttggctgcaaaggtagtgaagacaaaggaatttcagtaaatcatagtccgaaatttcataaagcgattctgtactgggggaagtagttattggtgggatgtatataattttgatatttgatatgagtgattgccaatcttggttccggatagttcgtgatggggcagaagcgatttactaaatcttggaggaagatttagtaaatcgttgccggagatttagtaaaatgtccgggagattttagtaaacgagtagaaggggctttggaaggatgactggtttgtctgtatttttggatacggtaataacttgtgaaacttgagccactcttgaaattgaggtcttaaccgttcaaatgccatattgtagagacctctctagaaccttgtcttgataatcagcgatttattttcattggctgtagagattgtacccattccttctcattctcttcctgcctttctttcttcacttgtagagaagggttgtttttaatttgttgttttttagagttttaacgaaattggttgtagatgtcatttccttgtattcccgtcattcacaccctaactttgcaacatcgaattcaagagaatgaaagtttatcgttgaggcctcacgatggatctccacttcttgaaagagaggaaaaggcttcggcctatttattacattattatattaactttctaaaacattaaaaattatgggacttcagtatgtagtggcaaagagaatctttggttttgacaaggacaaaaatgtaaagtatgtagctaaatccgtaggagcgggtgaattggattttgataagttgtgtgccaaagtgagccgtattcttggtattcacagaaagacggtggacttagtggctgcaggactggtggacatcatgtcggaagaaatagacgatggaaagactgttcgtttaggtgatttcggattgttccgcccttcttttgtagggaagagtgctgatacggaggctggcgtttcggccagtaacattgtccgtaaacgtattctgttttttccggggaaagcttttagtcaaatgttgggcaatatgagcgtcaccaagatggtggttcccgatacggactatacggatggaagtagcaatggtggaggggataactccaatccttcgggaggcaatgacggggaccaaggtgaaaatcctttgggataattccagtgcacgattaaagttgtaaaaatatggagggcgaagttttcgtagcgatacttctccttctattttgtttgtaggcaggatattgttcaagggaagttggttttcatgcaaacgtttgccgacaaatcatcatcattttagtttaattgcgtcagagtgtatttctttcctgcctatatttgcatctggaacataattttataaatatagcatgagaaacatgaaagcaatctgtacaaaattagcctgcttcctgctcgttttgttggtgagcggcgtagcaatggcagagagtattacctctcccaacggacaacttcaattgaatttttcggtaaatgcgcaaggcgaacccgtttacgaactttcttacaaaggaaagccggtgattaacccttccaaattaggactcgaactgaagaacgaccccggtctgatgaatggcttcacgatggtggatgcaaagacttccactttcgacgagacttgggaaccggtatggggtgaagtaaagcaaatccgtaaccactacaatgagctggctgtgacgctcaaccaaaaagcgcaggataggaacatcattatccgcttccgtttgttcgacgatggtatgggcttccgctatgaattccctttacagaagaacctgaactatttcgtgattaaagaggagcgtactcagtttgccatgactggcgaccacactgccttctggattccgggcgactacgatacgcaggaatatgactacacagaatccaaactttctgaaatccgcgggctgatgaaaggggccattacgcctaactcttcgcaaaccccgttttcgcccaccggtgttcagacttctttgcagatgaagactgctgatggtttgtacatcaacttgcacgaagctgctttggtggattactcttgcatgcacttgaatctggatgataagaattttgtttttgaatcttggcttactcccgatgcagtaggcgataaaggttatctgcaagctccctgcacgtcaccgtggcgtacggttatcgtaagcgacgatgctcgtgacatccttgcctctaaaatcacgctgaacttgaacgaaccttgtgcttacgaggacgttgcctggattaagcccgtgaaatacgtaggtgtatggtgggaaatgattgcaggtaagagcacctgggcatatacagacgaccttccctccatcaaactgggtgaagtggactactccaaaatgaagcccaacggccgtcacggtgccactaacgaaaatgtaaaaaagtacatcgacttcgcagccgagcacggtctggaccaagtattggtagaaggctggaatgaaggctgggaagactggtttggcaaatccaaggattatgtattcgattttgtgaccccttatcccgatttcgacgtgaagatgctgaatgaatatgccaagagcaaaggcgtgaagctgatgatgcatcatgagacatccggttcggtgcgcaactacgaacgtcacatggacaaggcctatcagtttatggtggataatggctacaatgccgtgaagagcggatatgtaggtaatatgattccccgtggtgaacatcattatgggcaatggctgaacaaccactacctctatgccgtgaagaaggcagccgactacaaaatttgcgtgaatgcgcacgaagctgtacgccctaccggtttgtgccgtacttatcctaacttgattggcaacgaatctgcacgaggaactgaatatgaggcattcggcggtagcaaaccgttccataccacattgcttccattcaaccgcttgattggcggtccgatggattacacaccgggtatcttcgataccaaacttgactttatgggcgatttgccccacggacaagtgcagactacacttgctaagcaactcgctctgtatgtaactttatacagcccgttgcagatggctgccgacttggttgagaactacgaaaagcacatggatgctttccaattcatcaaggatgtggcagtagactgggacgacagcaagtacattgaagcagaaccgggtgattacattaccgtggcccgtaaggcaaaaggaaccggcaactggtttgttggaggtattacagacgagaatgcacgtacagccaactttacgctcgacttccttgaaccgggcaagcaatacgtagccactctctatgccgacggtaaagatgctgattacaaggagaatcctacttcttatcagataaagaagggtatcgtaaccagcaagaccaaaatgtccgtgaaggaagcgcgtagcggtggttttgcattgagcttgattgaagcgactccagctgacaagaaagctgtgaagaagtggagataatttagggtagaaagagtttttattaggcattagtgaggccccgcagaagtccaatctttgcggggcttttttttgtgttagggtaagctcattcttataccgtaaaaatagcatcaagacccgagtttttggtaagtccgttctttggggaaacctttatttttgcactcagataacagattgcataatcattaaaaatcagagatatgaatacggataagaaaatcagtcgtcgggaggctttaaagcgtatgggatttgccgtgatgagcagtgctatcgcatcttccggcctactctcgttggcatcctgcgaaacaaaaaggagtaagcgtatcatcttttattttaccggaacgggtaacagtctttacatcgcccgtcagttggctggagagaacgcagaattgttgagtatccctcagatggtgaaacgggggaagtatgaatttgaggcagatgaaatcggcatcgtttatcccatctacggtcatatgcctccctatatggtacggcagttcattcggaaagcaaaactgaaggcagaatacaagtttgctgtcctcacctatggtgcaaggaagtgcgatgcggtagagatttgggaccgtatatcccgtaaagccgacaatgcgttcgactatatcaacactatcatcatggtggataactggctacccaacttcgacatgaacgagcaactcaagatagacaagcacatccccgagaacttgcagaagataacggcagatatcaacagtcggcagcattggcacgaaccggtgacggaggaggaacggcaacagcaccaaggttttatgcagcggagtggactcgaccccgaggtgggcttcctgatgaaaagcgagaagttctttaccgtgaccgatgtttgtattgactgtggcatttgtacctacgtttgtccgcgcggcaactatgagctgacgtcgagaggagtgaagacgtccggtgactgcgagttctgttttgcctgcatacagaattgtccgcagaaggctattcagttcataaagcaggaagatggctcttttcctgacggaacggagaagaaccccaatgcccgctatcgtaatgagcatatttcgctaatagatctgaaacgggcaaacaatcaaaaactataatcattaacctctgtattttgtcggatttacacccagatgttgttgtacgtaacggctaaaataagcaggagaggaaaaaccgaacatatcggaaatacggacgaacgttagtgatttgtcgcgcagcaaacgcgagatgtcgagtgtggtataacggtttatccagtagtttgctgtataaccgcttactttcttggaaacttccgaaagatatttggaggtgacacataggcagtcggcataataggtcacttcacgatgctcgcggaaagttccgttctccagcatgttgaggaaacggctcatgatggaagcattttgtacagagatattgtcctcgccatatagatgggagtggaaatcgaagaagtcgagtatcaacatctgtgtggaggcgataagcatatcgcgatggaaatgatggtctgtattccggagtctgtattccacttgttcaaaatcccggagacatagctcttgctgttcggtagtcagggacatgataggattgagaaatagggaaagttgccctttcatgccgtagttgttctgtggtgtactcagcaccacaaagcccgatgcgatatagatgacctttacgcgaaaatcttctgaaggttgaattttctctaccagttttcctttgcggacaatcatcaggtcgccggcacgtagctcgcgctcctctccattgtacttcaatcggcagattcctgacagacagagggcgtgtgcaagatagccactgtatgcgtccgtccccagaccttgaagagtatcggctattataatatttgcggtttctcccattatacagttgtttggtttcgatcacaaaagtatatgtttccaataatataacttctattgtgggcaagaaatatattgccttttttattcatttcaaatctgcccgaatttcgcaaattcttcatacctttgcatccgttaattttagaaaccaataacaaaacagaacttatgggaggttttttcggaacagtcgccaaggcaacaagctgtgtggcagatttgttttacggcacagattataattcacatttagggacaaaacgtggtgggttggctacatacgatgcagaaacggagcagtttacccgttccattcacaatctggaaagcacttatttccgcacgaagtttgaggatgaactggataagttcaaaggaaattccggaataggaatcatcagtgacacagaccctcaaccccttatccttaactcccacctcggtcgctttgccattgtaacggtagccaaaatagtaaatctgcaagaactggaaacaaaactgttggcccaaaacatgcacttcgccgaactcagttcgggcaaaaccaatcagacggaacttatcgccctccttattatacaaggaaagacatttgtcgaaggaattgaaaatgtgtataagcatatcaaaggttcctgctccatgctgttattgacggaagacggcatcattgccgctcgcgaccgctggggacgtactccgattgtgattggcaagaaagacggagcgtatgccgccacaagtgagtcgagcagctttccgaatcttggttatgagatagaccgttatttgggacccggagagattgttcgcctgcgtgccgatggtgtggaacagatgcgcaagcctgatgagggaatgcagatttgttccttcctatgggtatattacggtttccccacttcctgctacgaaggtaagaatgtggaggaagtgcgttttgcctccggtttcaagatggcacagacagataagtcagaggtggattgtgcctgcggtattcctgattcgggtgtaggtatggcgcttgggtatgccgaaggtaaaggagttccttatcatcgtgccatttccaaatatactccgacttggcctcgtagttttactcccagcaagcaggaattgcgttcgctggtggcaaagatgaagctgattcccaatcgtgccatgctcgagggtaagcgtctgctgttctgtgatgactctattgtccgggggacccagttgcacgacaatgtgaaggtgctgtatgagtatggtgccaaggaggtgcatatccggattgcttgtcctccattgatatatagctgcccgtttgtaggattcacggcttccaaaagcgacatggaactgattacccgtcgtgtcatcaaggaactggagggtgacgagaataagaatctcgataagtatgccactaccggctcacccgaatacgaaaagatggtggacgttatccgcgagcgtttcggactttcatccttgaagttcaatacgttggaaactctggttgaggctatcggattgcctaagtgtaagatatgtacgcattgttttgatggtagcagccatttttgattgacattttgtccttaagaaataaaaaagaggcgtgaattgcttggcagttcacgcccctttttttatctttacagcacaaaatagtggttaatgattagtgattaatgattaatgccattcggataatgcttttcgccaattactaatcactgaccattaatcactaaccattaatcactaatcattattcatcatgactttagtagaacgttttttaaagtacgtaagcttcgatactcagtccagtgaagagactgagattactccgagtactccggggcaaatggtgtttgcccggtatctgaaagaagaattggaaactttgggtctggaagaaatcacgttggacgaaaatggttatctgttcgccactcttcctgccaatacagacaagccgttgcccgtcatcggctttattgcccacatggatacaagccccgatatgagtggcaagaatgtttctccgcgtatcgtgcagaattatgacggtaaggacattgttctttgcgccgaagagaatgtggttctttctcctgcccagttccccgaactgctcgaccatcaaggggaagatttgattgtgaccgacggcaagaccttgcttggtgccgatgataaagccggtattgccgaaattgtatcggcggtggtatatctgaaggagcaccccgaaatcaagcacggtaaaatccgtatcggctttaatccggatgaggaaatcggtctgggtgcccataagttcaatgtagcgcagttcggctgcgaatgggcctataccatggatggcggagaagtgggtgaacttgaattcgagaacttcaatgcggcctctgccaagataagcttcaagggacggaatgtgcatccgggctatgccaagaataagatgattaactctatccgcgttgccaaccgtttcatgtccatgcttccggctgacgaggctccggagcataccgaaggttacgaaggtttctatcatctgataggtattaccggcgaggtggagcagacaacagtctcttacattatccgtgaccacgaccgcacccgcttcgaagagcgcaagaaggagatggaacgtcttgtggcaaaaatcaatgaagaatacggtccgggtaccgctactctggaacttcgcgaccaatactataatatgcgcgagcagattgaaccggtgatgcatatcatcgacaccgcttttgccgccatgaaggcggtaggtgtagagcctcgtgtaaaagccattcgcggaggtacggacggcgcccagctctctttcaagggcctgccttgtcccaatatctttgccggtggcttgaacttccacggccgctatgagttcgtgcctatccagaacatggagaaagccatgaacgtcatcgtcaagattgccgagctcgtagcaagcaaatagataattcataactcataactctaatagttccatgaaaaccactccgtttaccgaaaaacacatctcgctgggtgccaagatgcacgagtttgcgggatataatatgcctatcgagtattccggcatcattgacgagcatcttacagtatgtcagggtgtcggtgtattcgacgtctcacacatgggagaattttgggtgaaaggtccccatgctttggactttctgcagaaagtgacttccaataacatagctgccctcacaccggggaaagtacagtatacctgcttcccaaatgaaaatggaggcattgtggacgaccttctggtctatcattatgagccggagaaatacctgcttgtcgtgaatgcgtcgaacattgagaaagactggaactggtgtgtgtctcataacacggaaggcgctgaattggaaaatgcttccgagcacatggcacagcttgctgtgcaaggaccgaaggctattcaggctttgcagaagctgacttccattaatctttccgaccttccttactatacttttacccacggtgagtttgccggagaaaaggatgtcattatctccaataccggatataccggtgcgggtggttttgagctttacttctatccggaggctgccatgaagatttgggatgccgtgttcgaggcaggcgcggagttcggcattaagccagttggtctgggtgcgcgcgatacgcttcgtctggaaatgggcttctgtttgtatggcaatgatttggatgacaccacttcgcccattgaagcgggtttaggatggattaccaagtttgtggagggaaagaacttcaccaatcgcccgatgctggaaaaacagaaagcggaaggcactacccgtaagttggtgggatttgaaatgatagaccgcggtatcccccgtcatggttacgagctgtatagtacagacggtactgccatcggtgtggttacctccggaactatgtcgcctacccgcaagattggtatcggaatggggtatatcagacccgagtacagcaaagtcggtacggaaatctgcattgacatgcggggacgtaagctgaaagctgtggttgtgaagccgccgttccgcaaacagtaatttgaatgaataactaaaataagaagaatgaagaatttgtcatgcggcatcatcgcgcagtcaaattcttcattcttagttattcctttctctatattctgcttatcctgtccagcatttggtttgcccaacctatctctttattggtccattccttttcggttccttctatgccctggccttcgtaggccgaaagcaaggtgatatattctttcagtatatcagcggcttgggtttgtttgttcatgcgcatcaataatagtattttttgtttatatatgtccagattggggcttgttcctgccatctcctgggctttatcaagcatggcgaggcagcggttgttcacttcttccgtattagacagtgccatttccgcttttaccaggatgatgtagtcattgtccgtggctagtctgttgtcaatgttcttgcgtatcagccgggcagtttccttatagcgcttgttggcgtagttcatacttgcgttgaaagaaacgacatcgctggtggtccgtaggtaggggcgggcactcaggctatgggattcaccggccttttctatacgcttttgcaggttgccgatgctgccgtagcgaggaatgtccttgttgcgttggtgcaggttgtaataccctataattttaccgagggccgatgcgattccgtcgggattatagcccttgaatgccagaagttggcgcgcaaggcggtctgaagagatttcctgggaagttttgtatttcatccccaaccggtccgttgccggaatgctcaaaagggaagcgatggctccgatatctgccaccagactgacggcataagcatcttcattatcgtcccagtaggccacatcgagggctgcgctggcggtagtggcaaagacatctgcccaaaaagctgcacgcttggcacgccgctcggcacggtaaatgttgtttacctgatggtcgaggacgaaatgtcccagctcacatgcgatgacggcggccagttcgtcttcggaatcaagagtgcagaggaggcctgtactgataaccatggagccgttgggaagcatgaaggcatctggttcggacgactggatgatacgtatgttcaggctttctccacgattgctgtcaatggtggtggcattcagtttggagaatattccttgtacgtacgaggttatgtagtcgtcctgataggctatctcgttcagtttatcgagatagtccaggcattcttcgtcgatttcctggcgcagtttgtgcttgtaaccgcggtcgttgaaatattcgtaaagatgattcttcaggtatatttgctgccagaattcccggtccgtttctggagcggatatggcaatgatacccatctcatccgaaggaatggtttcttgtatgccattcacttcgacggcatagtaaatgttatcgctgttttcgccgggattgttcattttgacaacccggcggataatgaccggggtaccggcgggagattgctggtactcttttgtcaattctcctttgatggcgatgtttccgcttaagtccttgtgcttgggtttggcaaaccctgccgttgtgacaaggattgttaggatgaatagggtggcgagtcgtttcatgattatggtatgttttcggtttcgatgatacaaaaataggaaagtgtttttcccctttcttgttttttcccctattctgtgataggagattccctatttatcgctcagcgggaggcggaaacaaaaaagggaacctttcagtgaaagactcccttttttcagtttgcttgaaactgattatttcttacggttaccgtaacggctcatgaacttatcaacacgaccggcagtgtcaaccagcttagacttacctgtgtagaacgggtgagaagtgctggagatttccagctttaccagcggataagtttcaccttcgaattcgatagtctctttcgtgttgcaagtggaacgagacaagaatacatcaccatttgacatatctttaaatactaccggacggtaattttcaggatgaataccttttttcattttgatattttcttttaaaaatttatattctgttactattttggtaataaatagtgtaatggtcttcttttcagagcgcaaagatagtgcaagttggagactctacaaaataaattcagatttatttttatttagtaggtttatcgcattttatttctgatttttgcaggacttaatcttgtgaatttatgaggaaactacttgtcttatgctctttctggctgtgcgtggcaacgctgggggcacaaaatgcggaacggaaactgtatagtgttgcgttctacaatcttgagaacttgtttgatacgattcatgatgcaggtaagaatgactatgagttcctgcccgacggcagttaccaatggacggcaaagaagtatgagtccaagctgcagaacctttccaaagtgttgggttccctttcgcgtgatttagtgccggaaggtccggcattcatcggtgtggcagaggcggagaacagccgggtgctggaagatctcgtgaagcagccggccatttccaattatgagttcgtgcattatgaaggaccggacagacggggtatagactgtgccttgctgtacgacccgaagcagtttagcgttacccactcaaagttggtgctttctactccttttgagggggatacgctgcacttgacgcgcggcttcttgattgtggacggacaactggcgggagagcgtgtctgcgtgatagtgaaccactggccctcccgtggggcaaagtcgccggtgcgtgtgcatgcagccaggcaggtaaaggccttgaaggactctctgatgcgtagcgacaagaagctgaagctcatcgtgatgggggatatgaatgacgacccgatggacgaaagcatggaggtgctgggagcgcgcaaatatccgaagcaggtgaagaaaggcgaattctacaatccctggtgggtgacgctggaagacaagggagtggggacattgctctatcggggcaaatggaacttgtttgaccagattgtcatttcgaaaccgttgctgaaggctaagaaagggttgcgctatgaccacaatgaagttttcatccgcgattatctgattcagcaggatggcaaatacaaaggttcccccttgcgtacgcatgggggcaggacttggctgaacggttacagtgaccatttgccgaccatcatctatctgaaaaattagtattacataataatgtgtaaacggacgccggagagcaaacatgttctccggcttttttgttgatagaagtatagatggcaaaagtatggctggcagagataaatgcaaagagtttgtaatatagagattacaataatctgttaaatgaagccaatagctttaaaatagaatggatttggtaggatgagccggatattttattcctctcaagttctttactttaaaggataatgattacttttgcgtagaattttaattcactaacaataaaatttaaacaaaatggttaattacaaagatttaggactggtaaacacaagagagatgtttgctaaggctatcaaaggtggatatgctattccggcattcaacttcaacaatatggaacagatgcaggctatcatcaaggctgcagttgaaacaaagtctccggttattcttcaggtatctaagggtgcccgtcagtatgccaacgctactctgttgcgttacatggctcagggtgctgttgagtacgctaaggaattgggttgcaaacatcctgaaattgttcttcacctcgaccacggagatacattcgaaacttgcaagagctgtatcgactctggtttctcttcagtaatgattgacggttcacaccttccgtacgaagaaaacgttgcactgactaagaaggtagttgattatgcccatcagttcgacgtaactgtagaaggcgaactcggtgtattggccggtgtagaagatgaagtttctgcagaacaccatacatatactaatcctgaagaagttattgacttcgctacccgtacaggttgcgattcactggctatctcaatcggtacttctcacggtgcatacaagttcaaacccgaacaatgccacgttgaccctgctaccggtcgtctggttcctcctcctctggaatttgccgttctggatgctgtaatggagaaactcccgggattccccatcgttcttcacggttcttcttcagttcctcaggaagaagttgatactatcaacaagtatggtggcaaattggaagctgctatcggtattcccgaagaacagttgcgtaaggctgccaagtctgctgtttgcaaaatcaacatcgactctgactcacgtctggctatgacagctgctatccgcaagacatttgctgaaaaaccggcagaattcgacccgcgtaagtatctgggtccggctcgtgacaatatggaaaaactgtacaagcataaaatcatcaacgtgcttggttcagagaacaaattggctcaactggactaatcgaaagataatccgaatatagcgtcagcccttgcaatattgatgttgcaagggctgacttgttgtatataggctggtgttgtgggatggttaagttcgccggttatttcagaagcggatgtttcaacgtgtacaacagtctgtttcctttaacaaaacagtctgtttcccttaactgaacagtttgtttcaataaagagaacactttgttccaatatgcaaaaacacttcgttccaatacgtaagaacactttgtttctacatatccgaacactttgtttctctatactggaacaaagtgttcaccgttatgaactaacagattagctatatttgagaccggtgaaaagcatatccccgtgacacctattccatactaaaaatcccttgcagatggctggcaggagaagtgtctgccagctatctgcaagggagatttgcaagaatgagctctctgtgtggagtacgcgttataattctatcactaatgattctctggggcccatcttcagctcttcaccgaaggtgatggccttgccgctaagaatatcttttccctgcttgctgtttttcaggatttccttgtagaatttcaaaggaacggtggtctctgcatctgtaccgttcagcatcacgaatatcgtcttgccttcgtactggcgtgcgtaggcataaacaccattctgtaccatgaactgcaccatgctgcctttggcaatcacatcgtttcctttgcgccagttcaggatggtcttgtagaagtcgtagcactcgttctgtatcttggtacgtccggctggggtcagtgcgtttgttgcgtcaccggtccatccgccggggaagtccttgcggacatagccgtcgctcttgctcttcacgccattcatcatgacttccgttccgtagtagagttgcggaatgcggcgggtggtaagcagcagggtagaggcttgcttcagcatcggaaggttgtcgccttcgcccaggaagcggtcggtgtcgtggttttcgatgaatgccagtacggaagcggggttggggtagaggaagtcgtatacgaagttattgtatatgcggtccagtcccttgaaccaagtctcggtctgttcattcttggcggtgtttatcttgtcaaagaagctgaagtccatgacggtcttgaggttactgttcttgggggctgatagcttggaatccttttgccaccaggcggtgtaggcgggttcggtaacccaggtctcgcccacggtgttgtagttgggatattcttcgtttagctctttcatccagttgctcatggcatcatagtcggcatacgggtaagtgtccatgcggatgccgtcgatgttggcgaattcaatccaccagaaactgttctgtaccaggtagcggtaaacgtgagggttcttctggttgaggtcgggcatggaaggtacgaaccagccgtcgttcatctggtcggcatcgtactgggaagtataagggtctacgtgcggggtcagtttgaaggaagtctgcacgaagttgttttcgtggtcggggttgttgaaccagtctttggagggcatgtccttaatccatacatgctctacaccgcagtggttgaaaatcatgtccattacgattttgatgtcgcgtgcatgggctttttcaatcagttgcttgtattcttcgttggtaccgaagcgcgggtctaccttgtagtagtctgtggtggcatagccgtgataggaaccgccggtcatgttgttttccagtaccggagtaaaccagagagctgtgacgccgaggtcggagaagtagtcgaggtgctgttcaataccggcaaggtcaccgccgtggcgggcgttgggatcgttacggtctaccttgtattcggccatgcctgcaatctggtcattgtccgggttcccgttggcaaaacggtcgggcatcagcaggtacagtgcgtcggaggcgtcgaaacctttatgttcgcaacctttcttgttgcgtgccttcagttcatattcctttacgagtttcttttttccttcagtgaaggtgaggttgaatttgccgggttttacatccttgtccagtttcagatagaccaggaggtagttgttgctttccagcttgacggtgctgctcaatgagacgccgggataattgacggatactgccgcgttgccgatgccttcgccatagaccatcagctggagttccgggttctgcatgccggtgtaccaaaacggagggtcgattttgttcacattcatagctgcatacgtactgagggagagtaagagtgttcccaagattaagaatacttttttcatgatagtaactttacggttaatttttgcgctaatttaaaacaaataacggagaaagttaatctttctccgttactgtaccttattatattatgcaaacgttttcattggggctatttgatgggggttacgctggcggtatcgatctttcccttgaagaagtcctctttcttgcgcttttctctgatgtccttcagccagttttcggcggcattgtatcggttgtcttctccgatgatgggaactccgtccgcatctacttcctgcactttgtccttgctgtttttcggacgggttttcaggtaggccgttaggtatctctctgctttggacgcatctttcagatagtaataatagacaaaggctgcgtcgtagagcagtttgtgtttctgtcggtcgtatttttcgtattgcgtcagaagggtatttgcctggtcggtgtattgaaatgccatcttgtagcagtccgcaagccccacatataggcgggacatgacactgtcgctgggcatggcgaggcttacggcagtttccagataagtcactccatcctctttccatgatgtcttggagcaggcgcgtcccagataatagagaacgttgatgttggtattgtcatctttgagagctctttccagcaggtcgtgtgcagggtagaagtcttcgagggcatagtagctgattccggcgtagaagcaggtttggaaggagctgtccttttcctgcaacagttgttcatatctctctattgctttggggtaatctttgttcaggcaataggcttgggcattgatgcggttcacaaggacgttggtggagtctatggaacggtatttctccgttatgtttatggcgtcttcatactgatggcctgctacatagatgttgccgagtttggcagcagacaggtaatcattgggataccttttctgtatgtccaggtaggcatctatcacatgcatgatttctgtgttgtcatagacttgccccatactttcggctctaaggtgtagtacataggcggaactgtccctttctgccagcaggttgctttcctttagagactcacggtatctcttcatgttcatcagcagactgatatactggatgcgtgcgtatttattgtccgggtttatgtggagcgcattctggtagtaatccagcgcctcgctatatttggcaagtgatttacagcattcggcagcttcaatgtatgcccggggattgagagaatcctgagctacgacttcctgaaatacgctcagagcttcaaggttattgcccagccctttcagcgctttccctttttggtagagtagggggacggtcggggtttcttgatcgatcagcatcaaggctgtttcataatcgtagttggccatcgcctcttgaatgggatttgtggtctgtgccgccagaagcgaacagcatgcactgaaacataaggagataaaaagctttcgcatacagtatatcatttatatgaggttaaactgactgcaagttactaaaaagaatgtatttacgaaataatcgtaatctgttttagatagattaacgaaaaagcccctccaaaaatgaaggggctctaaaatagttcagaattcaagccggataacggaatgaataaatgtattacattaagaatcccagcaggatacctgctgctacagcggaaccgattacaccggcaacgttcgggcccatggcatgcatcagcagatagttggtaggatcgtattccagacctactacttgggagatacgtgcagagtcgggtacggcagatacaccggcattaccgatcaacggattaatcttgttgcctttcttcaggaagaggttgaaaatcttcacgaagatgacaccggatgctgtggcaatgacaaatgataaggcgcccagaccgaatatcttgattgaatcaagggttaagaactcggatgcttgcgtagaagcacctactgtcaaaccaagcagaatagtaatggtatcaatcagcggaccactggctgtgtttgccagacgacgtgtaactccactttctttcagtaaattaccgaagaacagcatacccagcaaaggcagaccggatggtacaaggaatgtggttagtaacaaaccgataatcgggaacattactttttccgtatgtgaaaccacacggggaggtttcatacggataagacgttcatttttactggtcagccaacgcataataggcggctgtatcaccggtactaatgccatatatgaataggctgataccgcaatggcacccattaagttaggagccagtttggaagagaggaagatggcagtcggaccatcggcaccaccaatgataccgattgcaccagcctgcatcgggtcaaatcctatggcaagggcaatcatataagcaccgaatataccgaattgggctgctgcaccaaccaacattaatttggggttcgatatcaaagcggagaaatccgtcatggcaccgatccccaggaatatgagtggcgggtaccaaccggaggttactccctggtacagaatattaagtacggaaccttcttcatagataccgactttcaatccagcctccatattgaaaggtatattaccaatcagcataccgaaaccgataggaattaatagcatcggctcaaattccttggctacagccaagtatatgaaaaacaaacctaccagaagcattaccacatgtcctaccgttgcattggcaaaacctgtataagtccagaagtcggcaaggttgtttcctaaaaatgtgataaattctcccatattattcaataattacgaggtcagtaccttcgagaacagagtcccctttgtttacattgatggctgtaatcttaccgtctttatcagcattgatattgttttccatcttcatggcttccagaatgatgataacttgtcccttctttactgtatcgccgacatttactttgatatcgaggattacaccgggaagcggagattttacacctgacttgccggtagaagcagcggccggttttactaccggagtagcaggagcagcaggagcggatgtggctgccggacgtgctaccggtttaacgactaccttcggtgctttttccatttcaactttgtagggagtaccgttcacttctacgtgagcgatgttgtcttcaatatctccaatggcaactttatatatgttaccgttaattttatatttatattctttcatcgttttattttattatgggtgacttactttttgtgaggagtctcacgcaacgtataaatctttgaactccacggtgagtaactgcgttttacacgggtaatggtaagtatcgtgtcttccacatcgtgtacatcgctttggaattcgtgcatggccattgaaatggcagcaaaaacttctcccggagcctgccccagttgtttctcttttgcttcttgtttatcagtaatacctttagctttcatggcattgcgtttgctgaggttaactgatattttacctataatcttgaaggagatgtagagtaatatcagcccgcagaatacaacgctcatggcagaaatagccataccgatacctacgctgtcatgctcttcgaatttttccattttggcattgctgtcgatagtcttgttgttggtactcggagtgacatatttatcttcgcttccaccctttacttcccattggtcggctgcatcactgacacgggcataggattggttggcttttaaagtaccggcaggcactatgacttgatcaagcaatttcttgccggaatcatacaacccaatccagttggcatttgtggcatccagtttgaagttcgtatgaaatgtaccgcgtcttggttctccatcagcccagaaaagtgcatgctgacgtggttttatgagtgtcagaacgtcacctttgggaatgaaataactggcagtatcacccggctggctgctgaatttcagatagcaacctgcaaggtcggcgctgccgtatgatctgttgaatatttcaatccatgcgctgtgcacaccgtagtcatcctgatagttgctctcgttgttgaccagcacttcattcagcagcagtttgttgttcgatttctgttctttgcaagaagagcaaaagcccaacaccagcatcaatgaaaggaatattccgatttttgttttattcataatcgttcttgttttagtgtgaaaagcttgattacaagggaatattaccatgcttcttagccgggttagtcaattttttggtttgcaactgttgcagggcacggatgatgcggaaacgtgtgttacgcggttcgataacatcatcgatgtagccatatttagctgcattataaggattggcaaacaacttggtgtattcagcctctttttcagccaggaattgagccggattttcctgctctttggcttcgcgggcatataatacttctacagcacctgcaccacccattacagcgatttcagcagtaggccaagcataattcatgtcgccacgcagctgcttacagctcatcacgatgtgcgaaccaccgtaggacttacgcagtgtgatggtaaccttgggtacagtagcttcaccgtatgcatacagcagtttggcaccgtgcaggatgacgccgttgtactcctggccggttcccggaaggaatcccggtacgtctaccaatgatacgataggaatattgaaggcgtcgcagaaacggacgaagcgtgcgcccttgcgggatgcgttgctgtcgagcacacctgccagatacttcggctggttggcaacgatacctacggactgtccgttgaaacgtgcgaaaccgataatgatattctttgaataatctttttggatttcgaggaactcaccattatctatgatagcgccaattacctcgtacatatcgtacggcttgttcgggttatcaggaatgatgtcgttcagggaatcttccagacggtcgatagggtctgtacagtctacatagggagcttcttccagattgttctggggaatgtagctcaacagtttgcggataagggccaaaccttcttcttctgtctgtgcagtaaaatgagtaacaccagatttggtggagtgaacgctcgcgccacccaggttttcctggcttacgtcttctccggttacagtctttactaccttcggaccggtaaggaacatgtaggatgtaccttccatcatcaaagtaaagtctgtcaaggcaggagagtaaacggcgccaccggcacaaggaccgaaaataccggaaatctgcggaatgacacccgaagcaagtatgttacgttggaagatttcagcgtagccagccaaggcattaataccttcctgaatacgtgcaccgcccgagtcgttgataccgatacacggagcacccattttcatggcttggtccataatcttacagattttcagagacatggtttcggacagtgaaccggcagaaactgtgaagtcctgtgcgaagatataaaccagacggccttcgattgtaccgcaaccggttactacaccgtcaccggggtagtgtttcttttccatgccgaagttggtgcatctatgttctacgaacatgtccatttcttcgaaactgccttcgtcgagaagcatggctatgcgctcgcgagctgtatatttacccttctcgtgttgctttgcaatcgctttttcaccaccaccgagacgtgctgcagcgcggcggtctataagctctttaatcttttcaagttgattactcatgaatttatattctttaagtgtttatacaatttatgatttgatgattttacagtcttgcttattccggtttctcgcaaagctcggtcaggacaccgagagttgacttcggatgcaggaatgcaatgttcagaccttctgcacctttgcggggagctttgtctataaggcggatacctttttcttcgacttcggcaagcgcaccggccactccgtcttcaacggcgaatgcgagatgatgcatgccaccgttaccgttgttcttttcgatgaacttggcaattgtgctttcgggagaagtaggttccaacaattcgatctttacatcgcccactttcaggaaagcggttctaactttctgatcttccacggtttcgatgttgtagcatttcaaacctaaaacgttttcgtagtacggaagggcttcttcaatgctcttaacggcaatgcccagatgctcaatgtgtgaaatcttcataactatataaattaatgttagtattgtatcctttttaataaaggtataaagcagcacaaagaaagagaattcttccttaataaagaaatttttcatcaattaattaatggttaattgaactttagaaggattttttcagactttagatagagaccggttgttttcttgatatcgtccgctaacggacatccccactgtccgaaaatgaacacttacccctctatgaaacctttccggccacttggcacactctttgcttttctgtttgcgacaattttaaagattgaacatgaaaaagaatattttacttgcagtttgttttttgatgccgttggcaaccatggcgcagaatgatactttgggacatgaacgcaatattacgctgtcggaggccattgtactggcccgtacgcagtctgtggatgctgctgtggcattgaatgaattgaaaaccgcgtattgggaataccgtacattccgtgcggacttgttgccggaagtgaatttcaccggtacactacccaactataacaagtcctacagtacctaccagaattccgacggctcctatagctttgttcgcaacaatacactggggctgtccggacagctttcggtagaccagaacatttggtttacggggggtaagctgtcactgacttcttcgctggattatctcaaacaactgggttccggaggagcgaagcagttcatgtcagtccccgtgagcctggagttgacgcagccggtcttcggagtgaataccttgaagtggaaccgccgtatagagcccgtacgctatgctgaggcaaaggccgagttcatttcagctacggaagaggtgacgatgaaaaccatcacttatttctttgagttgctgctggccaaagaatcgctcgctaccgccatgcagaacaagacgaatgccgaccgcctttatgaagtggccatagccaaacgtaaaatgggacagatatccgagaatgatttgttgcagcttaaactgaattcattgcagggcaaggccgacgtgactgaggcagagagcaacctgaatgcaaaaatgttccagctccgttctttcctcggggtgtccgagcaggaaagcctgaatccggtgttgcccgccactgttcccgatataaagatggagtatgaccgtgtgctgaacaaggcactggaacgcaactcctttgcacagaacattcgccgccgccagctcgaagctgattatgaagtggcaacggcacgcggaaacttgcgcagcatcgacctctttgccagtgtgggctatacggggcagaaccatgaattctcttcagcctaccgggacttgcttgataatcagattgtgcaggtaggcgtcaagattcctatccttgactggggcaagcgccgcggcaaggtaagggtggcaaagagcaaccgtgaagtggttttatccaaaatccgccaagaacagatggactttaaccaggacatctttttgctggtggctaacttcaacaaccaggcgcaacagctggacatagccaaagaggcggatgtcattgctgagaagcgttacaagaccagtgtagagacctttatgataggtaaaatcagcaccctggacctgaacgatgcacagaactctaaagacgaagcccgtcaaaagcatatttcagagctgtactactattggtattacttctatcagctccgcagcttgaccctttgggattttgaacgcaatacggaattggaagctgattttgaagaggtggtaagaggataagtcgacgggttgcaagtgataagttatgagttatttgccggtaaaagtaccgtatatgcgatattataggtaaataacttataacttatcattcataactctgcttttttacttatttttgcgggaaacaaactacaatttttatgatactgataatagacgacgatagtgctgtgcgctcttccctcagctttatgctgaagcgtgccggatatgaggtgaaaacggctccgggccctcgcgaagctatggatatagttagggccgaagctcccgccttgattttgatggatatgaacttcactctttccactaccggagaagagggacttaccttattgaagcaggtaaaggtgttccgtcccgatgtgcccgttattttgatgacggcatggggaagtatccagcttgccgtgcaggggatgcaggccggcgcattcgatttcataaccaagccttggaacaatgctgctcttttgcagcgcatcgagacggcccttgagcttacggccgccccgaaagaggtgccggaagagcagactaccgcattgaatcgcagccatattataggcaagtccaaagggctgatggaagtgctgaacacagtggctcgcatagcccgtaccaatgcttcggtgctgattacgggcgaaagcggaacgggcaaggagctgattgccgaagccatccatatcaacagccaacgcgtgaagcagccttttgtcaaggtgaaccttggtggcatctcgcagagcttgttcgagagcgagatgttcggccataagaaaggggcgtttaccgatgccagcgccgaccgtatagggcgttttgaaatggcaaataaaggtactatcttcctcgacgagattggtgacctcgacccttcctgccaggtgaaactgctgcgcgtgcttcaagaccagacattcgaagtgctgggcgatagccgtccccgcaaagtcgatgtacgcgttgtgtccgccactaatgcagacctccgcaagatggtgtccgaacgtactttccgtgaagaccttttttaccgtatcaacctgattaccgtaaaactgccctccttgcgggagcgccgtgaagatattcctttgctggcacgtcactttgccgaccgtcaggcagaggtgaacggcttgccgcgtacggatttctcggccgacgctctgaatttcctttcccgcctgccttatccgggcaacattcgtgagttgaagaatctggtggagcgtaccattctggtcagcggcaagccggtgctggatgccacggatttcgatgcccaatatctgcgtcacgacgaaccggccaaagctgccgaaggtacttcttttgcaggtatgaccttggatgaaatagagcggcagactatcttgcaggcgttggaacagcataaagggaatctcagtcaagtggcagtgtcattaggcatcagccgcgctgcgctttacagacgtttggaaaaatataatattcaagtcccgtgcgcataaaattctttttcttcatactcgtcctttttctgctcggtctgggtggaatgctggtatatctgctgagtggaaagccttctttgtatctgtacgtattggaggggctcatcgggtttatccttatctatctgatagtattctataataagatagtgaagccgatgaacaccataggcagcggtatggagttgctgcgcgagcaggatttcagtagccgtctcagccgggtagggcagtacgaggcagaccgcattgtgaatatctttaaccgaatgatggaacagctcaagaatgaacggttgcgcatgcgcgagcagaatcacttcttggatttgctgattcaggcatctccaatgggggttgttatcttgacaatggacgatgaagtgtcgcaactgaatccgatggcggtaaagatgctcggtgtccgtatggaggaggcgatggcaaagcggctggaccagatggactccccgttggctgccgaactttcgtccattcccaaagacgagacggcagtggtccgtctcaatgatgcgaatatttataaatgcacccattcttcttttattgacagagggttcaaacatccttttttcttgatagagcgtatgacggaagaagtgatgcgtgccgagaagcgtgcctatgaaaaggttatccgcatgatagctcacgaagtgaacaataccactgcgggcatcacttccacactcgatacagtggagcaggcactttctacagaagatgatatggaggacatctgcgacgtgatgcgcgtctgtacggagcgttgtttctcgatgagccgtttcattacccgttttgcagatgtggtaaagatacccgaacctaccctggcacccgtccagctgaatgagttggtgtccatgtgcaagcgtttcatggaaggaatgtgcaatgaccgcaatatagagctacgtctggaatgcgacccggaggtgggaatggtgcgtatggatgcttctctttttgagcaggtgcttgtgaatatcatcaagaatgccgccgaaagtatagagggggacgccggagaaaacggacagcaaggtgagataatagtaaggaccactgcccccgcttctgtcgaagtcgttgacaatggtccggggataagtaaagagaccgaagctaaactcttcagccccttcttttccaccaagccgaacgggcagggaattggcctggtgtttatccgggaagttttgagccgtcatggttgcacgttctccctacgtacctacaacgatggattgacccgcttccgtatactatttaattgaaatttgaaagttttacctttcacctttcaattttctacttttaaagaattcttttgcatattcgtccagtatctttttaatgccttggccgatggtcgcatagtctttctcgtccagattggcgagtgaggcgcgcacgctccattcggggccgtcaaaaccaccgccgttcagcagcaccagagaggtttctttggcaaggcggaagactacgttcagcgggctgtaggtacgttttagatattctacaaagtcgtccccatagaacttctttgcccaaaccagcatgtcgatttctgtataataacctacgcgcaacgggtcttccgtcagcgtgaaaccggtattctcccaaagggcatgcaatcggcggcggataatctcctgcatcttttgcttgtatttgttttccttgtccagcagggcaaaggcggcgaaaaggcccatctgcatctgttgtggcaatgacagtccggcggtatggttcagtgccacctggcgactgtcggcaaccatacggtcgataaacttcagtttttcaggttccagagtgagggtggagtagcggcggtgcagaatctcccgtttctctttcggcagtttggctatcagcttgtcgaacagattgaattcgtgcagggcgatgaccgcattgcgccatccggtggcaccgaagtatttggagaatgaatagacgcaaagcgtattgtagggaatttctgccatgaacgaacggaagtgcggactgaatgtaccgtatacgtcgtctgtaataatcatcagattagggttgtcatttctgacgatactcacgatgcgcgccattgtatccggactgagtgtgtagctgggcggattactgggattggtgacaaagagggccttgattttagggcttttcaagcggtctatgtcttcgtcgctgtactgccagaggtgcatcccttcgttattcatgcggttggcatgtattttggtcactcgaaactggtagcggctgagttgtgggatttcaatatagggggtaaaggcaggaaccatgaggacgatgccgtcccctttgttcagcaggaagttttcctgcagggagtcgaagatgtagcacatggcggctgttccaccttcggtggcaaacaggtcataggcaccccggggaggacggttgtcgcacatctcttgcgaaaggtagtcttgcacaaggatttccgtaaaatgaaggatgcggtcgggcacgggatactggtcgcctacaatgctttcggcccattcgtgtacaaggctgtcggggtcggcggcatgctgcatcagcaggtagttgtaggtttgttccagcaatttggcgcccggtacgttattgttctttttcaggaaggcttcgaagcgagaggcaatgccttttttttcggggatgcctgcaattccctcgggcaaatccatgatgcggcggcactcttccaggccgaagcttcccaacaggaagaaggcttcgcgtggagcggttgcaatccagttggggttgccgcgccctgcgttcagcatggtacgggcggttttcttcagactctcgtctgccatgtctatcaggcggttcttcagttcgaaaggactgatagattccattttcttttctaaaagttttgtatccataagctcaagtttaggttcgttatttattgttttcagtcattcggtgaataatctctgttcatgtggcggactatttctttccttgcttgaaattaatcgtccgatatatgtttccttttcgtccgacagttgttaaatcatcgtccgacaactgttgaattatcgtccgacagctgtcggacgaatagctattagtgaatgggtatatagtcgcttgcatttccggcaataattctttgaatggttcggattagtaagtatcggcacagaatcgtcttatagtagcaaaacgatgactacaccccatattattaataaggtattgcccacggcataggtcacggtgtatcccagagcaggtgtctcactctcaacggcatcctgcaccgcgcctaaagcggccgtagtggtacgtgcccccgcgcagacgcccaaagccagtgccggatggaacttgaaaacataccttgccagcagcaagccgataatcagcggcagggcggtggcggctgctcccaccagaaacagactgatacctacgtcgtggaagccctgcacgaaactgggacctgccgaaatgcccactaccgcaatgaacatgttcagaccgacattgttcaacacccattgcgaaggttcgggaatgcgcccgaaggtggggtgcttactgcggagccagccgaagaacaagcccgcaatcaatgcgccgccgcttgtgctcaagctgatggggatgccgccgatatggacggaaagtgctccgaacaaacctccgacaaggataccaaggcctacgaatatcatatccgtctggttggtagggcggtctatataccccagacgtttggctgctgcttccacttcctgcctggtacctaccacttcgatgacgtcgccggcatctactaccgtttgtgccagcacgggaatggatattccggcgcgcttgatgctccggatactgacaccgtgcatgaacttttcccttcggatagctgcaaccgtcttgccggcaaccgtcttgcgtgtgattgtaaccggtaacttttcggcaggaaaatccaggagctgggcatcttgtacttccggccctatccagctttcttcgcctatgatgtattcgcggcgtccgcttagcactatttcgtctcccggctctatccgtaggttcatgctgacttccactacaattccggatttgcggaggcgttccacaaatagacgtttgtcgtgctgccggaagtagacttccaggtcaatcacccgctttccattcttgaaccattcgttttcgacccggtaggcacggaaagtgacggggcgtgccgccggcatgaatcccggttcgtcagccagagagctgcccatcttcgcctccagttccttgcaggcggctttcaccttttccagcccgcccagcatcttgggaccgatggatgataggacccatgccgagcctgcagtaccgaaaatgtaggtgacggcgtaggatacgggaatgatgttgacgtaactttgtcgttgggcctcgtccagtcccatattggccatggtgtcttctgccactccgatgacggcggagatggtttgcgaaccggccagcagtccggcagcttcaccggcattgtagcccatcatcagggccagcagccaggtcactaacagtacggatatacacatcagtacggcaaagcccacttggggcaatccgtcctttttcagtccgcggaagaactggggacccactttatagcccacggcaaaaaggaaaagcagaaaaaataccgactttatcggacccggtacggctatgttcagttgccctaccagtacgcctacaagcagtacactggtcactgtgcccagcgtaaacttaccgatacgcagtttccccagccagaatcccaggaatatagtgaggaaaatggcaagttcggggcgttccctgagctggttgaaaatccattccataatcaagttgtttaggttatatattggttgttccgatgctttctggagcgtcgtttcgctatacaacggcttttaacgggaagtgttttatacaaaaggagttttttagaacatttattccgtaaaaccgaactttaagaaaaagttttcttccgtacctttgccatccaaattaggtaaaacaaggtatgaagttgttttttagggtatttctgcttatccagctggttactcttccattgagagcacaatatatggtgcaaggcgttgtcaccgattcgttgacgaaggagccgttgccttatacgtcagtttatctgaaaggaactacggagggagggatgacggacaataacggccgtttttccttcaagacctatcgcccggaggccacgctggtcatttcggccgtgggatataatgaatatgtccggctgattcatcctgcaaagtcttctaagttcaatatagccctttcgccagccacttatgcactggatgaggtggtggtgaagccgaaacgtgaacggtataagaaaaaggataatcccgcagtggagtttgtacgcaagatgatagagcatcgggatgactactcgcccgacgaacgcgacttctggaaacgtgaccgctatgaaaagatgacttttgccatcaataacttcgacagcctgaagcaacagaagtggctttaccgtaagttcaagtttctgacggattatgtcgatacctctgccgttaccggcaggccggtattggccatctccaaccgtgagttgcttgccacagactattaccgcaagtctccgcatagccggaaacagtgggtcaccgcccgcaggcaggcaggagtggacgaaatgctttcgcagcagggtatggaacaggctatcagtgtcaccatgaccgatgtagacctttatgagaacaacatcaccttgttcaccaataagtttgtcagtccgctatcctcccttgggccgtctttctacaaatattatctgatggatacgcttaccgttgccggaaagccttgtgttgacttgacatttgtccctttcaactccgagtcgttcggttttacgggacatttatacgtcatgctggacagtacctattttgtaaagcgtgccgtcatgaactttcctcagaaaataaatctgaactttgtggactacatgaagattgaacagaattttgaccgcgcggaggacggtacgaggcagttgctcaatgagagtatcactacggagttcaagttggtggacaatagtgacggtatttatgccaagcgggatgtgtattacagaaattatcagtatgaaccggatgacaaggctctgcaggctttccgaaaaccggaaaaggtgattgaagagacatcggcttccggctattcggaagcatattgggatgccaaccgccaggtggaggtcagcaagaaagagacttcggtggacaagatgatggcccagttgcgcagctatcccgtttatttctggacggagaaagtgttgaaggtgctgttcacggggtatattcccgctccgaaggaaaaagaacctttgttctatatcggtatgatgaataccactatcagcggaaatacattggaaggggtgcgcttgcgtgccggcggtatgacgacggcatggctcaatccgcatttgttcggcaggggctatatggcatacggttttcgcgaccatcgtgtaaagggactcgccgaactggaatattcttttcataggaagaaggaatatgccaatgaatttcctatacattcgttgaagctccgttacttgtcagacgtcaatcaatatggacaacactatctttataccagtcaggataatgtttttcttgccttgaaacgtcagaaggatgaccgtatcggttatcagcggaaggcggaactgacctataccaatgagttccattccggcttttccgtgcagatgacgacgcgtctgcgtaaagatgaatcatcccatctgattcctttcgtcaagcaggacgaccataatacgtatgtaaaaagtatttcgaccagtgaactggaattgaagctgcgctatgctcccaacgagaaattcttccagacccaatggaaccgtttccccgtttcgctggatgctccggtcttttcgcttacacataccatggctgccaaaggggtactgggaggagactatacctatcactatacggaagcgggttttcaaaagcgtttctggttctcggcattcggttatacggacgttatcctgaaagccggaaaagtctggaataaggttcctttccctttgctcgtcattcccaacgcgaacttgtcctataccatacagcccgagtcctattcactgatgaatgccatggaattcatgaacgatgaatacgcttcctgggatgtgacctattacttgaacggctggctcttcaaccgtattcctttgttgaaaaagttgaaatggcgtgaagtgctttcctgtcgcggcttgtatgggaatttgagtgataagaataatccggcttttcagcaggatttgttccgttttcctgccggcagcactacaatggggcatacgccatacgtagaggcaggtgtaggtgttgaaaatattttcaaagtattgcgtgtcgattatgtatggcgtttgacttaccgaaatttaccaaatatcgacaaatccgggctcagaatcagtctacacatgacattttaacttaaatcttactaataggacattaaatcggataaaatgactaatcccaattgagtaaaataccctaaatttgagcaattttttaaactctaaataatacaatggcaatgaaagaaaacattaagccggcaaccggacgcctgggcgtgctggtagtcggagtaggtggtgcggttgcaaccaccatgattaccggtacattagctgctcgcaagggcttggcaaaagctataggctcaatcacacaaatggctgctatgcgcatgcaggatggcaaggaaaaacttatcaaagacatagtgcctttggctgatttgaatgatatcgttttcggcggttgggacattttcccggacaacgcctacgaagctgctatgtatgccgaggttttgaaagagaaagacttgaatttggtaaaagacgaactgcaagccatcaagccgatgcctgctgcattcgaccacaattttgcaaaacgtttgaacggtacgcatattaagaaggctgctactcgctgggaaatgacagagcagttgcgtgaggatatccgtaacttcaaggcagccaataactgcgagcgtattgctgtgctgtgggctgcaagtaccgaaatatatattccgctgtccaaggagcacgaatctctcgctgctttggaacaggcaatgaaggaaaacaatactgaagtcatctctccgagtatgtgctatgcatacgctgccattgcagaaggcgctccgtttattatgggtgctcctaatctatgtgtggatactccagccatgtgggaattctccaagaaaatgaatgtgcccatttccggtaaggacttcaagagtggccagactttgatgaagacggtgcttgctccgatgttcaagacccgtatgttgggtgtaagcggctggttctctacgaatattctgggtaaccgtgacggcgaggtactcgaccaaccggagaacttcaagacaaaagaggtcagcaagctgtctgttatcgacaatatcttcgaaccggagaaatatcctgacttgtacggtgatgtttatcataaggtacgcatcaactactatcctcctcgtaaggataacaaggaagcatgggacaacatcgatattttcggctggatgggctatccgatggaaatcaaggttaacttcctgtgccgtgactccattcttgctgctcccatcgcgctcgacttggttattttcagtgatttggcattgcgtgcaggcatgtgcggcatccagacgtggctgtccttcttctgcaagagcccgatgcacgatttcgagcatgagccggtacacgatttgttccagcaatggcgcatggtgaaagagactctccgcaacatggtgggtgaaacagcaccaagttatctggattaaaaaaacagtgataaggtgatagaaataaggtggtaaggtgatagagtgatagcactttaccactttatcacttttattactttattgcatttatcactttaccgtttttatcgcatttatcacctcattacttttttgatgaagaaaccctccctcctcccagtcattatcggtacgggctttggctcgggcttttctccttttgcacccggcactgcgggagctttgctggctacgcttatctggttcgggttgtcttatctggtttcaagtgtctgccttttgtggctgacagtagcattgattttggtatttacacttgccggtatctgggctgccaaccgcctggaggtatcttggggcgaagacccttcgcgcgtggtggtcgatgaaatggttggtgtgtggattgccttgcttgcggcgcccgccggacatgtatggtatgcattgggagcatttgtcttgttccgtttgtttgatatattcaagcccttgggcattcgccgtatggaaagtctgccgggtggaatcggggtaatgatggacgatattctgtctggagtctacggatttataattttgattgtggcaagatggataatcagttgaaatcaaatggcaaaggtgtgtcgtggcgccattctgtctggatcttcttcaaggcccagatttctgcgcaattcgcaagctttgtcgattttctggtgactatccttctggtaaaggcttttgctgttttttatctttatgccacattcacgggttccgtggtaggaggcattgtaaactgtgccattaattacggatgggtgttccatgccgaagactgtaagaaaacgcatgttgccgtgaaatatctctttgtctggggaggcagcattatactgaatacctggggcacttttgcactgaccgagtggcttacgggcatgacatgggtcaatgggctgttgggatattatatagacaatgtatttattctgtcaaagataatagtagcagtgctggtagcttttttttggaactaccatctgcaacgttttttcgtttatcgtaatcacaatataaaaggctttctgaaacattatttagagaacaaaaaagacgaatatgaattatagagattggttgcagcaggtgatatacaagattatcaaccctgtggtgcatggtatgattagaattggcattacgcctaactttattacgactacggggctggtgctgaatatcgtggcggctgccttgtttgtgtatgccggggtgtacaagagtggtgaactggcctatgtaggctggggaggcggtattgtgctctttgccgggttgtttgacatgatggacggacgtgtggcacgcgtgggtaaaatgagttctactttcggtgcgctctacgactccgtactcgaccgttacagcgagctcgtgacattgttcggcatcttctattacctgatgctgcaaggctatttgtggggctccatcattacattcattgcgctgataggctcgctgatggtgagttacgtgcgtgcccgtgccgaaggcttgggactggagtgtaaagtcggtttcatgcagcgccccgaacgcgttgtgctgactgccctcggtgccatgttctgcggtatctttggtgattgtactttattcgacccgatgctgatactaattgtgcctatggcagtgattgcaatattggcgaatttgacggcatttgcccgcttggcgcattgctataaactactgaaagacaaggaatgaaaaatagtttgtttccctctgtgagagaggcagtgctggtgattgtcatcacagcgtttttcctgattctgacagcggtctgtatcgggcttcgtccggaacatttcctgatggggggtgtatttctgttattgttctttgccggacagacaacccgtaagttggcagtggcgctgttgccgtttttcatattcggcatttcgtatgactggatgcgcgtatatcccaattaccaggtgaatcccattgatgtaaaaggactttatgaggcagaaaaatccctttttggcttgtctgtagacggtgctgtccttatcccttgtgagtattttgctttgaaccattgtcctgttgccgatttctttgccgggatattctatctctgttgggtaccggttcccattgcattcgggttgtggctctatctgaagggtgaccgtaaggtatatcttcgttttgcgatggtgttcctgctggttaatctcatcggttttgccggctattacatccatcccgctgctccgccctggtatgccatgaattatggtttcgagccgatactcgacactccgggcaatgtggccggcttaggacgttttgacgaattgctgggatgctccatcttcaactccatttacggaaggaatgccaatgtatttgcagcagtgccctcgctccatgccgcctatatggtggtggctttggcttacgcggttatggaccgcagcaaaaagtggttgatagcgttgtttgcggtgattatggtcggtatctggtggacggctgtctattcgggacaccattatctgattgatgtgatgctgggcatctcttgtgcattgctgggtatttttgtttttgagaaaggactgatgaagtggggagcgttcggacgcttctttgaaagatacagtcgatacattaaataaggtatacaatgaataattttgttttttatagtcctacagagtttgtctttggcaagaatactgaagtgcaagtcggtgcattggcgcgtaagtatggtgcacaaaaagtgatgatagtatatggaggcggttctgttgtacggagtggtctgctggatagagtgaagcaatccttgcaggaagccggtgtggcttattgcgaaatgggaggtgtccagcccaatcccactgacgggaaggtatacgaaggtattcagctttgccgtcgtgagcaggtggatatgatgcttcctgtgggaggtggttcggtcatagatacggcaaaggccattgctgccggagccctctatgatggtgacttttgggatttctttatcggtcgtgccaaggtggagaaagcgttgaaagtagccgtggtgctgactatcccggctgccggaagcgagggttcgggtaatacggtaattaccaagacagagacactccaaaaactggggctctgtgcccccgagcatttgcgtcccgtattttccatcatgaatcctgaactgacctacacccttccggcttatcagacggcttgtggtattgccgacatgatggctcacatcatggagcgttatttcacaaatacaccggatgtggaaatcagcgaccggctttgcgaaggcaccttgacagctatcattaaagaagcttaccgggtgaaacagcaaccggacaactatgccgcgcgtgccaacattatgtggtgtggcactgtggcgcataacggaacttgtggggtagggcgtgaggaagactgggcatcccatgcactggaacatgaaatcagtgctatctataatgtagcccacggtgccggcttggctgtaatcttccctgcctggatggcttttatggcggaacataatccggcaaagatagcccagtttgcccatcgtgtttttgatatacccaagtccgaagatttggaagagatggctttggcaggtactgcccgactgaaacactttttccgttacatgggcttgccggttggctttaaggagttgggtatcgagcatcccgatatagaccgtatgctcgtcggtctgcggcgcaataaaggcgaactgcttggcaactacgtgaagctgaccatgactgattgcagggaaatctattgtttggctttataacgaaaggcatgtttggggagagctcccccaaagcaagagctaaaaaagacggcgaagataaatacccttcgccgtcttttttatttgatttcgatttcttccttcatgtctatctcttccccttgcaggtcgtagaatacatattccaggaatgctaatttctggtttggaataatcttgataccgaatccgtacttcatctgccacttccgtttcaaggagacgagtccctgattgacgtaggctgcgatgtacgggtggatgtgtaacgagaatttctttatcttcaatttgttgaccaggtagtcaatcttactctctaaggtgtccgtaaagaggatggacgatttgatggtgcctttaccgaagcaggtggggcaggtttccgtcgtatttacatccatagccgggcgtacacgctggcgtgtaatctgcatcagtccgaatttactgagcggcaggatgttgtgacgtgctctgtctttctgcatgttggcacacatacgttcgtaaagcttctgtcggttttcggcttcattcatgtcgatgaagtccaccacgatgataccacccatatcccttagtctgagctggcgtgccagttcgtcggctgcacccagattcacttccagtgcgttggcctcctgcccgttggcattcttggtgcggttaccgctgttcacgtctactacgtgaagcgcctcagtatgctcaataatcaggtaggcaccacttttgtatgaaatggtcttgccgaatgacgacttgatttgtttggtgataccaaaattgtcgtaaatggggagttgacctttgtacagcttcacgattcctgcccgttcaggggcgatgagggttacgtaatccttgatttcgtggtacacagcctcgttgttcacgtggatgttttcgaaggaaggattgaacaagtcgcgcaacagtcctacggcacggctggtttcttcgtaaatcagtgtcggaaatttggtggccttctgtacttttgtaatggcatcttcccaatgtttcagtaatactttaagctctccgtcgagctcggcaacacgttttccttcggccacggtgcggacgatgacgccgaagtttttcggcttgatactcatcaacagttgcttgaggcgtgcgcgctcttcgctcgatttaattttttgtgatacggaaaccttgtcattgaagggaatcagcacgaggtatcttccggcaaaggaaagttcggaagtcagtcgcggccctttggtagagataggttccttgacaatttgcaccactacttcttgtcccaccttgagtgtgttggaaaccgttccgtccttttcaaggtcgggaagtatggttgctttggtaatgggattcagcttcttcttgtcgcttaaagtttgctttacgtacttctctaacgagttaaattgaggacctaggtccagataatgaagaaaagcgtctttctcgtaacccacgtccacgaagcaggcattcaggccgggcatcaattttttgacgcgtcccaaatacatgttgcccaccgagaaggagatgtttcttccttcgctctggagttccaccagctgcttgtcttcaagcagtgcaatggatacctctttgggctgtacgtctacaacgagttcgcttgtcacaataattggcttttaaatgattcaatttactacttaaacaaagaacaaacccgcgagacattttgcttcacaagtttgttctttattttgtccttcagactaaaaattactttttgcttttatgtctgttctttcttagtctttttttacgcttgtgcgtagacattttatgtctttttttcttctttccgcttggcatagcttcaaaattttatgggttaatactattgtttattatttcttcactgagagggtgaacgtttttgcaggcttaaatgccggaatgttatgttccggaatgattattgtagtgttcttggagatgttgcgagcagttttctgggctcttttcttcactacaaaactaccaaacccgcggaggtaaacattttcatctttggataaagatgcctttactgcgtccatgaatgcttcaacggttgtaagtacggttgtcttatcaattccggtgttctttgtaatttcgtttacaatatcagctttagtcatttttctttaaaaaaaatattattactatagttttcctaattttttggactgcaaatatatagcttttccgtggctctaaaaaatatatttcggacaattttctaaaaaagtcttggcattaagctttgttaggctgaaaatgaagtatttttgcagcatgaatatttttagcggaacattgttggactggtatgcggagaacaaacgcgaccttccgtggcgaaataccacggacccttatctgatatggatttctgaaatcatcttacaacagacaagagtggcgcaggggtatgagtattttctgcgtttcataaaacgcttcccggatgtggtgtcgctggctgctgcgtccgaggacgaagtgatgaaatattggcagggcctggggtactattcgcgtgcccgtaacctgcatgccgcagccaaaagcatgaaggggacatttccgaaaacctatgcagaggtacgtgccttgaagggagtgggggattatacggcagcggccatctgctcctttgcctatgacatgccttatgcggcggtcgacgggaatgtgtatcgggtgctttcccgctatttcggcattgatgttcccattgattctactgaagggaaaaagacttttaccgctttggcgggtgaggtgctcgataaatccaggccggcagattataaccaggcaattatggacttcggagccgtgcagtgtacgccgcagtcgcccaactgtctgttttgtcctttgtccggcagctgccgggcattgtctgaaggaaaagtgcagcaactgcccgtgaagcagcacagaaccaagaccaccaaccgctattttaattatatatatgtacgcatgggcgcgcataccttgatacataagaggacggaggacgatatctggaaaaatctctttgaattgcctctggttgaaacggaaaaagatttatccgaagaggaatttctggcatgtccgcagtttcatgcgctgtttgcagagggagaggtacggatggtccgtatactgcttcggggggtgaagcacgtattgtcccacagagtgatttacaccaacttctacgaggttactctgcccgataattcgagctccttctcaagttaccaacgggttgcagtcgaagatttgggccgttatgcggtaccccggctgatacatgctttcttggagaaatatgtataaaagttgtttgtattcttgcatggtgtgaatattctcgttaattttggcagcaaattaataaaatagaagcttatgtcagtaaataaagtgatattgataggaaatgtgggacaagaccctaaaataacctattatgaaggtggaaactgtgttgcccagctttctttggccactacggagaaaggatacactttgcagaatggtacgcagattccggaccgtaccgaatggcataacctgatattccgtggccgtttaggcgaaatcgttgagaaatatgtgcataaaggcgataagctttacgtggaaggtaagatacgtacccgttcttacgatgaccagggaggcatcaagcgttatgtgactgagatatttgtcgacaatatggagatgctgaccccgagaacggccacttccggtgccgccccttatgcgccgcaggcgggagctgccccccagccgcaacaaccggtacagccgcaggccatccctgcacaagataacccgacggacgacttgccgttctaattgtttaactaaaaccaaaatctttggacccagacgcttatttatgccagttggcagatgtttttaacggtatatccgtacagactccttctatttcggccgttgtagccattgtgttggcaggtttgcttttgcttgtttccggttttgcatcagcttccgaaatagcctttttctctctttctccgtcagacctgaatgcaatagcggagagaaagcatccttcggatgagaaaatcagtaatctgctggacaacagcgaacgtttgttggcaacgattctgattacgaacaacttcgtgaatgtaaccataatcatgctctgcaacttcttctttatgaatgtgttccaatttcattctcccattgcagagttcctcattctgacagtagtccttacatttttgctgttgcttttcggtgaaatcatgcctaagatatattcggctcagaagacgctggctttctgccgttttgccgctcccggcatcacgttttgccgttccgtattctatccgatggcatctatgctggtacgttccacctctttcttgaacaagcatatggtccgcaagaaccataacatatcggtcgatgaactctcgcatgcgttggagctgaccgacaaggcagagctttcggaggagaataatattctggaaggtatcatccgctttggcggggaaacggccaaggaggtcatgacctctcgccttgatgtggtggacctggatatccgtacccctttcaaagatgtggtgaagtgcatcgtagagaatgtctactcccgtattcccatctatgcggatagccgtgacaatatcaagggggtgctttatatcaaggatttgcttccccatctgaacaaaggggataatttccgttggcagtcgcttatccggcccgcctattttgtgcccgaaaccaagatgattgatgatttgctgcgcgatttccaggcaaacaagattcatatagccattgtggtcgatgagttcggtggtacgtcgggcattgtcaccatggaggacattattgaggagattgtgggcgaaattcatgacgaatacgatgatgaagaacgtacatatgccgtactgaatgaccacacttgggtatttgaagccaagacccagctgactgatttctataaaataacgaagatagacgaggaaacgttcgatgaggtggcaggggatgccgatacgcttgccggacttctgctggaactgaagggggaatttcctgctctccatgaaaaggtgacctacggccgttatgagtttgaggtgttggagatggacaaccgccgtatcctgaaagtgaagttcacagtaaatgccccggcagaacccaactcttcttccctttaatttttaattattaatttttaaattgttccgtgcccctcttcttgcaacataccgctcttccctgtcgatggggaatttggaaaacggaggaatctccggaggaattgctggccatgcttcctcatcaggaagtataccgggaaggtatgcggcgcttcaccgcggcacaccgccgtttggagtggctggctgtccgcgtattgctttatactctgtcgggagaagagaaagagattgcctatcatcccagtgggaaaccttatctggcggatgactccgcctctctcagtatttcgcatacgaaaggttatgtggctgttgtcttgggattgccgggtcgggaagtgggtgttgacatcgagcagtatggtgagcgggtaaggaaggtggcacataaattcatgcgcgaagatgaacagccatccgtgtttcgcggaacagacacttggtcactgttgctgcactggtcggctaaggagaccatgttcaaatgcctgaatgcttccgaggttgattttcgcgggcacatgcgcattctgccttttgctgtaaatgaaagcggcgtattctccgccgaagaatatcgtacggtggagaaacgccggttcactattcattattatttgtttccggattttgtcttgacattgagtctgtaaatctcttacagcctttccagttgtaccgtgaagtgtctcatcaacggagcttcccaggtgatgcgcactccgcgggtaatactttcccgtttgtcatatacatttttcaaagcggctgccaccacatccatgtggttgttggtatacacgcggcgggggatggcaagccgaagcaagtccaggccgttgaagcggttttcgcgggtcaccgggtcgcggtctgccagcagatacccgatttcgcagccgcgtatgcctgcttccagatagagctcagcggtcagtgtttgtgccgggaattcttctttgggcacatgtgtcagcactttgggggcatccacaaatatggcatggccgcctgcgggacgttggtagggtatcccgtactcatccagtttcatggctagatagcccacctggtgaatgcgggtttccagattgtcaaattcagtattttcatccaggccgatggcaagggcgttcatgtcacgaccgttcatgcctccgtaagtaaggtagccttcgaactgcacgcagaagcctttggcaccttcataccagtctttccggcgggtggctatgaatccgcccatgttgacaataccgtcttttttggcactcatcgtcataccgtcggcaaggtcaaacatctcgcgggtaatttcctttatgctcttgttgcggtaaccttcttctctcattttgatgaagtaggcattttccgcaaagcgtgccgagtcaaagagaacgggcttgccgtacttgtcggcaatggcgcggacttcgcgcaggttctgcatggaaaccggctggccgcctgcagtgttgttggttatggtgacgatgacgaacggtatccgttcgctatgttcctgtaatgctttttcctgttttttagggtctacattgcctttgaagggaatttccagctgtgtctgtttggcttcgtctatggtgcagtccagagctaatgcccggcgtccctcgatatgtcctttggtggtgtcgaaatgggagtttcccggcacaatgtcgccctcgtgcaccaagtaggagaagagtacattttcggcagcgcgtccctggtgggtggggataatgtattcaaatccggtgaggcgggtgatgacttccttcagtttgaagaatgaggtggctccggcatagctttcgtcacccagcatcatgcctgcccattggcggtcgctcatggctccggtgcccgagtcggtgatgaggtcgatataaacttgttccgatttgagttggaatacgttgtagtgggcctctttcagccattgttcgcgttcctggcgggtacttttgcggataggttccaccattttgattttccatgcttcggcaaatggtaattccatagactctgtatctttaataatttgacaataggttaacggataaaccgattattgcggtttaatgtgccgaatttagacaaaatctatgtaataaccaatttaaatatgactttttgtaatgtaaatgtccggacgaaatcacttcggccggacatcatcaaataaacttggcagagtttattaccttctttactttctctgaattaggtttgatgaatgaaatgatggacggtttgtccggctcattagactcaacgctttttcctcgaaagcaatgataaagtatgcatggcaggtcttctgacttgtttctgttgcaggcgccttcccggaagaatattccagtggcatagagtaattgtctgcaacgttgcacgaaacttacagcagcgggactgtccaggatttacacctgattcccttttaatcgctttcccagaagagggggagcgaaccaatgcatgacaaagatacggattctttttgagaaaacaattctatgagtgataaattttcttcccctctctctttctttttgccgacaaattggcaaggttttgccaccctcttggcaagactttgtcaccgcgttggcaaaactttgccataggcatggcaaaagtttgccaaaagcatggcaataggttggcaaaattactctctgattgatagtgacttaaggcgatttaagcaatccgtcatgtcggtaaggtgaaaagataccaatacaagccacacttgccacaagaaccttctccagaggtatgcaaagcattttgtttggtgtggtaaaacgggctgttatctctcttttgccagtgtgaatacaaactccagtcctccaccttggttgtttttggcagagatggtgcctccgtgaataaggactgcattcttcactatggcgagccccaagccggtgccgcccaacttgcgcgagcgtcctttgtctacacggtagaagcgttcgaacaaacggttcagatgttcgggagaaacgccgatgccggtatcggcaaaactgaaatagtagtaattctcgtcttcgcggaaacaactgatgttgatgtgtatgttggtgccggcataagcgatggcgttgtccatgagattgcggaagatggagtagagtagagagtagttgccccgcaactgtatcttcggttttagggaattgacaacggtgatttgcttctgttccagttccagggacacttcgttgacgatgtttgaaaccagcatgctgatgtccaccttttccatatcaatcatgttggcggcttcgtccatgcgggtcagtacggatatgtcgcgcagcaggcggctcaggcggttgctttgcgcgtagcagcgttccaggaagacctgcatcttttcgggtgcaatgttttcgttgttcacgatggtttccagataaccttgtatgctgcttacgggggttttcagctcgtgggcgatgttctgggtcaactgccgtttcagccgtacttgctcttcttcctgggtgatgtcgttgatggaaatttcaaagctgaggtcttggaagatgatgcactccacgatgaaggtgcgtccgttcttgttgatgtgtacggacatccttcgttcttcgttgtaggaggggcgcttctgcgccttgttgatgaaatccgttatcttctggaattcgcagatggagaatatctcttcggtagcctgcaggttggagtctgaaatcagattgccgtattgggtgaacagattgtttaccaatatctcctttttgtctctgttgaatacgcccagtccttcgcgggaggtttgcaaatgggtgataagcttttcgcgctcaatgtaaagcgcctctttggtttcgcgcaggcgcttgtatatctgtatgatatgctgcgaaatctctccaagctcattgtgcgggaaggcggcttgtatgtccatgtctatgggttcgttcttgtcggcccttttggcaaactcgcgcaggtggttgatggcgctgcccagtttggaggtgaatttgtagaagacggatatcagcagcagtgatacaatgaccgtgaaccagatgtagtgtgggtcggcagccagattgttcatcaggttgacgttgtaggggagggctgagcggatgatacagccttcgtaggcggtggcagaatagaaataggtcttgccggtggtttcggagatgcgccgcaggtcatagcccttgccgtctttcagcgctttctgtacttcggggcgtttgatgtggttgtccagttcatggctgtcgttctgggagctgtcgaacaatacgttgccatgaaggtctaccacagtgacgcgcaattccttgttcacatgcttggagatgtagctgtccagcatggaagtccataggctgtcggggaggtagcgaagctcctggtgcagtctgtcgttataatcttgtagctgcatgtccagcagctccactttgtattccttttcccgctgatactggtaggcgatgaagcaggcggcgaatacgaggaacagcgagatgaccgaaaggaaaagcttccggctgaaggacagaaagtgtctgtcgttattcggcttcgaaacaataaccatatcccaagcgtgttacgatacatttgccataaactccgattttcttgcgcagacgtgtgatgttcacgtcgatggtgcggtccagcacatatacttcgtcgctccagatgcggttcagtatatcctcgcgcgagaatacgcgtcctttattctgcaaaagcagcaataagatttcaaattcttttttggtgagcggtgcctcttcgccgtcaatgcagactttcttcttgatgatgtccagtaccagcgtcttgtagacaatctgttccggtgcatgttccgtttctccttgtcgggtgcgtctaagtacggctttgacacgtgccgccacttcgcgcagcgagaagggtttggatatgtagtcgtccgctcccaggttgaaaccggtcacggtgtcattttccgtatctttggcggtaatgaagatgatgggtatctgggctgtcttcttgtccttcttcagcatgctcgccattttgaagccggaaatttctcccatcatcacgtccagcagtagcaggctgtagctgccaatgtccattctcagagcttcttcagcggagtttgccgtatccacttcgtagccttcgttttcgaggttgaacttcagaatttcacataagtcttcttcatcgtccactactaaaatccggtaatcgttcattgctttgttgtttatgtatgacaaggataaaacaattctcttgtcacaaagttaaactttatttctttttatcggcaaaaatagtgcaaaccgaatgcagaattttcatgtttgcatgaaaacttgtgctgagatgcaggccatttctactttctgggtacaaaagtgaggctaatttgttacggaatgatgaaacaagtgttacatttgggttacattaaattctcgtttatctaaaagccctgtcacatataaaatattatctttgccaggtaaatattgaattgtatgaaagaacttatgtatatcaggagtttctctaaaaggcgtttgccggttattgtgggaactctgcttttagtgataatcggctctgtctggctgaatacggctcctttccgttcgggctttgatatcgcggatgagctgggcggtaatatattcccttccagtatcctttcagtggctaccaccgatgctcaggtcatagtgccggtagactccatgtatgtaggtaatccgaagtcgtgcatcgctgtccgtgtccgttcgaggaatgcttatagccgggtgcgggtagaagttgcggagactccgttcttttcccgttcagtgtcggagtttgtgttggcaaaaccgcgtacggagtatattatctatcctgatatcatatggaattatgaggctctgaagaataacaaccaggcggaacccattagtgtggccgttatggtagagatgaacggtaaggatttggggcagagggtgcgtactttttccgttcgcagcattaatgaatgtctgttggggtatgtcacgaatggtacaaaattccatgataccggcatcttttttgcagcatatgtaaatgaggagaatcctatgattgacaagctgttgcgtgaagcgctggatacgcgtatcgtcaaccgttttttaggctatcagggaggtgccgaagtggtggacaggcaggtttatgccttgtggaatgtactgcagaagcgtaagttccgttatagctcggtctccaatacgagcctttccagcaatgtggtcttttcacagcgtgtgcgcacgttcgatgacgccttggagtcctcgcaaatcaactgtgtggatggaagtgtgctttttgcttctctgctccgtgccatcaacatagaacctatattggtgcgcaccccggggcatatgtttgtaggatactacacggattccagtcataaagacatgaatttccttgaaacgaccatgattggtgatgtggatttggatgatttctttccggacgaacagttggattcgacgatggtgggaaagtcgcagaaccagatgtcgcgcatcacctttgacaagtccaaggagtatgccaataagaagtatgcccagaataaggaaggtattcattccggcaaactgaactatatgtttctggaaatatccaaagaggtgagaaggagaatacagccgatagggaaatgaggcgggggggtagggctgttgaaatgtggaattgtagttggattttgtgtggatggtacttatgaatttatttctgttttttttagtactttgggaacttagtttatatttattgttaccattcccctctagcaaataatatctgttgataattatatgttgctgaaaatcaatgttataaatattttttttattttttctatatgtaacttgtctatcagatacttgatttcaaataattatttttttgaggtcttatttgaactgatctcttctaagtgaatattgaatggagtgattcttcttaattataacttacatatacacttcgttataaaattatgctccaaaaagatgtgttaatatatgttacggacacttcctgctttcattaataatctaacattcttttttgatgaacttatgaattcttttagctaattcactttccattttttttgatttatacctatattttcatacagttgagtttgttttatataaaaaaactatatgcatatgatggcatattaagtcatatatctcaaataatattacatatgatagatatatgtataatattctattatttataagttatttggctttattatttgtctatatactatcaatatgattaagacttgatattctaaataattattaagctttgatttaaaactttgcaaaagtataaatgcaaatgttttaatattcatttagtattttttaattcattcaatagcagattttctaaattaattcatatgtttgcaaacaaatccaaataaaagagcttatgaaaagaaattattgcttatcattagtgttgcttgcattgtttgggatgtctgcaccttttgctgccaatgcagcgaatgaaagtgtgctaagttcccaaagtactcagcaagccaagaaaatcacaggtaaagttttagatgcagcgggcgaaccaatcatcggtgccagcgtgctggtaaaaggttctggtaccggtgcggtgacggacgttgacggaaaattctctgtagaagcgccggcgggtagcacattggagatatcctttattggatataaaactgctatgcttaaagtgacaaatgcttcttcgtattcagtgactttgcaagatgattcgcaaacattggatgaagtggtagtgacagctatgggtattaagaaagaccggaaatctttgggatatgccattgatgatgtagatgcggaagagcttatgaaaaataaaagtgtgaatccgattaactctttggctggtaaaattgctggtgttaatattacgcaaggaggtggtgctgccggtgccggttctcaaatcattcttcgtggtgggacttcgcttgaacgtgacaatcaaccagtatttgttgttgatggtgtaatctatgataactctactacagtagttggtaactctgcttttgatggtagtttatcgacagcttctaccaattctaatcgtgtaatggatataaaccctgaggatattgaaaacatgtcagttcttaaaggtccggctgctgctgctctttacggttcacgtgctgctgcaggtgttgtaattattacaaccaaaaaaggaaaggagggagccgttgaggtgaatttctccactaagtatatcacgcaatgggctacttctcttcctaaaacacaacggaaatatggaagagggtttgctgaagatcagtacaccgatggaaaatatactggaacgacttataatgattttagttataattcatggggagcacctattgacaatggggcagtaacctatgataatatagatgacttttttcaacaaggtggtgcatgggataccaatataagcgtggctggtggttctaaaaatagtaatttttatctttcaggctcttattataatcaagatggtataattcctaatactggttatgagaaagcaacgttccgttttaatggtgaacaaaagtggagaatgctcacattcggtgcaaatgtagcatattctcaagcaaacactgataaaacattgacctctgctgggttatatggttcaagtggttctggtaccatgacgggggtataccgttggtctcctactgatgatatgaaacactacttgaatgaagacggtactcgctatcgtatgtttggagatcgtcttgatgttgttgatgaacgcgataatccatactggattcttaataagaataagttgaaagataatactgagcgtttcacgggtaattttagtatcaaggctgatattgcagattggtggtggattagttatcgtatgggcattgactcttacactacagatgattcaaagactcttgctgctggtggagtatataaattggcatggcaaaaaggtatgtatagcgaaaattcttatcggtataaatatctttctacgaatttaatgatgaatttcaataaacagtttggagactttaactttaacttgatgcttggtacatctactgacgatactcggacttggactaactatagaatggcttggaactttgaaattcctgatttttacgcatttgacaatgcaacgaatgataaccgtgatttttcaagttcacgttctcaaaaacgccttattggtacatttggtgaattccgtgctgattggaagaatacagtgtttttgacagtatcaggacgtaacgattggtcttctacattaccaattgagaatcgttcttatttttatccttcggtaagtggtagtattgtgtttacagaatttcttcctaaaatagattggttatcattcggcaaagtacgtgcgagctgggcgcgtgtaggtaaagatacgagtccgtattcattggaaacagcattgtggcccagtcagtcattccttggtggtcttactggggtaagtaattattggactgctggtaatgctgcattaaaaccagagattacggaatctaccgaattgggtattgaattgcgcttttttaataatcgtctgaagttggattacgcctactataccaataattcgtataatcagattatgtcacctcgtctgtcaaatgcaactggttatattctccgttctgttaatgcaggtgacgtttataataaaggcatggagctaagtattggtggtacacctattcaaactaaggattggacatgggaatcaactattaatgtcagtggtaatcgtggtacagtgaaaaatctgcttgaaggtgtagaaattctttatgtgaccgatgtacaagttggtaatgctaaagcggcttctttccctaatggtaattttatggcaatttccggtagtgaatggaaacgtgatgaccaaggtcgagttgtattagacaaaaatggtcttccgactaaaggaactaatgctaatcttgaaataggtaatcgtgaacctacattctctggtggatggaataatactattacttataaagggttgtcattgaatatgttgtgggattttcgtgtaggtgggcatgtttataatggaacggaatatgctatgacgcttgcgggtgtgagtgagttctctgctaaccgggaaaaaatagaggtttcaggtgtaaatacaaatggtgaatttgtaacgaatactttcgaagcgaataaaacatatacttataatggtaaagaaaccagcggtaaaacaattatagctaattattatcaggatatttatcctaatgaaacagcaaacttcatgacaaaggtgaatgcacttcgtcttcgtactatttcactctcatataatttaccaaaaacgttacttgctaaaacaaaagttataaaacgtgcctcaattacggcaacggccaataatcttcttcttttcactaattataatggtgatccagaagttgcggcagctggatcgggtgcagtaggttcatcctcagtaggtattgattattgtggagttcctgcgacagcaagttttgcttttggtgttaatctgactttctaaatattgtttaactgtatgaaaattgaataatatgaaactatacaagaaaataattctcggagttgcagcttgtgtctcgctctccgcatgtgatgactggctggatgtcaataccaatccaaatactcctatatctactgatgctgagttccatcagcgtttaccttggatgcaattttatatggaacatatttaccatattgtagcctcgaatactagtttttattgtggtcatttctatcgtaacaatgcacgtgaaggaggagcggctaaatggcaacttgattcttcaactcgtgctgctaatgcgcaacagtggttttttactcaggtaggtgtgaattgtaatgatttatataatcaggcaatggaggctggtgcttatcactatgcaggtgctgccaaattttttcgtgcttatggttttatgatgcttactgatttatttggagaaatcccttataatgacgcatttggagaaaatccttctcctgcttatgataatggtaaaacaatatttcttggttgtataactgatattgatgaagctattgagttattttctaaacaacaagaggcaataaataatgttacacctgtagatttggtagaaggtgattcttggaatggtggtgatgcagataaatggctgaaaatgtgttatcttcttaaagcacgttggctgaatcatttagtcaagaaagaagctggaaattataaagatggcaagtatgatgctccggaaattctaaattgtttagctaaagctcaacaaagtaatgctgataatactgctataaagcatacggatactaatacaccttcccatgatgtattgggttggaatgagccgatagattattctgctctctattcttgtattggtatgaatagtaatatttatataactaaatgctattatgataatttgactaactttgatggaaagggaatagaagatccacgtgctgataagtttatcccttggactcgttctatgaaaggccctgaaactcctattgatataaaatggtcagatgacggtttgtggcgtcgttctatgggggttgatatgcaaactgatattttaagtcaatcaggtccatatgctttgtcatttgatgcaactacccagagttggtattgtgatagtccaactcgtaaaggagatactatttatgtgtggacaacttgtggtggtacgggatatgcaggcggtgtagatattctttatcgacgtaataaatcttatgacacttctgcgctgagcggagtgttttatgcccgcccaacaagtccatcccttatggcatcgtattccgaagcttgttttatcaaagcagagacgcttttccgtcaaggcgataaatcaggagcatttattgcctataaagaaggtgttaaagcaagtattgattttgttaatgatcagattggcgtgtggacttcagaggatggaaaattggagtcttgcccctcgtttactcatattgaacaagctgatattgataatttcttgaataatgcactaggaaattcctcagatattactctcggcaaaattttgactcagaagatgttggcaatgccatattctaatgagaattggaatgatatgcgtcgttgtgattatgatacgaatatattcatgaattgggataaatcgtattattataggaatactccagcaggatttacttactgcccggaagataagtcgcctcgtcgttggaagcaagcttcttatgagctgacatataataccactaatcttgcagccattggttcccaagtcccaggagctgctgagcttggtgaaggatggtataataataaccttatttgtacattgcctgtgtggtgggattcaaatcaagaataaaaagaaagttcaattcatacatgtaaattgatgatgtttttattttctgtgttgttggcgatattgccgataataatttcagtatcaatatttgtattggatatacagaaattgtagtacagttttaatatactggagactctaacggtcttcattcatagatgatgattgaaatagccggttcgtgagaatcggctatttttataaactgataatcttttgtataaattgatagattaactttgtagtgcatatttatactaagttatatgagtaaaattctgttattggtttacttatggtattttgtgtctgttgtccaggcacaaatagttacgtctgctgatgctagatgtggggataataagttgtctggttttgtgataagcccctatttcggagaacaagaaatgtcgtttgtatatcctccgggaatcaatattcgcataaatgcaccttcaatagttgagtttgataggaataaaccgacaaagttggtattatatgcattgcccaatggcaatagtatagattggactgttggaaaattgccggcttatgaagatgattggcactatcatatacaacacattggagcgcaaacacggtatatcagagcaaaagttcaagaatataatctagtaactgtttatttggaggcagatacgaagagttgggggaaatggaggagagatggagttggacgagagcagaaaattaaagaagtagtggaatatatttttgctttattctccgaatatcatcctactattgagttgaatagtcatagcggtggtgggaattttatatttggttttatggatacggtttttgatattcctatttatgtgaaaaagatttcttttattgatagtaattataattggaatgacaagcaatatggagaaaaattaaagaaatggttggaggcctctcctgaaaatagcttgtttgttgcttgttacgatgatgagaatgccttattggatggaaaatctattgtttcccgaaaagggggtacttggtataaaacatgtttaatgcagcgatatttgagaaagaatatgaaacgttttaggtggaataaagtagagaatgacagcataatctattttatgacaagtaatcggaaagtgcagttttattcaaggaagaaccctgaacggagaatctatcataccatattggtggaacgaaatggttttattcagtctgtttttgccggaacagagtatgaaaatatagggtatcagttcatgggtagaaaggtatatggtacttataggcaagactcaataataaaacctcatgcttttcgatttccgcctcgggcaaaaaaaaatgttacaggaagtggatttgcccgtcaagtaatgaatatgaaagtagaggaacgcgattctattgtttacaaagaaatcgcacagggaaatattccggatttattacgccagcccgtatatctaacagatagcttgcaggatgctgatggtaaattgcatggagtagtattatgtgtattgcccgattttctgacaatagggatgaattatgattttttgcgtattcctatgttgccgcagacggctcaaaagatagccgatttatatggtgcgatactgcctaccagaaaaatttctgatttgattcattttcatagttcctggaaatttactcctcatcctatgacacctgattctacaatggttactgtacctatatttgtgcgccatgattctataatagaagctacccgtttggtaaatggaaggctttatggtttaatggccggtcataaaaaggatattgtgataaccaaccggatggcagatgaaccaggtaggttattcatttacggttggcattatcaggatggcaaacctattcagccattgagtgctgcgcatagtgtagattatgtagattatagtcacggagtacgacttgttcgtgatgaagtattgatagatggaaaattgtattcgattaagcgaatgctgcaacatcctgtattatataagttgtttagcgatgaaattggtccgatgtcggtaatccgatattgatttcgtctaagggcttctctttatttatagaatgttaatttaatattcttaaaatcttaggattgtatgtattccattgattatctttgtatccgaattagaaatttaatggatttcattttgactttagtttgattgaataaagatattgaaggctctaatggtcttcattcatagatgatgattggaacagccggttcgtgagaatcggctgtttttttgtttcgtttgtttgcatatcaacggcggtaatatgttacttttgccctaaaaccgaagataggctgcacctcagcataaaaaatggacaagttcattttattttgcattcggtttgtactatctttgcgagaaatagctgagatggtgtgaactgtctttgcaaagattagtctatatatggaacaaagcaagaaatttatctctccgggggcatggttctccatgacttatccggtagactggaatgaattcgaggacggggaaggctctttccttttttataaccccaatgagtggaccggtaattttcgcatttcggctttcaaagggaatgctacatatggcaaggactccgtgaagcaagagttacgggaaaactcctctgccattccggttaggataggccggatggaatgtgcatatagtaaggagatgttcgaggaagaaggtgcgtactatacttcccatttatggataacgggcgcggatgaagttgcctttgaatgttcgtttacggtgaagaaaggagagccggttgcagaagcggagaagattatcgcttcgctggaaacgcggaaggatggagtgaagtatccagcggagataattccggtgcgcctttcggaaatctaccagattaatgaagcatacgagtgggtggatactactataaaggaattgttgaagaaggatttccagggagctgaggaagacattgccaagatgcagcagatgatggaagaaagcaacatcggtcctaagaagaaggatgcatggctggcttttggcatcgcgctttgtgttattttcgccaatgaagtggacggtatggaatggcgtaccttggtggacggaaaccgggaagcgcccatattgctgaacacgtctaccggtgaatggatagaccccatgaagctggtttggagcaaagtaaaggcaggaggtaaagtgaatctgccggagatatacagctccttgttctaaggtccggtcatctcggtactgtgattttcaactttcaattttcatttttcaactattaaagcattggcagcagtaaattcaattcttcaggtggaaaacttgaccaagtcgttcggtgacttggtactattcgaaaatatttctttgggcttgtccgagggacagcgtgtcgggttgatagccaagaacggcagtggcaagacgacattgctcaatatcctttccggcaaggaagggtatgacaatggcaccatttccttccgtcgtgatttgcgtgtgggttatctggaacaagacccgcaatatcccgaagagctgaccgtgctcgaagcgtgcttccatcatggcaacagtactgtcgagttaatcaaggaatatgaacgttgcatggaaacggaggggcatcccggcttggacgaaattctggtgcgtatggaccatgaaaaagcttgggagtacgagcagaaggcgaaacagattctgtctcaacttaaaatacgtgatttcagtcagcacgtaaaacatctgtccggcgggcagttgaagcgtgtggcacttgccaatacccttatcactgaacccgatttgctgatactggacgagcctaccaaccacctcgacctcgatatgacggagtggctggaggaatatctccgccggaacaacttcagcttgctgatggtgacgcacgaccgttatttcctcgaccgggtatgctccgaaatcgtagagatagacaaccggcagatttatcagtataaaggcaattacagttattatctggagaagcgccaagagcgtatcgaggccaagactgtggagatagaacgtgccaataacctctaccgcacagagctggaatggatgcgccgcatgccgcaagcccgcgggcacaaggcacgctatcgggaggatgccttttacgagttggagaaggtggctaagcagcgtttcaacaacgacaatgtaaagctggacgttaaggcttcttatataggcagtaagatattcgaggcagaccatctgtacaaatcctttggtgacttgaagattctggatgatttctcttacatcttctcccgttacgaaaagatgggtatcgtagggaataacggtacgggcaagtcgaccttcatcaagatactgatggggttggagcaggcagacagcggtacgctggacattggcgagacggtccgcttcggttactactcgcaggacggcttgcagtttgacgagcagatgaaagtgattgatgtagtgcaggacattgccgaagtcatagaactgggcaacggcaagaagctgacggcatcgcaattcctgcaacatttcctgtttactcccgagacacagcacagctatgtctacaagctgagtgggggagaacgccgccgcctctatctgtgtacggtcctgatgcgcaatcccaacttcctggtgctggatgagccgaccaatgacctcgatattgtgacgctgaatgtgctggaagagtatttgcagaatttcaaaggatgcgtgattgtggtgagccacgaccgttatttcatggacaaagtggtagaccatctgttagtgttcaacggacaaggggacatccgcgactttcccggcaactatacacaatatcgcgactggaaagatgcgaaagtccatcaggaaaaggagaaagagaaagaagccgccaaggctcaggaggacaagacggcgaaggtgcgtctgaacgaaaagcggcgcatgtcttttaaggaaaaacgcgagtttgaacaattggagcaggagatagctgacctggaaaccgaaaagaatgcaattgaagaggctttgtgcagcggtactttgtctgtggacgaactgacggagaagtcgaaacgtttgccggaattgtcggacttgattgacgaaaaaacattgcgctggctggagctgagtgagatagaatcgaactgaagttcgaaattgaaaattaagaattaaaaattagaactgagaaagtgggaaatctgacgaattatcatagccatagcctttattgtgacgggcgtgccggcatggaggactttgtgcgttttgcattgagtgaaggttttacatcttatggcttttcatcgcatgctccattgcctttttctacggcatggactatggagtgggatatcatggacgactatctatctgaattccatcgtctgaaggagaagtatgccggacgtatcgaactgtatatcggtctggagattgattatctgaatgaagcgagcaatccgtccatcgcccgtttcagggagttgccgttggactaccgtatcggttctgtacatcttctctacaatgacaaaggggaagtggtggatgtagatgtatctgcggatacctttaagaccattgtagacggacatttttgcggtgatttggagcatgtggtccgtctctattacggccggttgacgaggatgctcgagctgggaggtttcgatattgtgggccatgccgataagatgcactacaatgcagcatgctatcgcccgggattgctggacgagccttggtatgatgagctggttagggcgtatttcgcagatattgcccgtcgcggctatcaggtagaggtcaataccaaagcctatcatgacttggtcactttctatcccaatgagcggtatttctcctacctgcatgatttgggtgtacgtgtgcaggtgaacagtgattcacactatccggaacggataagcaacggacgtcccgaagctttgcgtgctttgaggaaagctggatatgaatcggtgatggaactacacggaggagaatggaaagagatgcctatcgtgttttgagtgaataggatacaaaaactcctgacttgcctttttgtaaaggtagtcaggagtttttctttggcagtatccataattttgtgtaaatagaaacgggattcagttataagttctcttatatctggattctgttttcaaaaataagcataaattggttcataatcaatccccagttagtaatcggcattgtccatttcttctcaatctccatcaaagcgaggtataccattttcttcacagcatcatccgacgggaatgaaagctttgatttagtgtactttctgatttttccattcagattttcaatgagatttgttgtgtagattattttcctgatttccaatggaaactggaagaaaacagtcaggtcatcccagttattcctccatgagaggatggcataagggtacttccctccccatttcttttccagattatccagttccacggcagcagcctccttgttgggcgcgttatagatgttcttcatatcggctgtaaactctttcttgtccttgtaaacgacatatttacaggagttcctgatttgatgtacaacacatatttgcgtggaagactgaggaaatacggcacgtatggtgtcggtaaacccgttcaggttgtcagtgcaggtaatcagtatgtcctgtactccgcgggccttcaaatctgtcaggacacccatccagaatgaagaactttctgattttcccacccacatgccaaggacttctttcaagccgttctgtttcagaccgacacagagatagacagtcttgttgatgatttttccgttgtcacgaaccttgaatacaataccgtccatccaaacgatgagatagacaggatccaaagggcggttctgccattcctgagcagcctggttgactttgttcgtaatgatggaaatggctgatgtggacagttctatttcatagatttcacgcatctcctcttcaatgtcggacacgctcattcctttggaatatagggagataacaagtttctctatggaaagcccacgactctcgtgtttgggaacaactatgggattgaattcaccgttacggtcacggggaataggtatgaccgcttcaccgtgttcagtttggattttcttggggtagctgccgttacgggaattaccgctgttatgaccggaaaccgaattcttctcataacccagatgcgcatccatctcaccttcaagcattttctccaatacctgcgcgtgtaactgcttcagaaacttgctgacatcagcttctgtcttgaactggctaaggaactccttacttaatacctcatcaggcactacatgattcttctctttcataattttcttcattttgcaaagctattaaataaaaaatacggaacccatactgaatcccgtattttacatttacacaaaatattttatagtgccttttctttctattatgaactattctgttttcagtaaaaagtcatcaatcgcctttttgtaggtagccttatcggctgctccgcggaagagctgaggctctccattcatagggatgaatacaaaaagggggatgcttgttgcattgaacaacgctgccaattctttttctttatccacattgactttgtagacagcgattttatcggcatactctttggccagttccttcataatgggagccaccatgcggcaaggtccgcaccagtcggcatataagtctatgatggcaggcttgtttcccttgtatttccagtcctgggatttctcatagtcgaacacatccttgatgaacatggctttgttcatgacgataacttctccgtttgtttgagcataggccagcatgcaagaaaacacgagggcaaccattgctataatcttcttcatttcttcttgttaagagttttgttctataacggctttcaaatccttaccgctgatgacacccgaatggcgccatacggcttcacctttcttaaatacgataaatgtcggtactgcttgtatgcggtagcgggcagcaagctcttcgtgctggtctacatctattttggcgatacgggcagcatctcctatttcgtttttgagttcctccagtaccggatgcatggccttgcacgggccacaccaggttgcaaagaaatcaactaaaacgggcttttctgattgtatcaattcttcaaacttttccataattttttcctttctgtttttatttatttgtaatgataacaaaataggaggaggatttgttcgctaaatcattatttaatcgtcatctcttcaatgagatgcgaagctcccgcgtatttgtcgatgatgaacaaggtgtagcggatgtctacacatgctgctcgttgggaggacggacggaaggcaatgtcgccagtcagaccttcgtaattgcggtcaaagccggtacctatcagttctcctttggcattgaacactgggctgccggagtttccaccggtattgtctgtgttgacaatgaagcagatgggcatttcgccgttcggcatggcataacgtccgaaatcctttgcctgatacagctgtttcagtttggcggggactacaaactcccaattgtcgggatcttccttctccatagctcctttcagagtggtgtagtaatcatatttcacaccgtctgccggagcgtaggggagcacttgaccgtaggtcaggcgcaaggtggagttggcatccggatagatgggctggccgttggcaagcttcatgtccatcattccctttacccataccttgtgggcggcattgtagtttttattggcatccatcatggcaatggaggtctgaagcaggccgtccgtgatggaatatttcagcaagaccatccagtctgtattaatcttgtagaggctgggcttgcggatgaacttggcaaagttctccttgttgccgaagatggaatgttcaaagcaggcgtcgatgaaagcgtcgctgttgcccttgaaacgcttgtctatgatttggaaaataccgatgcgttgttcggcagggatatacttcatgtagattttcagcatttccttgccaacaatatgttccacttcggggaaggggacagaggcaaagtagcggtcggctgccttctgaaggctgtctttagctgctgcaatctgtttcttgtccttgttcttcaaggcagataccagtcctgcggtgctggggatacgcatgaaatcgagtcccgtcaccagtgcttcctgaatggcttgctggtggtagagggctggacggcgttgctttacgatggcgcgtatctggtcgaatgcttgctgatagctattgtcgttcagcgagcgtccgcgtgccaggagtgcctcttgctgtgcacgtttagtgtccaatacgttcagacggacgagaccttcgttcataccgatggcatttttccagtagttggcagaagatgcatacttgctggcatagtggatgcgtacggcatcgtcttgcaacatttgtttcatcagagctttctggcggacatcgcgcacgtggtggcgcatgaagttggtggtttgcatacgctcttccacctcgtcggaaatcatgtagcgccagttgcgtccggggaatcccatgacgaaggtaaagtcgccctcgcgatagccgtcaagactgatggtgagatgtttcttcacttttaggggaacgttgtctttgctgtaagcggcgggtttcccgtctttgtcggcataaatgcggaacatggagaaatctcccgtgtggcggggccacatccagttgtcggtgtctgcgccgaacttgccgatggaggaggggggagcgcctaccatgcggatgtcgctataggtggtctttacgaacagatagtatctgtttccaccgtagaaggctttcagttccagtttgcggccgggtgtcagggcgatgccttcggacttggcgaagcggtcggctactgttttcaggtatttgggagacagataattggtgccgttcgggtcgtcgtcggttttcagttgttcgtttacgtagtctgtcacgtccagtatccggtcgatgtaggtgacggtgagtcccttgcagggaagctcctcttcgcgggacatagcccagaaaccgtcggtcaggtagtcgtgttccaccgagctgtgttgttgtatggcgccatagccgcagtggtggttggtcagtaccaggccttcggcagagatgacttcgccggtacagccaccgccgaaatgcaccacggcatcctttagggcaatgccgtcgggattgtagatttggttggcggggatgagcagtccgagttccgtcatggctacttcgttctgcttttgcaggtcggtgagcatccacataccttcgtcggcgtgtgcggcaaggacagaagatgtaatgaataatgataataggattcttttcatggtgatgtgcgttagaagagcatctgagaggggggctattcagtatacgactgaatagggttaagtatacgactgaatggcattcactatacgactgaatgccattcagtatgggaggtaatctctcagaggctttaatttattctataatgttcatttcttttatcagatgactgcaattgcccagtttgtcgaggatgaagagcacgtagcgtatatccagtgcaatgcaacgctgcaggtcattgttgaagttgatgtcaccgctcagagattcccagttaccgtcgaaagcagtaccgatgagctgtccttcgccattgatgacggggctgcccgagttgccgccggtgatgtcgttcgtcgtgaggaagcaaaccggcatggtgccgtctgccatggcgtagcgtccgaagtctttcttttgaatcagttctttcagcttggcgggtaccacgaattcacggtcttcgggattctctttttcaaggataccgtcggtagtggtatagtagtcgtagtgtacggcatcgcgtgggctgtatgattttacattaccataggtcagacgcatggtgaagttggcatccggataggagggaacgggctgtttcatttcacccaagccacggatgtaggccttgtggagcagttccattccgctttccagttccatgtattgctttccgagctcctgcagcttttcgttcttggagcgcgagtaagccgtagcagggtctttctcgatggctttcacggtgggctttgccaggaatttatccaggttcttgcggttggagaggatggagttgtcgtaaatgttgtctacgtatgcgttgtagtcgcccttgaactctccgttgatggtttggtagaaggagggcagctcgtcggcgttcagtgccttggcaagggcgggcaggatggctttggctatggcgcggtccacttcgtggtcgtagtctttattgtggataccatcgtatgcattttccaactgcttcttcgaagcttgcagcaatgagtcgttcttctcttcgagcgctttctttatgttatccataataaggtaggtactgccgaattcgatagcaccgcgcaatgcttcgttggtatagtagagctggcgcagcgtgggggtgcttttctcgatgatggcatcaattttctctaccacaccctcgtattcgggttttccttgggcaaaggcggcatactttttctcgatttcggctttggcgcccaacacgtcattgtcgatgattgccttgttcataccaatggagttcttccagtagttactgcttccggcaaacttgctggcatactggatgcgggtcttgtcactggcatccatatacttgcgcagcacttcgaggcgtacgccgcgcatatcaatcattgcctgattcacggcgttcatgcgttgcttcacttcgctctgggtgaggtaacgttctgtgctgccggggaagcccataatcatggcgtagtcaccttcgttcagacctttgatggagatgggcaggaacttcggcgttttcaggggtacattgctttcactgtattcagccggctctccgttggcatcggcatagatacggaacatggagaagtcgcccgtgtggcgcggccacatccagttgtcggtctcaccgccaaacttacctaccgaggagggaggagcggcaaccatacgcacgtcgctgtataccttataatagaacatatagaatttgtttcctgcatagaaggggagtgcgcgcacttcaatgcccggtttacccttcaaatcgctcttctccagttcttcctttgccagtttgctgaggaacggggaagtcagtgcatcgatttccgtcacttcgcctgcctttattttagcgttgacaaggtcggtgatgtctacaatgcggtgcacgaaacggaatttcaatcccggggtgggcagttcttcactgcggttcatggcccagaaaccatctgtcagataatcgtgttccacgctgctgtgctgctgtatggcaccgtatccgcaatggtgattggtcagaatcagtccttccggagagatgatttcgccggtacagccaccgccaaagatacctacagcatctttcagtgacacgccgttgggattgtaaaggtcgtcagcctccagcttcagtccttgctttttcatcatgtcgatggagttctgctgcttcatcagttgcaacaaccacattccttcgtctgcacgcgcagagcagactgtcagtgcggcaatggccgcaagcaaacctttcttaaatgtaatcttcatataatcaattattaagtaatgtctttgaatttcattgtcatcgcttgtgggcttatggctttatggcattgtttcttattgcttccataatgtttgcaggcggacgctggttcatcagttcgttcttcataaagtccatgtatggggctgcgtgactgaagaacttatgatatcctgcacaaaggtaattcagtcccggctctccgtcggctgtacgtgcaaaacggttctttggacattcgccgttgcaggcaaacagccattcacactccctgcattgggtggggagcgattgttgcttcatcagtccgaaggcttgttgccgttcgccgtacatcatctccatcagtgtattctgatggatgttgcccagtttatattcggggaaaacaaaatggtcgcacgcatatacgtctccgttgaactccatgacgcctgcatggccgcaagtctttgccatggaacatacacccggttgttcgcctatccagttggcaagggtagagtcgaataactgtatgtagtaagtacccacgtcctgctttacccattcgtcgaacaaggcgcataggaagtctccccattgttccggcgtgacggaaaagtctgccagctgcgtgctcttttccttgtctgccagggaggcaagatggcgtccgtccccatgaggggcaatgcgctccacgatgggggcaaactggatgtaatggcatcctatctccttgaagaaattatagaagtccaacggatagtcggcgttgtagtcattgaccactgccattccattccattccacaccgtgctttttcagcaggttgatgccctgcatcaccttgacgaaagagggcttgccctgcttgttcttccggtattcgtcatggaactcctgaggcccgtctatggagacacccaccagccagttgttttctttgaaaaaccggcaccattcatcggtcagcaacgtgccgttggtctgtatgcagttgtctatggtgcgtccgttggcatatttcctttgcagctccatggcacgtctgtagaaagagagcggacgcatcagcgtctctccgccatgccaggtgaacagaacctggggcatggtctgcgagttgatgtactcctcgatgaatttttccagcagttcctcgctcatcacatgcttggggttgtctctatatagtttggatttctccagataatagcaataatcgcatgccagattgcataccgcacctaccggtttcagcattacatagagcggtttggcaaaaggtgcataggttgacatgtatattttctctatttttatgatttataattgtgcaaaaatacgtaaaccgaatgaaaaatcctttctttctattcggtttataaggaatattaatacctttgctgggtgtaattcaaaaatcgtttcttgcatgattagaatgagtgtgaaccgcattttaccctttttgctcctgcttgtgctctttacttcttgcaaccgcaagtataagatagagggcagttcctcggtaaccagccttgacggaaagatgttgttcctcaagacgcttcgggacgggcaatgggtgaacgtcgactcggcagaggttatccatgggcatttcaagatgaaaggccgggccgattccgtgatgatggtgactctttatatggaccacgagggcattatgcctttggtgctggaagacggcaaaatcgtggtttccatctccaatactcagttgattgccaaagggactcctttgaatgacaaactgtacgagttcatagacaagcgcaattccctggaagtgaagatagaggagctggaacggaaagaggcgcgtatggtgctggacggtgccaatctggatgacgtgcatgggcagttggcaaaggaaggcgaagcacttgtgaaggagatgaacgactacgtccggcagttcattgtagataactttgagaatgtgctgggccccagtgtattcatgatgatgtgcagcacactgccctatccggtgatgactccgcagattgaggacatcatgagaactgctcccttgtcttttaaagagaatactttggtgaaggatttccttacaaaggcgaaggagaacatgcagctgattgaagagcagaaacgcatgaagcaaaatgcttctgtaggaggacagaaataaacaggaatgagttgataatgacaaacgggaatgcctgaatatcctatcaagatattcaggcattcccgtttgtcattatgtctttatctgtcctggtcttcgttcttcaccatccctttatacttttccggcaatgcactctccaccgccgcataagcctcgttcatgcttgccttgatgttttctgcccctttccctttgggaggaataggttcatggatggtcagtatcatccggtggcggtgtatccactttccggtgcgtggaagaatctcgaacgagccgtctatagtgacgggcaccacttccagttgcagttcatctgccaactggaaagcacctctcttgaagtaccccatgtgtcccgtgaaggtacgtgccccttcgggaaatactaccagtgacacgccgtctttcaaagatgattctgcctgccgcatggtggcaagcaccttcttggggctggaacggtcgacgaagatatgtcctgcgctctcgcatgccttgccgacaaacgggattttgcgcaggctcttcttcatcatccatttgaagttccgtcccagaaatccgtatatcaggaatatgtcgaaggcaccttggtgattgggcacaaacacgtaggaagtacgtttatgtattttctcccttccatgtacctccaccggaataagcagtatatagcagatgagctgtgaccagattttaccgggatagtaaccccagatatgcgctcctcctatcagcgaaccgatgatggtgaccaatgctgtaaggatagtcagtaccaataaaatgggcaacgcaaagcaaacctgataaataatataaagtatcttcataggtgtcggattttttattgctacaaagatatacctttttcttatttcgtcactctttctctcttactaattttagtactgtaatttccggccatgccccgaaccggaacggcagtcctacatagccgatgccaatatttacgtacaaagcccttttgccttcgtagtacattcctctccattccggatagataagttcggcaagggaatgtccgaacaagatgccttgcatggcgtgggtgtgtcctgcaagcatcagtgaaatatccgatcggggcagtacctcgcgcctccagtgggtagggttatggctgagcaatatttggaacattccctccgtgccctgcatggcttgcggcaagtctgcaaattgggagaaaggaggctccccgtcgttttccacaccgatgagggctatgctgtcacctttgtgatgaaggatgtcatgctcattgttcagcagtttccatcccattgctttctgctgccggattaaatagtccagattggcgatttctgctttcgggctttgccagtgatagtatgagccatagtcatggttgccgaggatggagtatactccgtccggtgcgtatagttgggagagtatttcttggaaaccatccagttcgtggctctgctggttcacgaggtcaccggtgaagacaatcaggtccggcttttgtccgttgactaaatcgaccagctgtttgatggggtccggattgccttgccaactgccgatgtgtatgtccgatatttgcacgatgcggtagccgtcgaaaccttccggaatatttgcagaacggtattccacttcttttgtatcgaaacgggtgatgcctgccagggtaccgtaaaggatattgaagaagctgacgacagccaaaaccagtcctatagcggtgaacgggctgcggggacaacgacggatgatgaagtgcgccagtactcccaccagcgagcaaagcatgaatatggtttttggaaagacaaacagcatgatggtaattgccagtctgcctatggcctgcgtatggtttgacatcgcattgtcgcccgtaaggaacatgaagtaaacatagcctgccgctaatagcaaggtgggaagccaataaaggcagtgaaggactgcctttctggtttttcttactacataaaccaagtaaatgtaaaggtcggggatgagaaggaaaaggatgaaaacaagagttactcggtgcatatatctttcaattcttcaatgttctttttaatattgtccagatgtttgtaaatcacttttttgtagagaatatagataattagcgcgtcaaatactacgaaaagggtaatcagtagggcttgtacgctggctggtgccagatgatattccatcacccaatagttgaggatattgaaaaggataatccaaatggagatgcccatcacttcatatctggtccattggcggaaggtggtcatacggcgactgacttcggcaacccccatttcatcaatacgcgtgtccttgttccagcggtatgttttccagtcccaccacatgcctatgaggatgcttatagcgatgaatcccagtaaagcgacaatcttgccttgcagctgctcattgaagccgaaggtgggcagcaacagccatataagcagaagggctgccagacctaccgctcccattccgatagagaaacgctgtatgactacgagtcgtcccagacttttgcgggtattggccttgtagccggcaatcagttcggtaatctgctgttcgtcagcaatcggttctttctgcaactgttcattcagtgcgttccatgatttcttcagttcatccagttccatatatttattcctccttattcatttttttcaatttgtccttgatgcggctgagtttggtggcaacgtttgtcaaggtcagcccggtgatttcggcaatttcttcgtagcttttctcttccagatagagcagtatgatggacttttccaattgtcccagtcggtttatcatccggtagagctgccgtagcatggcttgtgtctcgtcggtttcttcagtccggtcggcttcctgggtgagggtgacgatttcggggatgttcttttctttgcggataaagctgatgcacgtgttcagtgcgatgcggtaaatccatgtggaaatcttacactcccgccggaacttgggaaatgctttccataagttgagcaccacttcctgatacaggtcgttgagggtagcattgggcgtggtgtacagatagcacaccttatatatcacgcgctcatactcccgtaccacggatacaaactcttgttctgcattttccatcttttagcttctttcgaattgcttttgcactgttagtcgcattgtgtggcgataaatcacagttcaaaaaggattattttaatgtgttaatgtgcctatatgctaatgtgccaatgacctgcggcatggtagcacaatatacatatagcgcagccaattggcacattagcatataggcacattagcacattattcatattgtagtggctaaaaacttccgcatatcccctattggcattccccggcggcgggcgtagtcgtccagctggtcttctccaatcttgcccactgaaaagtatcgggatgcgggatgtgccagcatcatgccgcagacggaggagtgagggtgcatggctccatgttcagtcagtgtgatacctatctgcttcatgccgagcagttcgtccagcaggaaattcacggattggtcgggtagggaggggtatcccacagcggggcggatgccttggtatttctcgaccagcagatccggaatggacaaggattcgtcgggggcatacccccaagcctccttgcggacatattcgtgcatcttttctgtggcggcttcggcaaggcggtcgttcaaggtttgtacaaggagatgtttgtaagggtcgcttttataagtctcttcggcctcttcactgatggtggaggcgaaaagtcctacgatgtcgggtgtgcccgaagagaggggacgtacaaaatcgctcagacagagaaatggaccgccatcgggttggggtgtctgctggcggagcagtgggaaggttgttccttctatcaagaggttatctccgtctgcatttgcctggcaaagcctgaagatgcaatggatggagattgtttcgtccagtcggccgagcattctattggcttccttgaagagctgcatggcttcggaagctttggtacgttcctcctcgggaaaggttgtcagccaaagtgcacggcaggaatcgcagccatggatgttggcaatagccgcaaagcgaggctggaagccccaggcatggaagaaataaatccagttgatgtaaggggttacttcatgaatccgatacgaaagcaattcatgccccggtgccagtattgtccttttcatcccatttaatccttaatccctaatccttaattcctagccttcactccccaaatctcagttcctcgccacgataagcgtcgtccaccatgccgtcactataaacgggatgtccgttggcaaaagtcctttccactttccagttgaaggtatgcccttccaatgggctccagccgcatttgctcaaaactttgtcggctgtcacttcccacggggcatcggggcgtaccagcacaaggtctgcccggtaaccttcacggatatagccgcgctcgttgatgcggtagatttgtgcgggagcatggcacatcttttcaacgatggtctcgagtgtgaatactccctcatccaccagttgcaacatgctgacaagtgagaactgtatcatcggcatgccggacatggccttcaaggcacctccttctttttcggagagcagatggggcgcatggtcggtggctataacgtctatcaggccggagttgacggctgcacgcagggcatcgcggtcggcttgcttcttaatggcaggattgcacttgatacgtgtgcccaacgtgcgatagtcactgagcgtgaagaggagatgggcaacgcatgcttcggcggtaatatgcttctcggaaagtgaatagtcattgaacagttgcagttccttggctgtggacacatgcagaatatgcagccgtgcaccggcaatccttgccagccgtactgccagttcagaggatgcatagcatgctgccgaagagcggatgtagggatgcttgcctatgggaatatcattctctccggcaaacatttccttatacttggcaatattgttcttgatggtttcctggtcttcgcagtgggcggcaatcagcatgtctgtaccgttgaagatgttcagcaggctgttcatcttgtctaccagcatgtttccggtactggagcccatgaatagcttgataccgcagacgcggtgcttgtccagcttgccgaattcgctgtaattgtcgtttgttgcgccgaagtagcaggaatggtttacgatacacttctcgttcagcaaatcaagtttggcgttcaaggcatccagcgtagtggtcaccggatttgtattgggcatatccatgatggaggtcacaccacctgcggcagccgcacggctttcggtgaggatgtccgctttgtgggtcagcccgggatcgcgaaaatgtacatggtcgtcgatgatgccaggcaacagatagcatccggtggcatctatggtctcgtcacaaggggcggagagaggtttccagttggtcagtacctctgcaatgcgcccgtcttctatcactacggaacctttcacggattgtccttcgttgacaatcgtagcgttatgtatcaatgttcttttcatatcttcctaatatttgtagtaaacccctatcactctatcacccatcacttcatctccttatctacggtaggatatttatggaaccaactgttccatttcaaccgaatcactccgaatacggcttcaccaaaaatactgctgttcattttggaggtgcccagttcgcgattaatgaagatgacaggcacttcctttaccttgaagccgcatttgtaggcggtgaatttcatttctatctggaaggcgtatcctttgaagcggatgccgtccagattgatggtctccaatacccggcggcggtaacatacaaatccggctgtagtgtcgtggatgggcagcccggtgatgaagcgcacatacttggaggcaaaataagacatcagtacacgtcccatgggccagttcactacgttcacaccactcacataacgtgaaccgatggctacatcggcaccctcttcggaacaggcgcggtagagtcgcggcaagtcttggggattgtggctgaagtcggcatccatttcgaatacatactcataacctcgttgcaatgcccacttaaagccggctatgtaggctgtacccagtcctaactttcctttgcgctccaccatgaagaggcgttcgggaaactcctgctgcaaggtctttacaatggcagctgttccgtcgggcgaaccgtcttcaatgacaaggatgtgaaaaccatgtttcagagcaaaaacggcacggatgatattttctatattctcccgttcattgtaggtggggatgatgacaatgctgtctgatgtttgcatacttataggtaatgggggttataactgggaacaaatgtaatacatttcttttttatctggcagcattttcacacaaatcttgattttgcaaagttctggcgccacgactctttcatttatgtagctccttctaactcctgactataaggaatgcaggttaaatcaaagaaccatatgcttgactttgaactttagcctcaatctttagctattcccgtttcaatcattaacagaaaacattcaaactattaaagaaaaactttcgaagtataaaggataaagtgggtagatatagggagaaaaagtgctcttcagtcttggtctgtctatcccaagccttgggatagacagaccaacccctgggatacatgtccgcaggctggggataaactttgtgtaacataactcctgaatagggattgtgcaggctgtgttattcataattggaggaaaagaagtttcattgccttccccgataaatagggcgatacagaaaaaaggtgaaggatgtgcaggctgacagcagaaagattatttcagagaacatagttgccgacaggtcaaagctaaagattatttgtgtatttttgcaccgaatttatttcggtaggataccttatgagaggcaataccgggggaaaaagcgcaaagcaatgaatataactgaactgcaacaatcttatgcttcccatcccaatgtagagggggtgtgcaggcttctgaaagataactctgtccgtcacctatattgcggaggtttatatgcctctgccgcttctttgttttcgtctgtattggttcagcgggctacttgtccgctcgttttcattctgggcgatatggaggaagccggttatttctatcatgatttgacgcagatattggggacagagcaggtattgttttttccttcttcgttccgccgcgccatcaagtacgggcagaaggatgcggcaaacgaaatactccgtacagaagtgctgagtcgcctgcaaaaaggagaagaggggctttgcgtggtgacctatccggatgcgctggccgaaaaggtggtctctcgtaaggaactgggagagaatacactgaaactgcatgcaggcgagagggtggatatgaacttcgtgacggacgtattgcgcagctacggtttcgaatatgtggactacgtctacgagccggggcagtatgccgttcgtggcagtattatcgacgtcttttccttctcttccgaatatcccttccgtatagactttttcggcgatgaggtggaaagcgtccgtaccttcgaggtggaaacacagctctcgaaggagaagaaagaaagcatcgtgatagttcccgacttgagccatagcctggaaaaaaagggaagcggcggcatggtgtcgttcctcgatttccttccgtcggacagcttgcttgccatgcgcgattttctctggctacgcgaacgcatccagaccgtgcacgacgaatcgctcaccccacaggccatcgccgcccgtgagtcggaggagaatggagccatcacgctggaaggcaagctgattgatggtggcgagttcaccctgcgcgccctcgatttccgccggatggagttcggtaacaagcccaccggaacgccggatgctaccgtctcgttccatactacggtacagcctatcttccataaaaacttcgacatggtggcagagagtttccgcgaatacctctcccgtcactacaccatctacatatgcagcgacagcctgaaacagactgaccgcatccgtgccatctttgaggaccgtggagacaacatatcctttaccgccgtggaacggacgctgcacgaaggctttgccgacgacactttgcgtatctgcgtctttaccgaccatcagctgttcgaccgctttcacaagtataacttgaagagcgacaaggcacgcagcggcaaggtggccttgagcctgaaggagctgaaccaattcacccccggcgactatgtggtgcataccgaccacggtgtggggcgttttgccggactggtacgtatccccaacggtgacaccacgcaggaggtgatgaagattgtctatcagaacgaagatgtggtgtttgtctccatccactctctgcacaaggtttccaagtacaagggaaaggagggtgaagcgccccgcctcaacaagctcggcaccggagcctgggagaagctgaaagaccgcaccaagacgaagataaaggatattgcccgcgacttgataaaactctactcgcaacgccgcgaggagaaggggttccaatacagtcccgacagcttcctgcaacgggagttggaagcctccttcatctatgaggatacccccgaccaaagcaaggctacttccgacgtgaaggtcgacatggagagtgcccgtccgatggaccgcctggtgtgcggtgacgtgggcttcggcaagacggaggtggctgttcgtgccgctttcaaggctgtggcggacaataagcaggtggctgtactggtgcccactaccgtacttgcctatcagcatttccagaccttcaaggagcgcttgaaaggcttgccttgccgggtggagtatctgagtcgtgcccgcaccgctgctcaggcaaaggctgtagtgaaagggcttgccgaaggggaagtgaatattcttatcggtacccaccgtatcctgggaaaagacgttaagttcaaagaccttggtttgttgattattgatgaggagcagaagttcggcgtctccgtcaaggagaaactccgccaattgaaggtgaatgtggatacgctgaccatgacggctacacccattccccgtaccttgcagttttcgctgatgggtgcgcgcgacttgagcgtcatccagacaccgccgcctaaccgctatcccatccagacggaagtgcacaccttcaacgaggaaatcattgccgacgccgtcaattttgagatgagccgtaacgggcaggtattcttcgtgaataaccgtatttccaatctgtttgagttgaaggccatgatagagcggcacattcccgactgccgtgtctgtatcggacacggacagatggagcctgccgaactggagaagataatctttgatttcgtcaattacgattacgacgtgctgcttgccactaccatcatcgaaagtggcatcgacatacccaatgccaataccattatcatcaaccaggcgcagaacttcggcctcagtgacttgcaccagatgcgcggacgtgtggggcggagcaataaaaaagctttctgttacctgctggcaccgcctttgtcctcccttactcccgaagcaaaacgacgcctgcaagccatcgagaacttctccgacctgggcagtggcatccacattgccatgcaggaccttgacatccgtggcgcaggcaatatgctcggtgccgaacagagtggtttcattgccgacctaggctacgagacgtatcaaaagattctctccgaagctgtgcacgaactgaagaccgacgagtttgccgacctttatgccgaagaactgaaagcagacggaggcgtcatcagtggcgagcagtttgtggacgaatgccaggtggaaagcgacctcgaacttctgttgcctgccgattacgtgactggcagcagcgagcgtatgttgctctatcgcgagttggacggattgacactcgacaaggatgtggatgctttccgttcccgcctcgaagaccgcttcggcccgattcctcccgaaacggaagaactgctgcgcatcgttcccttgcgacgcctggctgcccgcctcggcgtggagaaagtctttctgaaaggtgggcgcatgtccctgttcttcgtctccaatccggacagcccgtactatcagagccaggctttcggtaaggtcattgcctacatgatgaagtacacccggcgttgtgacctgcgcgaacagaacaacaaacggagtatgttggtgaaggatgtcaagacggtagaagaagctgtctgtgtgttgcaggaggtagtggcaatgcaggtggaagagtaaactgttgccactcctgccactaacgtccgaactgcaaggcgaatcccaaattgaagaaagtgatgttgtttttgaaccagctatggtctactccgtcatcatacccgtctgtgttataaagtcgtgcatcggggttggcaaaccagtctgctgtcaggaaatcacagcgaatcatgcccgagagtttacggctgatgcggaactcatagcctgctgcgaaagttattccacaatatcctttatggaaaaggtgtccgttccgttcaccgcgtttatatgtccgttcctgatagttcatatacccgatgccgaacgagaggaacagtccttgattcccgttgctccacaagggccggtatgtgatgttggggcgtatgcagtgcagatgtgccttatccggcaggcgtgccatgcgtagatagtcatattgaagtcctgcggcaaataggggcgtgatgtagtagcggccttctgtcatcaggtcatatcccacccggttgccattcttgctgaagaagtcgttacggtttccctctacatgaggtaaggatacaccgccaccgaagatgatactgtaattttgcggcaggcattcgctttgtgccagcagacctgtcgctccaatggggagtagggataggcagaggaggaggaatcgtttcatgcagttgctgtgagtttcttggaaatatcgtatttttatcgtttcccgtatagcttgtctatcaaatccgtccgtcctatccggcgcagttcgtttatgatgttcctgcgctcttcgggtttgtaccagaagaagaattggcgttgagccagtttctcgcgctgcgttttggcactgaataccggttccagcgtataaggatggaagcccgtgtaccatgcttcggtggcaacggtcatgggagtaggggtaaagtcttgcacttgttccagatggaagtccagtcgcttggtgatgacggcaagttctgccatatcttcctccttgcatccgggatggctgctgatgaaataaggaataagctgctggcgtagtccttcttcatggttaatcctgtcgaatatcttcttgaactcaccgaactggctgaacggaggcttgcgcatgatgttgagcacgcggtctgacgtatgctccggtgctaccttcaggcgaccgctgacatggcgggcaatgagctcgcgggtatattcctgcgtacttttgttagtgttcgggtccttgctctggtgcagcagcaggtcatagcgtacaccgctgccaatgaaggacttcttgatgccgggcagggcatctacggcatgatagatgtcgagcagcggacggtggtccgtattcaggttggggcataccttggggtagatgcacgacgggcgtttgcatttcctgcagacggcctcatcccgtcccttcatgcggtacatattggccgacgggcctcccaaatcgctcaaataacccttgaagtctggcagctccgtgatggctttcacctctttcagaatgctctccttgctgcggcttacgatgaatttgccctggtgtgcggagatggtgcagaaggcacatcctccgaaacatccgcgatgcaggttgacggagaactttatcatgtcgtatgccggaatacgttttcccttgtatttgggatggggcaggcgcgtgtatggcaagtcgaaagaacggtcgagttcagcttccgtcaaagggggatagggaggattgactactaccgtcagcttgccgctcttttgcaagatgcgggatgctgtatatttgttgctttcctcctcgatatgacggaagttggcagcttctttctttttatctttcagacattcttcatgggaaaagagggtgatatccccttcttgtaccactacttccttgtcaaggtaaaccatttggggaatatcggcgatgagctttttgaagcttggggcgtccatctgtgtctgttggcgtttcagcctttccgcaagttccaccaccggtttctctcccataccgtagatgagtgagtcggctccgctgtcgaggaggatgctggggcgtacacggtcctgccaatagtcatagtgcgtcaggcggcgcatgcttgcctcgatgccgcccagtacgacggggacatcggggaatagcttctttaatatctgggtatatacaatggaagggtactccggacgcatatccggacgtgcatccggggtataggcgtcatcactgcgcaagcgtttgttggcagtatatttgttgaccatcgaatccatacagccgggactgatgccgaagaacagacggggacgtcccagttttttgaagtcgcgcaagtcgtcgcgccagttgggttgggggatgatggctacgcgcaatccttctgcttcgaggatgcggcctatgacggcggctccaaaagaagggtgatccacgtaggcgtcaccgctgaaaagtattacatccaattcgtcccaaccacgcagttccacttctttcttggtagtaggaagccagtctgtaaggcgatattctttcatttgcacattaaaaactgtaatgtcatccgttctccgtcgtaaatctcacggaagcctatctgctgctcggaaagatactctttcatgtcattgaaggcagcagcgtcgtccatgatgatttccagcttctcgccttttccggcctcgcacatggctttgatggcagggattaaagggctgtaatgctgttgtccgcaggtgtcgatggttttcatttattcttcttctatggtgtcttgttgggaaagccattgcagatagagcttgatgagctgttgtagtccgaaggccttcatgttgttgtgatagataacgtcgatacagaggtcgagcaggtctttgctgtcttcctcttgcgcggcgatgagggagcggatgttcagtttcaacttgtcgagcacggtttcgtccacaataccgttgctgtcgatgagatggcggaagaggccgtatttctcgatggtggcaagattctcttcagaaacttctaaactacgggttccgctggggttggcttgtatagtgtacatgatgtttaatgtttagtggttaatgtttaatgattaatggaagcaaagatagttttttcactacagattacacagattttcacagattatttatagggattgctattttgtctgtgttaatctgtgtaatctgtggtgagaaagcggagtatggatgccataattacatttctggatgtttcttcccggatgctttcaaaagggaatcccatgacaaaagtgcgataatcactgccttgataggctacggcggcgggtgtgttgccgatggcataggtcatgactggaaaagcgggagacatgggcaggatgcaatcaggggaagtgaccggatagctttgctcattcggcaggcggggaagggtgaaggtatgccccagtccccggacagcgattttgtccccgtctgttttcagagagttgccatgccggtacttcaagatattctgaataaattctttattgccctgcgagctgtccatatcgctgcctacataggcaccgctgaccaggagatgacctcccgactggcaataggaagtcagtatgcgctgcatgggcgaggagaatgttttgtagtaggtattgcgtgccggattgctggaattgtcttctttctcaagtccgaggatatagtccactatcggataatcctctaatgagaggatgcccttttccacagcctcgtcgctgcatgagacgaagctgtaatttccggctgcctggatggctttgccatgtacgaaggggtaatcgaaagtgtttccgatgattttcatgccttcgtattcgtcactgctctctcccagacgtcgtcctgcttccttccggctaaaattctgctgggcgccgcagagggagatgtcatagagatagggtacgccgggatcttgtgacaagtcgaagcctgccgcatcgggggtgtctataacggcaggcccgctgatgcggtcgaatccgttgacgataagtatctgtcctttttcacgctttgccttgtaggcggcaagaatttccgaagggaagctttcgccaccccggtttacggcggttactttaaaggaatagacgatgcccggttctatttttacggtgtgggatggggagctgacgcgtacgccattgtcaaatcctccacgaccgatacgtgtatatacaatgtattcacgtggtttggcagtcggctccaacgggtcttcctctccttgccaggaaagctctaaagtattcttcttttgaccgaagcggatggcaaagtggctgacgggaaggggttggacaacgtagtctctgccgtgctggctgcatatgtattgcagaatggctttatagagcgcacgcccgacggtgaacttgaagttagggtcatgtcccaagcgcatatctgcgaagttctggtgcgacaacagttctacgatggtggaagggacggcgggcaggcgtgtttcactgtagttgcggttccataggctgcggcgtgtccagtctacgttgaaggtagagcggatatcatgctgcaactgcgttagcagaatgtccgaaaggtcacgggaggcatggcggtctgtaccggcatgcagtcggccgttgttgaagttggtggtataaatgccgagagtgcctataatctcatcttccttactgaaaccggcatcgctatgcagggccatactcatttcaaaggggatgcccaaaccttcttccgtcgggttgaatagtgattttcctgcaaggtaattcactgtacgggaacgtacgttgatgtcgtcgttcatatcattctttccctcatagcctccatagacgggatagggcatgcctgcccattgggcaaagtagcgtgcgccttccaggtatctgggcaagccgctggtttgtcctccgcgggcaatgttgcccatgcctcctccaaagcggacggcatcggcacagaccacgcctttctctttgctttcgttgctcaataccaccatgccatagtcattccggcctttgtcgaaagtgaatgtgccgaggtacacccatgtgccgcctcctatttgctggttcaccttgaactccgtgacgcctccattgtgaaatacaagatatttggcatcgcttacgctgcccggcagtgtttggtaagatacgtatacagcatattctcccgtttccggaatatcgggtacccattcggcaaaagccttgtctttcttcttttcagttttggcaaagcgtgccgtgccggagaggaaagggttttcattgtcctgatagattcgtttccgttgggcaaatccgggtcggaaggtctgtttccaacgtgctttccggcttttcacgtccagataaagggaaccttgtcctccatgtccgctcaggctaccgtcattgtctacgatgacttcctgcttctgcgtgtccctttcgcggggagtgaatacattggctcctgcattctctagcatgggcaggaggtagggcaggatgaaggattgggtgaactggtcttctgtagtgcagaacagcctcgggcgttgccatccccatttgtccttgtcattgatataatatttcccgtggctttgccaaagggcgatgtggcgtccttccagtccgcgggtgatgtcgtaggggcgcgaggtacgggttacccagggggtacctttgtattccaggtggctgaacagacgtgccttgtctttcttccctttccggtagaggttggggataagctcttcgatgctcttcccgtcagcaaagacggtgaggtcgaaatagttcaccggtcctggcaggatttgtcccagatggcggtaaatggcatcaacggtttcaggccgtagaggctggtaggcaaagcgctcgtttgtatagacaagcaatttcttcttccggaagtcaatgcggaaactatccagcttgcaggtaccgatgttggccgtatgggtggtgtattccctaaagaatgtctggaggcgttcttccacattctgctctagttcttgtgccggaaggaggaatccacacaagagccatatgccggttaggataagttttttcatactgatgaaatattgaagttgccaatatctgcttttaccagacggtggtgcgtgcaaaagtacataaaagaaagcttcactgatgagcgggttactttctttttattattttgcagacatataagtaagtcttaagaattaaaaagcattaatcggcaatctttttcagttctgtcagttccgtaactttgtccggatagaggatggcgttgtgcgcagccatttgagctgctttcttatggattgggtctattccttcgggagaatatgggttttctgttacattctgatgggtcaatgcctcaaaccatgtgcaggcagctgtatatctgcctatggttaagtcaaggtggtatccgtccctattcatatggtcgccgataaaggaggtacgtgcattttgtatggcggttcccgaagggataattttcttgatacccaccaggttggcggctttctttactgcatccacaatgctggtgtacattttcatttggttctggtcatagtttttgaatccggtgtggttggcattggtagcataagcccatgtctggtgcatcattaatacggtttcctttccaattcgttccctgatatagttaaccaattcaggtagggaagctttgtagctgtcatagataccagacaaagggctggcctgttgaacactgatatagtcccatttctcatcggccagtgctttctcaatagtcattgaccgggtttctgttttttccccgtctttctctactttgcgataggcataggccggagcgttgttgcgtatgttttgtacgtgccgttccagtgaacatcctccgataaacatattgccgataatcatggtgataccttcagcttctcccagttcgtgcaaatattgctctactgcatcttgtgaaaagctgttgcctattgccaatactttgatggtgtcgttattggcatggcatccatttgcaaacaatgtaaatggcgtgagtaggaataaaatgacaaggatgttgatagcatactttttcataatggtgtttgtttttaagttttgtcgtttcgataaataagtaacaaaattatttgattgtttttatatctgcaagtattccttgggaatataagaaggctgagacatgaaaaaatgagatgcattgccggagcaatacatctcatcctattgttaatattttattcgtttatagcggaatgtattccacaaaggcttccatcgcctcataggaagcaagtccgaggctgtcatacaaggcagctgttccgcggttacggtcctcgctgcgttgccagaacagacgttcgtcattgcccaggaacggtgcgctttccatctgcgattgatgcttcaggatagagttacgcttggcacgcagttcttccgggctgatgggcacagccatctcaatgttttcgatttcccattcggcccatgcaccgcggtacatccagatacggcattccttcaaccatttggcaccttcttctttttccaagtcaatggcggcaaatacggcgtccgtacaaacacggtgtgtgccgtgcgggtcggccaggtcgccggcaacgaaaatctgatggggtttcacttcacgcaataggttgcgtacaatttccacgtctgcttcgctgataggattcttctgtatcttgcccgtttcgtagaatggcaggtcaaggaaatgacagtgatccagagggatattattgtatgtacatgcagtgcgtgcctcgccacggcgaatcagtcccttgatggtcaagatgtcgcgtgtatccatgtcaccgtctttcttctccttcaagtatttacggatttcagtatatttgtcattgatgacctggtcttcgctgttgttgaagatttggttgaacccgttgatgaagtgcaggaagcggataacttcttcatcgcctacggcaatgttaccggaagtttcgtaagccacatgcacgtcatgtttctgctctaccagacgacggatggtgcctcccatggagataacgtcatcatcgggatgcggagaaaatacgaccacacgttttggatagggctttgcacgctcaggacgataggtgtcgtcagcattcggcttgccgcccggccatccggtgatggtatgttgcaggtcattgaatatcttgatgttcacgttataggctgagccgaacaatgccagcagttcgctcagaccgttttcgttgtagtccttgttggtcagtttcagaatgggttttccggtgagttggcacaaccagacgatggcactgcggatgagcttgtcgttccattcgcaggaggttaccagccaggggcgttggatacgcgtcaaattggcggcggcagacaagtcgatagctacatgtgcattgttgtgagtctgcagataagatgcagggatagtatctgttactggaccttcaacgcattctttcaccttttgcgctttctcctcaccccatgccagcagatatattttctttgccgagaggatggtggctactcccatggtgatggagctgatgggggtattttcaatgctaccgaacatcttggaagcttcattgcgggagtcgttgtccagcaatatcagacgagtggtagagttcaggcgtgaacccggttcattgaaacctatattacctacacggccaatgcccagcaaagcgatgtctaagccaccgaaactttcaatgcgctgctcgtaaagacggcaatattcaaagatggcgtctttggcgatggtgctgtcgggggtgaaaacattctgtttgtcaatgtccacatggtctatcagcatttccttcaatgcgttgaagttgctgttgatggcattgggagctaatggataatattcgtagaggttgaatatgactacgttgcggaaacttaatccctcttcctggtgcatacgtaccaagtctgcatatacattgcgcggagagttaccgcctgccagtgccaagacacagaaacgtcccgccttttgcttgtcacggattaactgtgcaatgtcaagggcaatctggttggcgccttcttccgcagactcataaatatctgtcgggattttttccagtcgggtcaataccgaccgttcaaatgcattctcaggtctatagtacctgggggagactctgttgagagtgatttgagagcttagattggttttcataaaatttattattaataaatgattaagtattgaactgttctttcaatcaacaaatatacgaaaaacaatgttcatccgcatattgctgaagattaattaagaaatactggtcgtcccatatctcatatgggttttgacggttgtacggaaagtgtcttcggtcattccataaagtcacggccaaccgccaccgtgagtatggattttacgttgggtcaacataggatttaggggttagaattattaaattaatcatgttgtcgctttgacattgtttcgaaggacaaaaataggtactttttggagaagatgtactccttcttttgggtatttttattaaatactctaaaaaagaggatttggtgcattttgtataatgtctcgttcgtttggggtataagtgaggataatcatataaaaatagaccattcatcgcactttttgtcgtttgggtttgttatatttgtgtgtgtttataaactctaaaatatcaatgtatgaaaagctggaaagtagaagcagccatcatagccgtggggctgcttttgttgggaatcatggtaaaaggcggtatcaacaattttgtgaataaggaccgtgtggtcagtgtgaaagggctggccgaaatggaagtgcctgccgacaaggtagtctggcctcttgtctacaaagacataggtaatgaccctgcactgctttatgccaatatggagaagaaaaacgctgccgtcgtgagtttccttgaaaacaacggtattgagaaggaggaaatcagtattgcaccgcccgaagtgattgatatgcaggccgaacgttacgttgaccgcaacgtggcctatcgttataatgccacgtctgtcatcactgtcacttccaagaatgtggatagggtgcgtaagctcatgtcggggcaggctgaactcttgaagcagggtattgccatcacgggaggggattataaatataatgtgtcttatgaattcaccggtctcaacgaagtgaagcccagaatgatagaggaggccacgaagaacgctcgtgctgcagccgagaagtttgccaaggattcggacagtgaactggggaaaatccgcaatgcctcgcaagggcagttctccataagtgaccgcgatgcctatactccttatataaaaagcgtacgtgtagtgactactgtgaactattatttgaagaaataacgaactcgtccgcatctttccaagcgggaaactttagcctgaactcctgcagggaggaaaggttgagggaggcggtggcaatcgcctcttcgttgtcgggcacagtggcaagcacttcccccttcggagagtagaccacactgcctccgctgtgtggaatgtctctgccgtccttgccgatacggttgacaccgcagacataactgatgttttccagcgcgcgcgcttgcagcaggatgtcccagactttccggcggggaatgggccagttggcgacgtaaatcaggaggtcgtattcattgctcgtattgcggctccagaccgggaaacgaaggtcatagcatacaagcagcagtatattccagccgcgatatcggatgatgggacgccggttgccgggggtgaaatgttctgtctcgtgccccatccggaagaggtggcgtttgtcgtaatagtaagcattgccttcgggcgtaaggaagaatgcgcggttgtagtaggatggctttccgccttccgaggctgtttcgcaggcaatatagctgccggcaagagcaagccggtactcttcggaccattggcgcagtgttgctatggtttctcccgttgtgggttcggccaagctggcggtgtccatactaaagccggtggagaatgtttccggtaaaacaacaatctccgttgttccacgaagagtttctaacttctcgcggagacgacggagattttcttgtttattttcccagacgatgtctgtttgcaagatgcttattcgcatggcattaatgcttaatacctgattagatatttcctaaatcaaaattttcgggattttttcctttaaagttcttgaagtacagttttatctcgcgcatatccttttcgatgtctccggtaggcatgacagccttggtagaggagatggtcttggaaggataatcaatcccgataagcatgatgggcacttgtgctttaagtgctatgtaataaaaacctttcttccagttgggattggctttacgggttccttccggtgtaatagccaggtggaaatgcttgctgtttgcaaacttttcggtcatttggtccactaaggaagatttacgtccccggttcaccggaatgccgccaacggctttgaatatcagtcccagaggaaaaaagaaccattcctttttcatcatgaaactggtcttgcggccgatggcaccataaaacaatttaccgataaataagtcccaattggaagtatggggtgccgcacaaattacacatttgtcgtagtcgggcaccgtcacgtttgtcttccagcccagcaggcgataataaatgaagctataaaaggctttcttcatcttatttcagtttgcccattgcgtcaataatttcgtctacttttgcattgaagtcagcacgaagttttttgtagaaaccttttacatttcctggctcggtgtggctgatgcggcttatgaattcatcttgcattttcagaatttcagccatcagttcatcggctttttgtttgtctgttccaggcacatataagctgtttacaagacactctgtgaacaattcacctgcaatatagtttatattcttctttagttcttttctacttgccataatctttacgtttaaaatgaataatctgaattattttcggtaaagataatgtttttctttgttagtgtagagcaaaaaagggtttttatgtgtttttaatttagtagttttgtggaattattccacaaactgtggacacattccacagggaaaaatggaggatgccaccatgaataaagaactgccgtctgcttttctgcttgatatatagtttgttagacgtaatggatgagatggtgatagattggcatcggatttgctttaatagaaagaaacagggttaaatttaatatacaaacaagcatgagacagttttttacgaaaaaagaattgaaactaaagaagaagaggttgctgatgatggttgcctgcatggcggtattgttggcaggttacgttattctgacttggcctaagaaggtggaatcggaagctcctaccgtgattgtggaatctgcggaaaaaggagatgtggagatatatggcgagtacgtgggacgtattcgcgctcagcagtttgtagaggtacgtgcgcgtgtggaagggtatttggagaatatgcttttcgcagaaggaacatatgtcaccaagaaccaggtactttttgtgataaaccaggaccagtatagggcaaaggctgacaaagctcgtgcacagttaaagaaggatgaagcgcaggcattgaaggcaaagcgcgatttggagcgtatccgccccctctatgcgcagaacgctgccagccagctggatttggacaatgcccaggctgcttacgagactgcagaagcctcagtagcgatgagccaggccgatttggaccaggctgaattggaattgggatatacgttggtccgttctccgctatcgggacatatcagtgaaagaaatgtggatttgggaacattggtcggaccgggaggcaagtccttgctggctacggttgtgaaaagtgatacggttctggtagatttcagcatgacggcattggattacctgaaaagcaaggaacggaatatcgatatagggcgtcaggactctacacgttcctggcagccgaacattacgattactttggcggataataccgtctatccttataagggctatgtggattttgccgaacctcaggtggaccctcagaccggaacattctccgtgcgtgccgaaatgccgaaccctaacaaagtgttgttaccggggcagtttacaaaggttaagctattgctggatgtacgtgagggtgctgtcgccgttcctcaaaaggcggttaccattgagaaaggtggtgcatatatttttgtgatgcgccgggactctacggttgaaaagcgtttcattgaactgggacctgaatttggcaacaattgggtggttgagcgtggtctggttgccggagaacaaattgtgactgaaggtttccacaagctgactccgggtatgaaagtacgtgcccaggctgccgttcctaaaaaggaggaagagcagacgagtgattctctgaacaagcaggttgtttccgaaacgaagcagactactccggctgagaataaatcaaaggacaacaacccttcaaagtaatgatgttatgaaagtaagtttctttatagaccgcccggtattctcggcggtgatatcgattgtgattgtaattgtcggtatcattggcctgaccatgctgccggtagaccaatatccgcagataacgcctcccgtagtgaaaatcagtgcttcctatccgggagccagtgcattgactgtttcgcaggcggtggcaacccctatcgagcaagagataaacggtactcccggtatgctgtacatggagtccaacagttctaattccggaggattttcagctacggtcactttcgacgtgtctgccgacccggatttggctgccgtagaaatacagaaccgtgtgaaactggcggagagccgtttgccagccgaagtgattcagaacggtatttctgtggaaaagcaggctcccagccaattgatgactatctgtctgacttccagtgacccgaagttcgacgaaatttatttgagtaactttgctactatcaatgtactcgacttgttgcgccgtatccccggtgtgggacgtgtttccaacatcggtagccgctactatgccatgcagatatgggcgttgcccgacaaacttgccaacttcggactgacggtgcaggatttgcagaatgccctgaaggaccagaaccgtgagtctgctgcgggtgttttgggacaacagccggtgaagggactcgacattactatccctatcactacccagggacgcttaagttcggcaaagcagtttgaggacattgtggtccgtgccaatgccaacggttccattatccgtctgcgcgatgtggcgcgtgtttcattggaagcatcttcatatagcacggagagtggcatcaacggtgagaatgctgccgttctcggtatctatatgcttcccggggccaatgcaatggaagttgcaaagagcgtaaaggctgctatggaggaaatcagtgcaaatttccctgaggggatgagttatgagattcccttcgacatgacgacttatatttccgaatccattcacgaagtgtacaagacgttgttcgaagcgctgattctggtggtgctggttgtatttctatccttgcaaagttggcgtgcgacggtgataccgattgttgcggtacctatttccctgattggtaccttcggtttcatgcttattttcggtttctctctgaacatactgactttgcttggattgattctcgccatcggtattgtggtggatgatgccattgtggtggtggagaatgtagaacatcttatggagacggagaaattgagcccgtatgaagctaccaaaaaggcgatgaacggattggcaagtgccttgattgccacatcgttggtgctctgtgccgtgtttgtgccggtaagtttcttgagcggaatcaccggacagttataccgtcagtttaccattactatcgccgtttccgtattgctttctacggtagtggccctgacgcttagtcccgtcatgtgttcgctcatattgaagcccgacagtggaaagaaaaagaacatagttttccgcaaaatcaatgaatggctgaacttgggcaatcacaaatacgtggctgtcattaaccgggtcatcaggaatccccgccgcttgatgagtgcgttcggcctggtactggttgccattttcattatccaccgattggtgcctaccagcttcctgccggtagaagaccagggctattttaagatagagttggagttgccggaaggtgctactttggagcgaacccgtgtggtgaccgaccgtgccgtgcaatacttggagaagaatccctatgtggcctatgtgcagaacgtgacgggtagcagcccccgtgtgggtagcaaccaggcacgcagtgagctgacggttattctgaaaccgtgggaagagcgtaaggggatttccatcgataagataatggagaatgtggagaaggatttgaaggaatatcccgaatgcaaggtctatctttccacgcctccggtcattccgggattgggtacctcgggaggtttcgaaatgcagcttgaggcgcgtggagaggcgacgtttgacaacttggtgcaggcggcagatacgctgatgtattatgcccagaagcataaggagctgacggggctttcatcatccttgcagtctgaaataccgcaactttattttgatgtggaccgtgataaggtgaaaatgctgggtgtgcccctggcggatgtattctctaccatgaaggcctataccggttcagtatatgtgaatgacttcaatatgttcaaccgtatatataaggtgtatatccaggccgaggctccttatcgtgagcataaggacaatatcaacttgttctttgtaaaggcaaaggacggagtgatggtgccgcttacttccttgggaaatgcctcttataccaccggtccgggcagtatcaagcgtttcaatatgtttaccactgccgtcatccgcggttctgcggcacaaggctacagttccggccaggcaatggagattatggagcagattgcacgtgaccacttgccggacaatatcggtctggagtggagtggcctttcctatcaggaaaagaaggcgggaggacagacgggtcttgtgcttacgctggtattccttttcgtattcctctttttggctgcgcaatatgaaagttggacggtgcctatcgctgtattgctttcactgccggttgccgctttgggtgcctatctgggcgttgtgatatgcggattggagaatgatatttatttccagatcggcttggtgatgctggtggggcttgcggcaaagaatgccattttgattgtggagtttgccaaggtgcaggttgacaagggaggagacttgatacagtctgccatccatgctgcccaactccgtttccggcctatcctgatgacttccctcgcctttgtattgggaatgcttcctatggtgttggcaagcggaccgggctcggcgagccgtcaggccatcggtacgggtgttttcttcggaatgatatttgccattgtattcggtattgtgcttgtaccgttcttctttgtcctggtatacaagacaaaagccaaagtgcagcataagattaagaaagactgattttaaagacaacgtttatgaaaagaaagaacatatatattattttgttgctgagtatgtttgcccttacctcatgcaaggtgggcaagagctatgtgcgtccggagatggcattgccggatagcctggcacagcagcaggatagcatgagcatagccgatgaacagtggcaggcagtttatacggacagcacgctgcgtgctttgatagaccgtgctctggaatataacaaagacatgctgattgcagcttcccgtgtcaaggagatggctgcccaaaaacgtatcagtgttgccaaccttctgccgcagctcaccggaaaggtggaggctgagcgcgaggtggagaattacggtggtcatagccgtgatgtaggcaatacttacgaagccaaggcgttgctctcttgggaactggacctttggggaaacttgagatggaaaaaagtggctgctgtggccgaatatttgcaaagtgtggaggcgcagcgtgcgttgcgcatgaccatcgttgccgaagtggcgcaggcttattatgagctggtagcccttgatacggaactggagattgtgcgccagacacaaaaggcgcgtgaagagggagtgcgcttggcgcgtatccgttttgaaggagggctgacctcggagacctcttatcaacaggctcaagtggagttggctcgtacggctactcttgttccggatttggaacgccgtatctctctgaaagaaaatgatatatccttccttgtgggggaattccctacccgtatcaagcgtgtcaattttctgcaggaactggatgtgccggagtccttaccggtaggtctgccttccgatttgttggaacgtcgccccgatgtccgtgtggcggagcagcagttgagggctgaacatgccagagtgaaagttgcttataccaatatgttcccccgtttggccctgaccggacaatttggattggaaagtgatgtgttatccaatttcctggaatctccctattccttattgaatggggcagtcttggcaccacttttcggttggggaaagaaccgtgctgcattgaatgcacagaaggcttcttttgaagccgaagtgcatagctatgaaaagacagtgctgaatgcttttaaggaagcgaagaatgccattgtagatttcaataagataaaggaggtctaccaactgcgtgccaaacttgaacgttctgccaagggatatgtggatttggcacagttgcaatacatcaacggcgtcatcaattatatggatgtgctcgatgcccagcgtggttatttcgatgcccaaataggggtgagcaatgccatccgcgacgaacttattgccatggtaaatgtctataaggcattggggggtggctggcaaaccgaatgacgtgtgattaaagaagacagcaagggcgtgtatgtaccgaaatatttgatggtatatacacgcccttgttctataattggcttatttcatctaggattctgtatttagagtctccttgttttctttcttttcctttgccttttctacttcaagagctacgtttacagcattcatgcctttaaggccacgttcgaggtcgaacgtcacaatattgttttctgctatatctgtcagcacattgttaatgtggaaaaagtatttttcgaccccggataagtccttgatgaagccgaagcctttcgattcattgaaaaactcgatacgtcctctgcggatgaccggttcttccttgtcttttttgggagttgatatgacgatttcttccagctttatttcttctttgggagtgttttctgccggaggagtagaggttatcatgccgttttcgtcaacataggcaatcatatcttcaaagctattggctttgttggatagttttttttcttctttctttttttgtttttcagctcgtcgggcgagtcttttcttttcattttcacgcttgtctgcggagatggatttggccatgtatttttatttattgagttataaaaaaagcagggggcattgctacaacacctcctgcttttgtcaatagttaagaatattaatatcttctagagttgtaaccgcctcttctgtcgcgattgccgccattggaaggtctttcttcgcgggggcgtgccacgtttaccgagatttgtttgtggtcaaattcagcaccgttcaattcgtcaatggctttttggcctgctgcatcgtccggcatttctacgaaaccgaaacctctggatcttcttgtttctctgtctgtaatgattcttgcagaagaaacttctccgtactctgaaaataaatcgtttaagtcagcgtctgttgtgctgaaatttaaacctgaaatgtaaatgttcatttgaaattttaattaattgtaattattaaattggagtatggagaataattatggaagagaccgcctaataatagttgtatattaaaagaagaacaatgcgataacgactcgtaactcaaactttgcggcaaagataacacaataaatcagttaattgctttcttctcctttttattttaggataaaaaacgataaatgtcattttatacattatttcggcctctcgtttgcatatcttacgaaaaaaagcgaaatttgcgacgcttttaaacggaactttactaacacctttaaataattaagagaaatgactaaaagtgcattgcaaattgcaagggctgcctatcagcccaaacttccgaaagcgctgaaaggaactgttaaggctgcagaaggcgcagctactcagtctgttgctgaccaggaagaaatcaagaaattgttccccaatacgtacggaatgcctttgattaagtttgaaactaccgatgaggtggttaacttccccgcaatgaacgtgggtgttatcctttccggtggacaggctcctggcggtcacaatgtgatttccggtattttcgacggtatcaagaagctgaacaaagacagcaaattgtatggctttattctgggtcctggcggcttggttgaccataattatatggaactgactgctgacatcattgatgaataccgcaatacgggtggttttgacatcatcggttcgggccgtaccaagctggaaaaggaagaacagtttgagaaaggttatgaaatcctgaaagaactcggcatcaaggcattggttatcatcggtggcgatgactccaacactaatgcttgcgtactggctgaatactatgctgccaagaattatggcgtgcaggtaataggttgccccaagaccatcgacggtgacttgaagaatgatatgattgaaacttctttcggtttcgatactgcttgcaagacttactctgaagtaatcggcaacatccaacgtgactgtaactctgctcgtaaatactggcacttcatcaagttgatgggacgttccgcttctcatatcgctttggaatgtgcattgcaggttcaacccaatatgtgtatcatctctgaagaggttgaagctaaggatatgtctttggacgacatcgtgaccagcattgccaaggtcgttgccgaacgtgcggcccagggtaacaacttcggtacggttcttatccccgaaggattggttgaattcatcccggccatgaagcgtctgattgctgagttgaacgacttccttgctgccaatgcagaagagtttgctcaaattaagaaatctcaccaacgcgattatatcatccgtaaactctctccggagaatgcggccatctacgcaagcttgcccgaaggcgtggctcgccagttgtctctggaccgcgacccgcacggaaacgtacaggtatctctgattgaaacagaaaagttgctgtccgaaatggttggcactaagctggctcagtggaaagaagagggcaagttcgtaggcaagtttgctgcacagcaccacttcttcggttacgaaggacgttgcgctgctccgtctaacttcgacgctgactactgctactctttgggttatgcagcatctgcattgattgctaacggaaagaccggttacatgtcttctgtacgcaacactactgctcctgccgaagaatggattgcaggcggtgtgcccatcactatgatgatgaacatggaacgtcgccacggtgaaatgaagccagttatccagaaggctctggtgaagctggacggtgctccgttcaaggcattcgctgctcagcgtgaccgttgggctatggaaacagactacgtttatccaggccctatccagtacttcggtccgacagaagtttgcgaccaggctacgaagactttgcagctggagcaggctaaataagttgatgcatcaacaagttgacaataaaacggaggggcggttcattccgccctttcttttcctttgctcatggcaaccaagacctccacaaatatccggcgtaaaactactgccgcccgtcgttcttcctctccgcggagcaagaagaaaatgcagccacgtaccatgcccgtatggttgcgcaatcttttggcggtctgtatcattcttgttttttctaccggcttttactggtttttcattcgtccttatgcttatcgctggaagccttgttatggtcagaaaggttacggtgtatgtatgccttgcaactatgaggtgcatggcatagacatatcccactatcagggaaagatagattgggaactcctgacacataatagagaagcccaatttcccattcactttatttttctgaaagctaccgaaggcggcgatcatggtgacgatacgtttacgcagaacttcggccaggcgcgtaaatacggttttatccgtggtgcctatcattattttatccctaagaccgatgcccgcaagcaagccgatttctttatccgtaccgtgcagctggcaaagggagacctgcctcccgtacttgatgtggagactaccggcaagcagtcaccgcaggaacttaaaacggcagtcaagacttggctggatagggtagaggcgcattacggcgtaaagcctattctttatacttcctataaattcaagaaacgctatctcagcgattccattttcaatgcttatccttattggatagcccattattatgtagattccgtgcgttatgagggcaagtggcacttttggcagcacacggatgtaggcactgtgcccggtattgaagaagaggtggatttgaacgtctttaatggtacaatggaggaacttttggagcttacgttgaaaactccttgtatagaacgctaaaggtcaactttagcttcctgatattgacctttagctttttagtattgacctttattatttttggaatttcactgctgcccaccggttcttctcacgatggtggacaaagtgcagcccgttgcgttcggcttcttcgcggatgacgggaatgtcatctatgtagaaaccgctcatcaacaattccgctccgggattcatgcgggctatgtagtgcttcatatctgccaggaggatattgcggttgatgttggcgataaccatatcaaaaggacctttgctttccagagaggaggcatcgccttgggatacggcaatattgtccactccattcaattctatattttcgagggagttgcgcacacaccattcatctatgtcgatagctgtacaaggggaggctccacgcatgcgtgccagtatggcaaggatggaagtcccacaacccatatcgagcaatgctttgccttgcaggtcactatccagcagttcgcctatgatgaggcttgttgtcttgtggtgccctgtgccgaatgccatttgcggattgatgacgatgtcatattctgcttgtgggacatcgttgtgaaaagtgctgtgaatgacacaacggtctccgataacgatgggctggaagaagttcttctcccattcctcgttccagtctttgtcttcggcttctacgaaattatattctatctgtgtatcgggcagagggaagtctgcaagtgcttctttgagtagagattcgttatacagctctttctgtatataggcagtgataccgtcggtctgctcaacaaaactttcaaagccagcttcacccaagactccggaaagtacatcgttgactatttctgtgcacggaacagtgcggaatgtaaattctaaatatttcatcggaatatgattgtttgttaaatgcagaagaagattttaaagaacaaatctatttctgcgtatctttgttttcacactgcaaaggtaatgtaaaccgagggcagaataaaatgaacttgttcattttttatgcggaagtgccgcttgcctcgtcaaaaggcggggtatttagggaattccctataaatctttggggaaaatctgctgcatgggataaaatccggcgttatctttgtgacgtgaagaaatagataaacgtaaaatccataaaccaaactaatatgaaaaagattgtttttttatcgctttttgccttgtgcctcccatggacactggtggcacaaagtatagatgacgacctttactacactccttccaagaataaggaagagaaaaaagaagaggtgaagcaggagaagaaagtcgctgctcccgtagaagagattgtagtaaagtcgaatgtaccgaccactgtctattcatcgccgggaagcactactgttgtagtaaaagaccgtaagggaaacacccgcgatgtggacgaatataaccgccgttatgactcccgcgacaatgatttcgtgatggagaacgataccctttacatcaatgaaaaagaagatgacggcctggacggcgaatgggtgaacggtgaatttgaaggttcgcaggatgattacgagtatgctacccgtatcatccgtttccgtaatccccgttatgccatcagcatcagcagcccgctatattgggatgtggtctatggcttgaattcctgggattggaacgtgtataccgacggattatatgcatatgctttccctacattcaccaaccgcttgtggtgggattggcgctataactcttatggttggggcggttatccttactatggctggggatggaacagctggtacggtccgagctggagctttggctggggcggctggtacggcggtggctggtggggacatcatcatcaccatcactatcatcccggatattatcccggtggcggtggtcattggggaggcggccattggggaaatgcatataccaatagacgttcttatggtccgagccgttcttcttatgccggaaacagagtatcgtcctctacttctcgccgttcttctactgtaaatggagggcaggctgtacgtcgtagcagtactacttccggtcaagtgagacgtagcagtaccggtacgtcaacccgtcgggtggtaggtacaagaagttcgtctacagttcgttcaagttcttctgcaactcgctcaagtgtaaaccgttcgagtgcggcttctacccgccgttccacttacacccgtccaagcagtacgcgtagtagctcatataatagtagcgtagaaggagttcgtagcagtcgttcttccggtgtacgctcttctgttggaacttccactcgtagcaggacttcatcgacttataacagaggttcaagcgccgcaccggcacgcagctactccaatgacaacaatcgtagtagcagtcgttcatattctgctccagtacgttcatccagtagcacccgttcttcttccagcttctcttcaggcagtagctcacgttccagttactccagtggtggtggcggtggtgccagtcgttccagtggcggcggtggttccagaagacggtaagtataagtatgttttaatctaacaagactaagaattatgaagaagataaccatgatagcccttgctatgtttacagctgtaggcgcaggggcacagacaatatatgatgcaacgaatattgcacagaaggaattgaatggaaccgcccgttttgtcggaatgggcggagctatgggagcattgggtggtgatatttctaccataggaaccaatcctgccggtatcggtatttatcgtagcaatgatgctatgcttacctttggctattcaatgacgggcacagaaagcaattatgttggtaataaatttgaaacgaacaagaaccgctggagttttgataatgccggttttgtgatagcttcgaagataggcaatcatactcctttgcggtatgtgaattttggttttaattaccacaaatcaaagtcattctataagaatatgacgatgcaggggttgatgggaagcatagataatcaatatgtatctcaagtgcggagtatggcgcagcaggctacggatgcccaggattatgtataccacaattataatcagcaacgcttgaattgggaatcgaatgacatttatcgtgacagtgaggctggctggttgggagctgtaggttatcaaggttctcttctttttgagaataggcagaccggttctcctgattcttatgacccttatattccttccgaagcggatgcttatttcttgtcgcgtgagcgtggcggtattgaccaatatgatttcaatatctccttcaatataaatgaccgtttttactttggtgttactctgggtgcttacgatgtggattacaacaaatattctctctatgatgaaatgtatgcctacaaatgggagggcgacgggcagatttatgaggaaggctactctttggagagctttaaccgtatacacggttcgggtttcgacttcaaattcggtgccatcttccggccgattgaggattctccgcttcgtataggtttggctgtgcatactcctacttattacaaactgacttatactacgggagcgttgctgacttcggatttgtttttaccgaatgaggctggggatgaaactcttactcgtaccactgtggatacttattctgcattaggcggtagagatatggaccgtgattttaagctgcaaaccccgtgggtatttaatgcaagtttgggctatacagtcggtaataatctggctttgggagctgaatatgaatatgaggactactcaagcatgaagttcaaatatcctgaaggtgacgagatggcatgggaaacaggtgaggctgacctctgtatgaagggggtaagtacgcttcgtttaggagcagaatacaagccgatacctgctttctctctgcgtgccggttacaattacagtactgcagcctataaaaaggatgctattaaggcattgccttccaattctataaatacagatacggattttgccaatagcaaatcgatgaatactttcactttaggtatcggttatcgcttttcttcgttttatgcggatttggcttataaattcgatacttataaatctgatttctatccgttttataatgatataaatggcttggtaacaccgccaacaacggaagttaccaacactcgcagtaaagtgctatttacattgggcatgcgtttttagaagaactattttcattgcagataacctttcattgtcaatataccttagggtataaaagaactccccggaatgtacaaatacatttcggggagtcttgtgttataggggagggattacagataccatgccacgccaaatgaatagggagatacttccggtcccttgtctttctggaataatccgtatgtggagtagcgcaggtaaatgccgatattaccataaccggcttgtgccagcaggtttatgccgacgggctgcacatacatacctttgcctacggttttcttcttgcctccgttgatgtgtgagaatgacttcacactgtgacgtatctcaaattcgggaccggcattgaagaacactttgtttcttcccactctttgctgccattccatcaatacgggtacacggaagaagaaatggcgcagacggcttttattgtaactggtgtcttcgttgcctgcggtgaagatgctggttccgttttccttcagcaaggcatagttaccgtcgatattgaaagaacggtatccccagctgactcccaggttgattccccaatgcgggttcttcttgaagttgtgatatacggagaggatgttgaagccgaattcccatgacttggataagtcgagtcccatcttgtcgcttgctccgaaggaaaggaagtcgttagccagccggctgtagccaatatacagaccggaacagtgcggttcgtaagcattgtaccttctctttttggggatgaatggcagggcatcgaggaaagtacgcttgtctgcatccactttctcgagatagactccttcgtagatttgcacttctttcttttctccgtcttctagctgctcttcgtacaccttgatgcgcatgtctccctttcctttccggatgatgatggagtctccttgtgtctgtactgtagctttctgttcagggtcagtctgttgttgtgctgccatgcggccggccggcacagcaagcaggcaggccaaaatcataattctggttttcatatcgtatattgtttttagtgttattccgatttgtagagcatatccatcatttccttttcactgagcagtccctctatgtaaatcaaagtgcccatggagtcttttcctatcttgaaaatgaggtagcggttcagtttctttccattgcgttccacctctttcagttggtaataggcactgcgcagcacaccgctttccattacctcctgcgccttctttgcattgtcttgcttgtcgtgtacaatggcctgctgaatttcccggcgatagggggatacattcttgaacacaaggctcttgtaggtagtcatgcggtaagatttcaggatgcttccgttcagctctaccctggtcacgtccttttgttcgccatacttgttgaacaggtcggctatttgcagtccctcttgtgcatgtgcaaaggctggcaggcaaatcagcaggaaaaagaggcacagactacgtatgcaaatcagtatagatgttttcataaccttgttatattagtgttgaaacagtaagttgcttaaatcttcatccgtgaagctggcgttctgcagggcttctagtgctttggcttccaccagtttctcgtctgtataccgctggccgtcgatgacgacataattttcgggaacaccggaaagcggaaatataatcttagctaccccgagaagcaggagcaatccggcggcaatgccgctgacagcatagaatgtgcgatagagacggaaaggcttccgctgtgcgggtacttcctttgccgattctgttgttacggatttttcctctgtcggttctgccattgaagttgcttcccggttcagataagcgaatagggggcggtacgtttgcaggtgctccggcacttcctcttcggtaaagaaacggcgcagttcacgctcttcttcgcaggaagtttccccttcgaaatatttatccagcagttcatctatcttcatggctcatttctcctttcttttctttcttgtatggttcgcaggtaaacgtctctcactttcttccgggctcttgacagattgctgcggatggcttccggtccgcatcccgtgatttcggcgatttcgtccgtttcgtatccttcgatgtccttcatccgcatgatggtgcgttgaagattgggcagcgagtcgatgatttcgtgcatcagacggatttcatctttgatttccaacagccgttccggtgttccggtgggggatgccgcctgcactatgtcgagagatagggtgtcgttgcgtttgcagcgccacatatctatacagatgttgtgcgtcaacgtcatggcaaatgcttcgatgctccggtattgctccagttcaagccttttgttccatagcttgagcagtacctcctggacggcatcttctgcatcctccggttcgtcggtcaacttccgtgcatagttcaacagcttggcacggagtggaagaacggttattttgaattctttgagttccatttacacagataagacgaatgggaaatacaaacgtgacattgtaaagtgaaaaaagttggaataaaaaaagggacttactaacattagcagtcccttttcttcacattactataaaagtataggattatttcttgaaatagcggttgtacagaccttcgaaacctttaccgtgacgggcttcgtccttagccatttcgtgaacggtgtcatggatagcgtcgaggttcaatgctttggcacgggtagcgatacgcttcttgtcttcgcatgcacctgattctgcgttcattctcttttcgaggtttgtcttggtgtcccatacgcagtcacccagcagttcagcgaatttagcagcgtgttctgcttcttcccaagcgtaacgcttgaaagcttctgcaacttcaggatagccttcacggtctgcctggcggctcattgccaagtacataccaacttctgtacattcgcccatgaagtggttgttcaggtctttaatcatttcgtcgtcgcaacctttggctacgccgattacgtgttcgtcggcaaataccagcgggccgtcagctgttgcttcttcaacttctacgaacttgcttgcgggagctttacacaatgggcacttttcgggagctgcatctccttcgtatacgtaaccgcatacagtacatctaaattttttcattttctctcagattttaattagttgaattagttattctttgttgttcttaaacgttcttcttctatgcaatgtttacagattcctttataatagtagtggatttcctgcacatcgtgcccgtccatatccatgtcgaccactttcttgatgttgttattgcacatcaagtcataaatctttccgcaacgcttgcacaagaaatgaccgtgcgggctggtatcggcatcataacatgtgttacgctcgtcgatagtcagggtttgtgcggcaccttgctcgctcagtagtttcaaggtattgtataccgttgttttagacagtgtcggtatggagggagacagtgccgtatagatttcatccaccgtgggatgcgtacgatgctctatcaagtaattcatgatggctatgcgctgtactgaaggcttgatattatgattctgcaatcgttttactacatccatataatctaaagtttcaaacttgtaattattacatttttaattcgcttgcaaagataggaagttcctataattctccaaaagatttttggaaaatttttagttgcggtcattaaaattgtttatatatgttcctcttcttgtaggcaggttgccgtatttttgccataaaagcgaaggcaggatgcaccccggcttcagtcggtttctcgtgccgatatagagaaaacgtttttctcttatctctcttaatcagaattttgccgtatctttgcaccgaataaataatatagcatccttatgaattacggatatgtaaaagtagcggcggctgtgccccgtgtcaaggtggctgactgtaagttcaatgcctcagagattgaaaaagagattattatagccgacgggaaaggtgtgcaaatcattgctttccccgagttgtgcattaccggatatacttgtggcgacctctttgcccagcaacttctgctcgaagaggcggaaatggggctgatacagattctgaacaatacgcgccagatggatatcatttcgatattgggcatgcccgttgcactgaacggtgtgttgctgaatgcggcggttgtcatccagaaagggaaagtgctgggcgttgttccgaagacttatcttcccaactataaggagttttacgagaagcgctggtttacttccgcttgtgaagtggcagaaaacagtgtgcgcctttgtgggcagattattccgatggggagaaacctgctgttcgaaacggcggataccactttcggtgtggagatatgcgaggacttgtgggcacccataccgcccagctccacgctggcgctgcaaggtgcggaaatcttgttcaatctttcggccgacaatgaaggtatcggcaagcacaattatctgcgctcgctcatcagccagcagtcggcacgatgcattgccggttatgtattcagctcatgcggtttcggagaatccactacggatgtggtgtttgccggcaacggactgatttatgagaacgggactctgctggcggcaaacgaacgcttctctttcgaagggcaggtggtcatcagtgaaattgatgtggaacacttgcgtacggagcgccgggtgaatacgaccttcgcggcttgccatgcaaattgtgtttcggcccttccggtacgaatctctacggagtatgtcaacagcagggatttgaacctgacacgtacttttgaaccgcatccatttgttccgcaggggatagcgttggacgaacgctgtgaggaggtattctccatccaggtgtccggactggcgcaacgtctggtgcatactaaagcgaaaagtgccgttatcggcatttcgggtggactggattctacgctggcgctgctggtttgcgtaaagactttcgataagttgggatggtcccgccagggtattgtcggtgtcaccatgccgggattcggaacgaccgaccgtacttacacgaatgccatcgacctgatgaactccctcggtgtgactgtccgcgaagtcagtatcaaggaggcctgcatacagcatttcaaagacatagaccatgatgtccatgtgcacgacgtggtttacgagaatgcgcaggcacgggagcgtacccaaatcttgatggatattgccaaccagacctggggaatggttatcggtacgggcgacctttcggaacttgctttaggatgggccacttacaacggcgatcacatgtcgatgtacggtgtgaatgccagcgtccccaagactctggtgaagcacttggtgaaatgggtggcagagcatgatatggacgatgcttcacgtgctaccttgctcgatattgtggatactcccatcagcccggaactgattccggcagatgagaacggtaatatccagcagattaccgaggatttggtgggaccgtatgagcttcacgacttcttcctttattacttcctgcgctgcggtttccgtccttccaagatatttttcctggcagcacgcacattcaaggggatgtatgatgaagaaaccatcaaaaaatggttgcagactttctgccgtcgtttcttcaaccagcagttcaagcgttcctgtttgccggatggtccgaaggtgggcagtatctctctgagtccgcgcggtgattggagaatgccgagcgatgcttcgtcggagatgtggctaagggaggtggaaggactctaattctttacttcgggtatgccgtaatatcgatatgggtatttgatgactgcatcttgtttgcattcttgctgcatgtattttgcagtgcgactgcaaacgtgttgcagtatcactgcataactgttgcagtcgtactgcatatcggtgtgcagtgccactgcaacggctttgcagtggcactgcaaaatgtatgcaggattttgcagtaataagctgttgattgataactagttgtaaaagtagggatatgctgcgtgtatggaaaagtgcagcttagtttcgtttcccgtagtatcgtttgtagattttcttgtattcttttccctttttgaaactatccagccatgtgttgaggctgtccagcaggataggggactgtttgcttaccccccaggaatagaattgcgtgaagctgatggcggtattgatgtctatttgaggaatgctgtcggctgcggtacgggcaatgctttcgtcgcatacggcatagtcgatgtctccatgggctaccaaggcaatcagttgttcggaaccgtacttctctatttcctcaacgtagatggtgtcgcctatctcatttcccaggttgcggatgcgtagtatggaaggggagcctttcactacgtgcagtgtctttccagccaggtccagttggcttttgatgaataatgacgagtcggaaatattctcaagcttgcgttgcaccagcacttgcttgttcagcacaataggggtggtaagcagcaaggagtctttcagctcactggtggcgaggatgccgtaggcaatcacgtcatattgcccgtcggccaggccttccagccgcttgttgaagctcatttccggtgatatggccgcttgcagcccgtggtcgcgtgcaaaagcttctatcagctcgtagtggaaaccggacaaggtgtcatcatccacatagaaactgatggagttgtattccgtcgaagcatgtatgatgccttcggcagctatctcggcataatcgcgcggatgacctttcggtttctcttctttctcgatgagatagtgggcaatgagagccgctgcaattcccagaagtgcgtatttgagcagtctgcttttcgtcatacagtcatctgttagtcatagaaattccatgagacgccaattttgaacaagcgcggattgatggggtagtgcggcaccaggaaggaattggcgcttcccatacccgcgttgacgtgatacatcatggcaaagatacgcgtccgcttcaagtgcaggttggcatatacgtttacgatggggtaaccgcctatttccaccaaatcgtccgtaggttgcagatggaactgctggacgccgggtgcataggcaggtgcgttgtacttggtgaagtaacggacatcggcacccaactgaacggtcagcaccttcttggcgagtttagccagtatgtagaagttatggtagagcgagagttggggcaatggaagtactgtttcattgctcgtcttctgccaggtcacctcattgtccaggtggaagacaccgaggcggaagtcttgtttcagtgtggcggacagcacttgtatgttgcctccgttctgttcgggcagggcgctttggttgaagtaggtgtagttcttgatattctctacgccggcacggagattggttccccaacgggaaatgttcagctcgccttccacacgcgtacggaattccttgtccatgttgtcgttgtcccagttgtagtggttggagtggtaatggcgcatgtagaaggaaggaagcgtgttgctcacataaccgcgggcgtagaagttcaccgtatctttccatagacggaagttcaggtccagattggcgttgacgcggaactgcccgatggctttgtctaccaaccccacttcaccgtttacgttgtagtgcagcagtttgccttcgcgcttggcgagttcgccacccaggaagatttcctgctcggtgtagcggatgcggcgcatgtcggtaagtgtgtccgtattcatcaggtcgtaccggctgaacttgtgggagatataagccgtaagtccggctttggcgtatttgttgaaaccttccagcaaggctattccgaacacgttctttacactgaatgccgtggtggagtcgttgctgtaattcttgtaaagcttgtagtcttccgggaagaatccttcgggctcgcttcccgaacggaattggtgccgcgaccgctctactttcaaggtatggataaagctggtgacggggacgaactcttcttcgaaaagtgagtcgttgtctgcggtagaaacagacggcaggctgtcattggcagctgcaagtgtgctgaccgattttgatgctatgctgtcgtttggcaatgctatgtcgttgttcgaagcggatatttcggattcagaggacggggaggatgaggctttgggtgcggataccgtcggtttgccttcttgtgtgttccgtactctccgcgtaaaaccaagacgataacgctgtgtcagatagatataaaaatccttgttacggttggaactctgttccaatttgaccggaatagtggtggactcgtactctttctttcctccggacatgttttcgggacgggtgatgtattggtcgtctgcaataccgccgttctcgttcatcttcaggaaaaagttgttgtagactgcttgtacctggtatttctcgccgatatagctaccgaacagacctgcattgaagtgcgaggtggactggttctggtaataaccgcgtccgtacagatagtcgatgttaaagccaaatgccaactgcttgttgacgttgacggagaagtaggacttgaagcgttcttcaccgttcactttgctgccggctttgtagtaggtaagattggtgtaaggcacgttgctgttggtgaaaagcacctggtcgggacgtgtgaaaaaactggagaagggagccatgaagatggtaggttcgctttcctcccgttcgaagaacagacgtgagaggcgtggagaacctaaatttcccaagtagttgtaatggccgaacattccttccaccagattggtgctctggaagttgaggctggctgtgtcggcaggtatgatggtacggttgcccagtgtctcacttagtttccacatgtaaagcttgggtggaagactttgaatctcagtattggtactgtcttccagattgtccggctgggtatttgggtcaatctggttaccgaaccggtcgcgattgttcatcgggtttaaggtgttttgcgccatagccccccatatccctataacggacagaaatatatatgtcagtacaattcgtctcataattaggcgcaaagatacaataaaaaattatttgcttactgaattcagccttttttgcttcttttaaactgtcttgttttctgttttgttctatactgcttccggttctctgcccttgaatccatactttttccggcttgaaatgaaataagcccttgcaataaatcaatatcacaagggcttatccgttttcctttatctcttattctggcgtaaagttcctcctcttatggggagtggctttacatagcctttcatttcatttcctgaataagttccattcctttcttgatagcttcttcgttcatcggtatcaagtggtggtggcgttcgggcagtgtcttcttcaatcctctgagtacactgtccagtgtaaccatcggcttgattttcaataatccacccaatacaatcatgttgaatgccttggcgttgttcatttcattggcggcatccatggcgttgatgcggtaaacgtggatgtccttacgcgtcggcgggttgatgatgccgtaaccgtcgtagataagtacgcctccgggttttaccttgctttcgaatttctccaatgacggctggttcaggatgatggcggcatcgtacttgcttaagatgggtgaggatattttctcgtcacttacgatgactgttacgttggctgtaccaccacgttgttccggtccgtaagccggcatccaagtcacctctttgccttccatcaatccggaatatgccaaaatctttcccatggacaatacaccttgtccaccgaagcctgctataatgatttcttctttcattgttcttctgtctttagcatgattatttatctttcaggtcgcccagcggatagaaggggaacatgttctctaccatccattcattggatttcgcaggagacatcttccagccggagttacaggtggaaacgatttccacaaggttggaacctttgcctgccatagagttctcgaatgctttgcggatagcctttttcgctttgcggatggcgggaacggactgtacgctttggcgtgtcacgtaagcggttccttccaattgtgcagcaatatcggccatcttcagcggatagccgtgcagatgcacgtcacgtccgtaagggctggtcgatgtcttcatgcctacaagggtagtgggagccatttgtcccccggtcataccatagatggcattgttgatgaagatgatggtgatgttttcgccgcggttcaaggcgtggatggtttcggcagtaccgatacaagccaggtcgccgtctccttggtaagtgaacaccaggcggtctggccaaaggcgcttgatggcagtggcaagtgcgggcgcacgtccatgggcggcttcctgccagtcgatgtctatataattatagatgaacacggcacatcccacgggggagatgcctattgctttgtcttccagtcccatttcttcgataacttcggctacgagtttatgaactacgccgtgactgcatcccgggcagtagtgcatgggattgtcgttcatcagagtcggtttcttggcaaccagattctcgggctttataatatcttcttttgtcataatcacttctcctatctgttggtgaaccgtatgaaaaactccatcaacttgacgaatatcgccgcgccgcagacgtagatgaacagcttgaagtcatcttttgcagcaaaatatataatgatagctgccagggcaagtaccatgaagagaatgttcagtacgtttcttattttatcaggattcatttcttaatcagtttttctttcaatgcatctactatctcatccggatcgggaacaatgccgccgaggcgtccgaaatgttccactttcactttaccgttcacggcaaggcggacatcttccaccatctgtccggcattcaattctgtaacgagcatacctttcaccttgtcggcatacgcggcaatgactttggtcgggaacggccacaacgtgatggggcggagcatacctacctttattccttcttcgcgtgccagctccattgctttctgtccgatgcgtgccatagagccgaaggctacaatcaggtagtcggcatcatcgcaatgaatttcctcgaagcgaacctcattctcttctatctgcttgtatttggcctggaaacggatgttgttcttttccatttcttccggtttcagttccaatgaggtgatgacgttgggtttgcggccattggttctgccggtagtggcccatgggcattgttcgatgacttccgcatcggtgcggcgtggcttttgtaccgggagcaccactttttccatcatctggccgatgacaccgtcggcaaggatgattgccggattacggtatttgaaggcaagttcgaatgccagtcctacgaaatctgccatttcttgtacggaagccggagcaagggcaatcagacgatagtcaccgtggccgcctccttttactgtctggaaatagtcggcctggctcggttggatggttcccagaccgggaccgccgcgcataacgtttacaatcaagcaaggcagctcggcacctgccagataagagataccttcctgctttaggctgacaccggggctggaggaggaggtcatgaccattttaccacttccggcaccgccgtacaccatattgatagctgccacttcactttctgcctgaagaaccaccatgccggtcgtctcccagggtttcagttcggcaagagtttccaatacctccgattgcggagtaatgggatatccgaagtaaccgtctgcaccgcaacggatggctgcgtgggcgatggcttcgtttcctttcattaatacaacttcttctgccatattctactgatttacagatttattctacttttattttatatactgagatacatccgtccggacatactgtggcgcacgaggcgcagccgttacaagtatcttccaatatttggtgggcatagttataccctttcacattcacctccttggtgagggctattacgttgagcggacacgctaccacacacaagttgcagcctttgcaacgttcggtgtctactacgattgctcctttgatttttgccataatttacgttctttatttattgattgtacatatccttgttgtagaagttcaggatgtccatagccatttgataggcatgttgtgccgggctttcggggttcaggtcgatggcatactgatagttgttcagtgcttgttgccagttgccttgtttccgataggcatttccccgcaggtagtaagcttcgtctttgccgggaaagtctgtttgcagtatttcgtcaagctgctggatggcttgctctacatttccctggttgataagctcttttatggtattcagtcgttccatatctaaaaaatatccgggttatcgaaccacaaagatagtttttatttgaagacaatgagcatcttcactgtgaaaaataagaaaaaggggcaaataaaaagcccgaagtttctcacgattctatcagaatgtcagagcttcgggcggatatcataaagaatgtgattctactgctttacaagtgtaccggtatcttgtccactcttcgttggtggcgtccgccttcgaatggtgtactgaagaattccctcataatcatgtcggcttcttcggtactgatgaatcgccctggcatgacaagcacattggcatcattgtgctggcgtgccaaatgggctatttctgctgtccagcagagggctgcgcggataccctgatgcttgttcagcgttatactgatgccttcaccgcttccgcagatggcaatacccggatagcactctccggcttcaacggccagagccagcggatgcgcaaagtcgggatagtcgcaactctcggttgagtaggtcccgaagtccttgtaagcccagcctttggcttccagccagccgcggacatattccttcaattcgaagcctgcatggtcggaacagattcctattgttttcatgatggtcagttaatatactaatgtgccaatgtgctgatgcctgcagcttgtagggcgcgggcaatcagcacatcagcacatcggataatgattataacattgcttttacttgcttgtaaacgttctctgcggtgaaaccgagcttttcgtccagcactttataaggtgccgagaatccgaatgattccaatccccatactttaccgcggggacctaccagcccttgcagtgtgacgggcaaaccggctgtcaggccgaataccttggcaccacacgggataatgccttcttgatatcccggagcttggctacggaacagaccttcggaaggaacggacacgatacgcaccttgatgccatccttgcgcagcaattcagtaccggctaccaatgtggcaacttccgagcctgaagcaacgaggattatatttggattttcatcggagccggttacaatataagcgcctttggcagcttgttcgtaatcgttgccttcgggcaggttggcgatgttctggcgggagaaaatcaaaccggttggggttgtggtattttccattgccagtttccatgccacagttgtttcttctgcatctgccgggcggagtaccaacatggaattatgtcccttgtggtttttcagtttttccatcaggcggatttgggcttcctgctctaccggttcatgggtaggaccgtcttcacctacacggaaggcatcgtgtgtccagatgaacttcacgggaacttccatcagggctgccatacgtacggcaggtttcatgtagtcggagaatacgaagaaagttccgcaagcggggattacaccgccatgcagtgccataccgatacagcaacatgccatagtcagctcggcaacaccggcctggaagaatgcaccgctgaagtcacctttcttgaaggcatgtgttttcttgaggaatccgtctgtcttgtcggaattggaaaggtcggcagaagcaacaatcatattttctacttgagtggcgagagcactgagcacagtggcagatgctgcgcgggtggcaacgcctgctttctgttcgatggcggcccaattcacttcgggagccttgccggagaagaacatttccagtttggcagccttttctggattggcttttgcccatgcggctttggctgcatacttttcagccatgattttcttcagctcagttgcacgcttggcatatagttcggccacttcggggaagatgacaaacggatttgtcgggtcaccacccaaattcttgatagtgtttatataagcgtcgccgcccagaggagcaccgtgcgtggcacaatcagcctcgtagctgctgccgtctgccttgcgggcacctttacccattacggtatggccgataatcagcgtcggacactctttctcagctttggcttcgttcagtgcaccgcggatggcatcgggatcgttaccattgattttaatgactttccagccccaagcttcgtatttcttgccggtatcttcgatggtcacatcctttgtctcggtagaaagctgaatgtcgttggcatcatagaacatgatgagattatccaaccctaatgctccggcgatacggcctgagccttgggagatttcttcctggatgccaccgtcagaaatataagcgtagatggtctgtggcattacttcttcgaaacgtgccttcatgaacttggctgcgatggctgcaccgactgcaaatgtgtgtccctggccgagcggtccggaagtgttttcgatgccgcgcatgatgtcacgttcgggatgtcccggagtagggcttccccattggcggaactctttcagttcgtccagcgtgaacttgccggtcagggccaatgtagagtaaagcatcggtgacatgtgtcccgggtcgaggaagaaacggtcacgaccttcccaagccggattttcagggtcatataccaagaactctgagaagagtacatttacaaagtcagcaccacccatggcaccgcccggatgcccggagttggctttctcaaccatggatgcagcaaggatacggatattgtccgccgcacggttcataagtttgttgtcgttcatattgaatctaattaattttgaatattatcaataggttattgggtccttgtaggttttccaagggcaaagataactctttatgcgtaattcacaacactcgaagagtgtcttttttatcagtattactgcctttttgctgctaaaatgatactaaacgtatttagctgattttgtgcggtgcacggtagttttactgtaactcaatagtaacgattgatttggccggaagtttaatcttgagaatatctttattgatttttacctctttgaacggaacgggtttcacattgtcgggattttcaaatgaattgtagtccgtcagattggtggaagtcaatatttcaccaactgctttcttggctttcgttccagacagattgatggtcacttcctgtgcattgtctgcatctacgttggacatggaaatgtgtatcttgccgttttggtctttggaggcggtagcgctgaccattggtattctgcggttgtcgcgtatatccatcatgtcgcagctcagctcaagaggaatgtaggtggcatcctggtgtacattgtacattttgaatacatagtaagtgggggtgagcaccatgttttttccgctggtcagaatcatggattgcaatacattgacgatttgggcaatgtttgccattttcagacggtcggtatatttatggaagatgtcgaaactgagggaggcgacaaaagcatcacgcaatgtattctgctggtacagatgtccgggattggtacccggttcagtatcccaccaggttccccattcgtcaagcataagagctacgttcttttgagggtcgtattcatccataatggtacaatgcttcttgatgacatcttctatttcgcggcatttgcccagtgtccagtaatagtcgtctttactgaatcgggtggcggcgcctttactgccgttccatccgctgacggtatagtagtgcaaggaaagaccgtgcatacggccgcctacgcggtctatcagtactttggtccagttatagtcgtagtcgctggcaccgctggctatcttgaagaggctattgccgtcatagttgcggcagtaggtggagtagcggcggtagaggtcggcataatattcgggacgcatgcttccaccgcaaccccagctttcgttacccacaccgaggtattttactttccaggctttgtcgcgaccgttctggcggcgcaggcgtgccatgggggagtctccttcggaggtcatgtattccacccatttggcaagttcttctacggtaccactgcctacgtttccactgatatagggctcacatcccagcatttcgcagagattgaggaactcatgggttccgaaactgttgtcttcgatagtgcctccccagttgttgttcaccattttggggcggttttctttagggccgataccgtccatccagtggtattcatcggcaaagcagcctcccggccagcgaaggacgggtacacggagctccttcagtgcattgaatacgtcggtgcgataaccgttgatgttgggaatatcggagttttcacctacccaaagtccaccatagatacaagttcccaaatgctctgcaaattggccgtagatttctttgggaatgatttgctcgctttggtctgtatgtaaagtgatagtggcacttttctgtgcgaagagtgacaacgaggcggagagaaatatgctactgataaataactttgtgttcatagttttttagtgttattaaatacttagttcttgaatcttactgctgcttcttcgatgggcaaaccagctttatagctttcgatgtaggtgttgaatccgcttacatcttcggctgtcggtgagatttcaataccggcatctccggtgaatacatgcttgtccaggaagtcggcaagggattggccgtttccattgtttgcaaggtaggaagcgaggagggcaataccccaggcaccaccttcgccggctgtttccataacggaaatgggtgaattgatggcagctgccagtattctctggcctactcctttggttttgaagagtcctccgtgaccggtgattctgtctactctgattttttcttcattgaaaaggatgtcgttgccgattttgagaactcccactgaagcatacagatgggtgcgcatgaagttggcaaggttgaacttgtcgtttgccgaacgtacaaacagtggacgtccgtctgccagtcccgttataggttcgcctgatatgtagttgtatgaaatgaggcctccgcagtctgcattgcctgtcagggcgtggttatagagttttccgtagatttcgtccatatctacggggatgcccatcagttcctggtattctttgaaaatattgatccaggcattgaggtcggaagtgcagttattgcaatgcaccatagctacgaggcttccgtcgggggtggttaccatgtcaatcatttcgtagggcttggacaattctttctccaatacaatcattgagaaagaggaggtgcctgccgatacgtttccagtgcgctgctttacggcgttggtggcaaccatgccggttccagcgtcaccttcgggcggacagacgggaattcctgctttcagatgtcccgatacgtcgaggcgactggctccttcgggagtaaggaagcctgcgttttcaccggccgacaataccttcggcagaatatctcgaagcttccagtcgtatcctttcggagcaataagtttgtcgaacttatccaccatttcagaagaatagtttttggtgatgagatcgatagggagcataccggaggcatctcctatgcccagtaccttttggccggttatttgccagtggacaaaacctgcaagggtagtcaggtaattgatggatggaacgtgctcttcattatccaggatggcttggtagaggtgggagatgctccaacgcagagggatgttgtagacaaatagttcggatagggctgcggcagcctggccggtattagtatttctccaggtacggaagggtacaaggatttcttctttttcattgaatgccatatagccgtgcatcatggcactgacaccgatggctgccagggtttctatctctgtatcgtagaggctctttacattggtacgaaggtctgcgtagcaatcctgcaacccataccagacagcctcgacgctatatgtccacagtccgtcgactaactgattctcccaagtatggcttccctgggcgatgggtttgttttcctggtcaatcaaaaccgccttgattcgtgtggaaccgagttctataccaaggatggccttgcctgcctcaatggttgattttgcatctaatttcatggtattaatgataatttacggatttatagtacgattataaacaacggattactaattgcaaactactagttacgtttgtggtacgtgtaattagtagtccgcaatcggtaatccgtaatgattatcagcaaagtgccttgttcagcatatagtagacttcattcatgcgcagttcttttttgaactcgctgatggtggtattttcatcgatgactaccatttcgatgccggccatttcggcaaagtcttcccaatattccaccgtcaggtcgtaggagaagctggtatgatgtgtacctccggccagaatccaggctgcagcgcccacctcgaggttgggcattggaatccacagtgcgctggcaacgggcaacttgggcagaggcttgctcttgatgcattctactttgttcacaatgaggcggaagcgattgcccaggtctacgatggtagcggctacaccttcaccttgcttgctggtaaataccaggcgggctgtttcgctgtcgataccgatgctcagacggtgcacttccagtttcggcttctgttcggcaatcagtggacagacttccaacatgtgtgcctgcaggatggcgctcttttctccgtcgaagttcagcgtatagtcttcgaggaaggagcaccccttcggcatgccttgactcatcacccaagtggtacggtatagtgccgcagttttccagtcgccttcggcaccgaagccgtaaccttccgccatcagtcgctgtgaggccagtccggggatttggtcaaagtcgcccaaatcgttgaagttggtggtgaagcctttggcacccgtgtctttcagcacgcggcgaatggcgatttcggccttggcggagttccatactttggtgtaagcttccgtacgtgcgtcttccagttcgggagcgtggtcgtagagcttgaagtattctgctacgagtgccttcacgtcctcgtcgctgacagcattgtagtatgtcatcacatcattgatgggatagtagtccacatgatagcccaatacttgttcggcactgaccttgtcaccgtctgtcacagccacgttgttcatctggtcgccgaagcggatgatgagcatatcctgcgcatcagcccatgcggcagctacgcgcatccatgcggcaatctggttttgggctttttcgtcctgccagtggcctactaccactttgcggttctttcgcatacgtgtcacgatgtgtccaaattcgcggtcgccgtgagccgattggtttaggttcataaaatccatgtccatcgtctcccagggaatttccttgttgaactgtgtatggaaatgtagtaatggcttcttcagttcctgcaaaccgtgaatccacattttggcaggagagaaggtgtgcatccaggtgatgactccgatacacttatcgtcgttgttggcggctttgaaggtagcggttacttctttggatgaattgaccgtacctttatatactacctttacgggcagtttcccggaatcattcagacctttcaccatttcattactatgtgcgtctactgcgataactgcgtcacctccgtacaagagctgtgctccggttacgaaccatacttcatattgttcaaatgtgttcatacaatttatttttatagtttatatttaaagaatgatagttatttctgtccataataagcgttaggaccgtgcttgcggctgaaatgtttttctatcagcagcggattcatggtcagattggggttcacggcataggctatacttgccatttttgccacctgctccatcactacggcattatgtaccgcctcgtgtgcgtcttttccccacgagaaaggaccgtggttctttaccaatactccgggagtatgtaccgggttcagcccctcaaagcgttttacgatgacatttcccgtttccagttcatacgctccttccacttcctccttcgtcatgtctgctgtgcagggtatggcgtcgtggaagtaatcggcatgtgttgtcccgatattcggtatgtcacatccggcttgtgcccaggctgtggcgtaagtagagtgcgtgtgcaccactccgccgatttcggggaatgctttatagagaaccaggtgggtcggcgtgtctgaagagggctttaaccgtccttccacgaccttgccgtcaagattcactaccaccatatcctctgctttcatttcatcgtaactcaccccactgggcttgatgactaccagaccagattcgcggtcaatgcccgatacattgccccatgtgaagataaccaatccgtgcttcaccagttcaaggttagcatggaatactttgtctttcagtgcttcctgcatattatttaaattactaattacaagttgttgaatattaggttctcagagcttaaatttcggagctttgcggtatgccttctcattaaactgatataaagcagctccacgtttggaccccgttttgtctattttgtcagttttttctatatagtccatttctgctatgcgttttcggaagttccgtttgtcaatgctctcgccgtatatagcttcgtataagctttgcagttgtgacagcgtgaacagtttaggtagtagattaaagccgattggttcggtggacgctttttgttgcatcaacttccgagctttctccaccatttgcggatgatcaaagattagcgctggcagttcattgatatttacccagaaagcattgtgttgctgtacggattctttgtcgtattcgttgatgttgatgagcgcatagtaagcaatggagactacgcgttctcctgggtcacgatctatggctccgaaagcttggacttgttccatatatacatcttccagtccggttagttcattcaggactcgtttggctgcatcatccacgctttcgtcttcctgcacgaatccacccatcagcgaccattcgcccattgccggttcgaagttacgcttcagcaacagcaggttcaattctccttcattgaaaccgaaaataatgcagtcgatacctacataaagtttcggatttgaactatagtaattactcatatcttaatttttgtttaaggggtatgctgcatggatatatatcatagcaacataccgatttaccagaaataccaataaaaagcagcagtaatacccaggatgataagggtatgaatgatatcccatttattccaactcgcacgtgtagctgctttttgttcaggagttgaagttccgaataccagcccttgaatcttttcagcgcttggggcagctgtaaacatgctgactgcgataaccactacgatgcagaacaagaacatccatccgcagaaaaacagccagttcatatcatagaacagatacttgaaggtactgcttgacacatctcctacattgctgtaatatacttttgcccccagacgggttaaaccgataatcattccggcaatcagtccccacataccgccttgtgcagaggtgcgtttccagcagatccccaagaggaaggctgcggcaatgcctggtgctaatacagattgtacatcttgtaagtaggtgtaaagtacatcgcctacactgcgcataatgggaatccagagtatacccaatatcacaatcgcaacagttgccatctgtccaattcctaccaactttttctcagaagtgttcggcttgaaacgtttgtagaagtcaatggtgaaaagcatagcagatgagttgaacaaagatgcgagagaactcatcaatgctgcaagaataccgcaaacaaccaaacctttgactcctgcaggaagcaattttgctactagagttgggaaagcagcatctgcattggcatttccgtttgccagcataggtagaaaaccttctcccccggttccgagatatttttggtgtaatgcgaaagcaatcatgcctgggataaggaataagaatacgggcaataatttcaggtaagctccgaagatggtaccgcgccgtgcttccttttcattctttccggaaagtacgcgttgcacgatgaactggtctgtacaccaataccagaatccgataatggctgaaccaatcagtgcacccaaccaagggaagttagggtcgttattactgcgtataagttctgtcattgtgttgccataatcgttcactgtgactgcaccgcagattctcatcatctcatcccagcctcccaattctttgaagccgagtacaaggattatcagtgaacctaacagcaagatgggggtctgcaggatggaggtataaagtaccgacttcattcctccgaagattgtgtagagcgcagtcagtataaccagaccgatggcggcaatccaaaagaagtcgattccccaaagttcttttataccgaatacttgttggaataccaatcctcctgcataaaccgtcacggcaacttttgtcagtacatagctgattaaagatattacagacaatattgtacgtgattgtggattatagcggcgttctaggaattcaggcattgtgaataccatacttcgcgaatagaacggtacgaatacccaacctaagataaggatcatccagccttgtatttcccaatgtgccatcgccataccgctggaagcaccggcaccggctaatccgattaagtgttccgaaccgatgttggatgcaaagatagatgcaccgatagcgagccatgtggcatcacgaccacctaaaaaatagtctgctgagtcattctgtttctgtttgacaacccagacaataattccaattaaagccaggaaaaagattccaatgactaaccaatctaatgtttccacgataataaatgatttataaggttactgttatttttctacggaaaatttgaagacacattcactgttgtaaatttgtccgggttccagtacgacagaaggccattgggctttgttggggctatccggataatgttgtgtctcgaggcatacggaagcgcgctggttgtaagtaatgccttttttaccttttacggtgccgtccaggaaattcccggtatatacttgtatgcctggctcattggtataaacttccagggtgatgccgcttataggcgatgtcagtttggctgccacttgggataggtcacctttagtattcagtacccaattatggtcatatccgtttccgttctttatttgttcaaagtccgtccggttgatgtcttgtgccacactcttgggagtggtaaagtccattggtgtttctttgacggagatgatgtcacccgttgtcatgaaagtactgtctaccggagtatagttgtctgcattgatgtataagatgtggtctgttgctgcctttgaaggatcacctgataaattgaaataagaatggttagtcatattgataaccgtcttttggtctgttgttgcactgtattttatatcaatggcattgtcatccgttaacttgaaaagtacttttgccgtaacattacctgggaaattctcgtctccatccggtgaaatgcgggtgagctccagagttgtgctgtcaatgggattggcactgtatacttggtattgccatcctttggggccaccgtgcaggcaatgtccgaaattgttctgtggtaactgtatagtatctccgtcaagaacgattttcccttggttaatccggttggcgtagcgtccgatagaagcaccaaagtcacttggaatgttgatgtaatcggcaatgctgtcaaagcccaatactacatcctgcataactccatttttgtcgggtaccataatggatacaatacgtcccccaaagtttgtgatgcatacttccatgcccgctttattcttcagcgtataaagctgtgtctgggcgtcattgactgttgtttggaattttactggatcaagaccggacagcgtaagcgttgtttctgtcttttgattgcacgcagttagcatcattgcggcaattcctgcaagtagaacatgtcttttcatggttttgtatttaatgtaaatgagatgattatctttctttgggtgtaaaagtaacacttttctttagtgtaggctgtacacttttatatgttatgcaacataagtgtcaagaaacatatctgtgccaactggctgtacagatagatgtgttcggaataaacttctcggatgattttgtttttagagtggaaaacggtggaataggggagaagaaaaaggcgcttcccattactgggaaacgccttttatttgaatgctgatgtctattattctaatctgcgggcaccgtcgctgatgactacatcatatacttttgggcttctgccgaacttcttcttgaattcatcttttgctttttcgatgaatgtactgtacaattcatcctttaccagattgattgtacatccaccgaatccaccgcccatgacacgtgaaccggtaactccacaatcgaatgcaaggtcattcagaaaatcgagttcttcgcagcttacttcatacaacttactcatgccatgatgtgtttcatacatcttttggcctacagtttcataatcgcctttttccagggcgtcgcaaacgtcgagtacgcgttgaatctcttcgatgacatattctgcacgcatatagtcttctgcgctgatgtcggctttggcttcttccagcatgcccatggtaacgtcacgcaggaattctacgtgtggatgcttcttctgaacagcggcaacagcagcttcgcagctttgacgacgtttgttgtatgctgaagatgcaagttcgtgtttcactacagaatctacaagaaccagacgatagccttgcgggtcgaatgggaaatactgatattccagtgaacggcaatccaggcggatgaggcttcctttctttccgaatacagaagcaaattggtccatgataccacagtttacgccacaatagttgtgttccgtagattgtcccacttttgccaattcaaatttgtctatcttgttgtcaccgaacaagtcgttcaaagcataggcataggtactttccaaagctgctgacgaggacattcctgcacccagaggcacatcgcctgcaaaagcggtattgaaaccttttacatctacaccgcgtttcatcatttcccggcacacgccaaagatatatcttgcccagcttgcgcggggtgcatcttcttcattcaagccaaattccacataatctttcaggtcgatggaataagcttttactgtgtttgtgccgttgggctttatttctgcaatcattcccttatcgattgctccggggaatacaaaaccaccgttatagtctgtatgctcaccgataaggttgatgcgacccggagaagcataaacagctcccgttgttccgtcaaagtgcttgatgaaacggcttcttacgtattctatatccatgatatttatattttataaggtgaataaataaattacctatattttcttgttaatcgaccttgatgtccttattgacatttttgcagcctaccaaaccgtagaacaacagatagccaagggctgcgatgataacccagtaactcggcatgaaacctgcaatgtcggccaccaaaccttggataacgggcaagatgccgccgccgcataccaataccatgaacagaccggaagccgctgccagatatttacccaatccttctacggccaaattaaagataccaccccacatgatggaagtacacagacctaccagtaccagatacattgcattgatgggtacttctgcaaatccgaaagagagacctcccgtagcactttgttggagtaccggcagattgacaagcgaaccggtagatgagaagatggcaaggaataccaaaagtaagcctaatgcggaagtaaaggtaagcattgccttactggagatttttgcacccaatgaagcgccggccagacgtccaatcagcatgaggaaccaatatgtacctacaacaaaaccggaaatggtggaagaaatgcctgctcctcccttttcaatcggatcggtcaagaacaagttcagagtacccggtacaccaacttcgacacctacatatacaaagatcgctatagctcccaaaatgaagtggcggaattttaaagcgcctgacatcaacttaccgataggttctgttgaagttgcagcattgggttccggtatgggcacaatcaaaagaacgaagaacgcgatggcaaatacagccattgctgtgtacattacagggaatatctgagagatagtagctttttcaatggaaccggcaatcaggatacctacgaacatcggagtaatggtggccattacggagttgaaagaaccacccacttggataagctggtttcctttgttaccttcgccgccgagcttgttcagcatcgggttgactaccgtattaagcaaacacatggagaaaccggcgatgaaagcgccaatcaaatatacggcaaaagccatatcagggcttgaatgaccggataaatattggatacctacaccgataaagcctacagctactgctatcaatgccgtttttttataccctacccgttgtagtaagatgccgcttggtattcccatcactgcatatgcaataaagttaccaaagttacccaacatccctaaagcgttggatactgaaaactgatttttcagtacgattcccataggggcagcaaggttggtaacaaatgaaatcataccaaaaaggaagatcatcgtgataattgcgatgagtttaccattctgtttttgttgtgtcatggttttgtaaaattaataagtttataaattggattagttatttcattcttgtacaccaaacttgtagattgtcacttgctggtactcatcacccggtagcaatactgccgacggaaaatgggacttgttgggcgtatcgggaaaacactgggcctcaaagcagactgcacttcttgcagggaaagtggctccatgggcaccttcaaagcccccgagccagtttcctgtgtagagctggacgccattttcagtggtatatacttccatcgttcgcccgctgttgggctctatgcaggtggctgcaaggctcagctctccactttcagtcttgttcagtacatagcaatggtcatatcctgcgccattcacaatttgtgtatgtttctcatcaattcgttcaccaagagtatggggagtacggaaatccataggagtaccttctaccttcaatatctctccggtaggaatggatacttcatcgatgggtacataaaaatctgcgttgatggtaacgatattgtttaagactgtaggggagggattggctataccggcaagattgaagaaaccgtgattggtcagattgacgatggtggctttatcggtagtagcccggtattcgatgaccagagcattggtctcatcctccaggcgataagtcatttctacttcgagatttccggggaagccctcttcgccgtcagcggatgtgtagttgaagatgactgttgatggctctggctggacagcatcccatacacgggtatgaaaaccagtcggaccaccatgcagtgagttgggaccattgttgattgccaattggtgctcttcgccgtataaagtaaactttcctttagctatccggttaccgtagcgtccgatggtagtgtttagaaaaggttccgggctgttgattacatgttcaatactgtcgtgtcctaatacaacattggcatatttgccatttttgtcgggtaccatgatggaaagtattgcacagccgtaattagtaactgcaacttccattccctgggcattcttcaggataaacaaatctgtctttttgttatttatatccttttgaaagtctttttggttcaaaccggacaaattactttctgttggagtagtgtttatcatatccatggtattaattaaatttcttgcaaataaaaagaaattcttttgttcccccaagtaattggaaggaaatgtggagaacattttaggaaagtttagcgtttaacaaatggaatacaaattgatattttttgtatgtttgcccccggaatctaaaaaaatcacatcattaacagaaagttctaataaaaacaacgaatgtatcctctaaaatttgagcctattctgaagcagacgctttggggaggcgacaagattattccattcaaacatttgaatgatacccttgccaatgtaggcgagagttgggaagtgtcggcagtagaaggcagtgagtctatagtggccaatggtgcagacaaaggattgacgctgccggatatggtcagaaaatataaggaagacctggtaggagaagccaactatgcacgtttcggaaataagtttcctttattgataaagtttattgatgccaagttggacttgtcgattcaggtacacccgggtgacgagttggctaagaaacgtcataacagttttggtaaaaatgaaatgtggtatgttattgctgctgaccagggtgccaagctgatttccggttttgcagagcagattactccgaaagaatataaggaacgagtgtataatggtacgtttgcggatgttctgcagacttgcgccattaaaccgggcgatgtgttttatgtgcctgcaggtcgggtacatggaatcggtgcgggagcttttgtagcagaaatacagcaaacgtcggatatcacttaccgtatttttgattacaatcgtaaggataaggatggtaaatcaagagaactgcatacaagccaggccattgatgccattaattttgcagatgtgcaggacgattttcgtacggagtacgagcaggtgcagaatgaaccggtagaaatggtggcaagcccgtatttcacgacttccatctatgacatgacggaagaaatcacttgtgactattctgaactggattcttttgttatctttatttgtgtggagggttcttgccgtattattgataatgagaagaatgaagtttccgtacaagcgggcgaaacaatcctgctgccagctgcaacccaagaagtgacgattgtgcctgaaggagcagtgaagttgcttgagacgtacgtataaaagtgctcagactatatcggataaaaaagaggggatgactgttatggccatcccctctttttttatccgatattctatctctttcttccaaatatttttctgaatttcttcattacctttacccccaatactataccgtcaaaaacagccatacccgtgttgaatgctctcatcatggcatttgccttgttggtagctggttccagcggagcaaaaatttcttgtgtaagcccagtcatgatttctttctggagtcgtatttcttgtagcagcatggcttttttctgggcgatgctttctaaagtgacgggagtcgtattggtcgtattatccatgaatatttcgaattaattgtctaagaataattctgcgataagttttactgtcggatcaataatgagctttttgcggaataggacaagcagaacgatgagtaggatatggaagcacgtgataagtgcaaaactcatcattagcccgcctaccagcggagctaaaatatagaccagcgtaaacgacagatgaaacagaaccactacgccgagtatgacgaccaatagcaccaataaaagcgtagaaagcagtttggacagtttttcggtgacttccagtttggtatattctttttgcagctccaggtatttcttgaattcaatgaagagctgctgcatattttctatacttttgtcgtctgcaaacatagtggttctgttttttaccttattccgttacttcacctttgatttccgcagcaatttcatctaccaagtcttccatttcgcttcggttcagacgaatccctttcttacggagaatttctgcgattttgttacgggtgtcttctcctttttcaggagcaaataagataccgagggctgcacctactgcggcgccacccaggaaagctgctaaaacatttaatcctttcataatgatattcctttcttttttgaggttcgtacgacaaaactaacaaatttttttgaaactttgttcggaatatcagtttttttatgattgtctttatcttccaactccttttggggtgttgttttgcgaggtttgcttttttcttctccaaaagtctccattcgtacggctcccgcgatagattttgttttccttggttttggccttaatttcttcagtcttgattttctgggcttttaaaccatcggcggtgacaaatgggtgttcttttattactgggatacttttccctatcaatttttggatatctttcaggtaaggcagttcttccgattcgcaaaaggagagggcaataccgtcgtggccggcacgtccggttcgtccgatacggtgcacgtatgtttccggaatgttggacaactcatagttgatgacgtgtgatagttggtccacgtcgatacctcgtgctgcaatatcggttgctatcagtacacgcagttcatggttcttaaagccggtcagtgctcgctgtcgggcattctgcgacttgtttccatgtatggcttcggctctcattccggacttactaagggtacgtgcaagtttgtctgctccatatttagttctggtgaagataagtacggacttgatagccggattcttcagcagatgaatcagtaagtcttttttctcttttttctcaacgaaatagactgattgggagattgtgtcaaccgtagacgatgcaggggtgacttccactttctcggggtgcgtcagcatggagtttgccaaggtctctatttctggaggcattgtggccgaaaagaagagagtctgccgttttgcgggcaatagctttaatatgcgtcggatatcatgtatgaatcccatgtccagcatccggtctgcttcgtccaatacgaagaattcgagtgcttttaggttaatgaaaccttggttgaccaggtcttgcagtcgtccgggagttgcaaccagtatttgtactccacgtttcagttcatctgtctgtggcttttgtcctacaccgccgaagatgacggcatgtctcagtccggtatacttaccgtatgcactgaaggattctcctatctgtatggccaactcgcgggtcggcgtcagaatgagtgctttgatacttttgcggttatccgttttatacaacttttgcaagatagggatggaaaatgcggcggttttgcctgttccggtttgagcacatcctaataagtcttttccttgaagtaatatagggatcgatttttcctggattggggtaggggtggaatacccctcttcttgaagagccttcaatataggttctatcaaattcaaattttcaaatgtcatgtaatcaattaagtgagcctcatgccctgtttatatttggcaaatatacgtcaagtcttccgggaaatctctttttatggaggggtttaattatatttaactaaggatgctgaggtataatcgcatgttatggtgtacttttgttccatatttagatagtggcatggaaaaatgatgaaattgcatttaaaatatctttggattgtattggtggcttgtattttgaccgcttgcatgaatggtgggggtgacttggccggtaagtggcagttgcgtcagtatcaatatgccgacggtacatcagagaaggtggacagtgtattctataattttcaaaaaggaagtttttctgccatatgtttgttgaaagatggaggggtgactacgttttttggaaattattctttgaaaggtgctgaaatttccattattttgttgcctgaaagtgttaacgataaaaattatgatacttatttcgggtggccggaaggaaaatgtacctttaaagtagaagatttgtcctactcttcattgcgtttggaatatgagggcacgaaatctatttttcgaaaattttgagataaagaataagaatagacgattttactaataaaaacaatagaaaagatgaaaaaattagccgtattgggaatgggagtatgcatagctctggcattctcttcttgtaaatcaagtgaaagtgcttataagaaagcatatgaaaaggcaaaacagcaggaattggctgagccgcaaacaactgcccctgctgaagaggtggctccagtggttaccgctccagtagaagtaaaggtggtggaaagtgcacctgccggcatgcgtcaggaaaaggtgactgtggtatcaggtggtaccagcttgaaaacctttagtgtagtttgcggagcttatagcgtgaaagctaatgcggaaggtgtgaagcaggcattggtgaatgaaggctatactgcaatggtggtttacaatgcagaaagaaacctgtatcgtgtagttatcggtacattcgatgacagagcatccgccgagaatctgcgcgactctttcaaagctaaacatccttcgaatgatgacttccagaaggcatggttgctgtatagcgtcaattaatagaattctttttggtaattcataacagaaaggaatgtatgtttcctttcaagatgaggcagtaactgcgaagttactgcctttttcatgatatgccgaaagaatgtgaaggctggcgctgtcgcgtgtttggtttggcaaaacaaagtgtttcctttaacagaacagtttgtttcattaaagagaacactttgtttctcttaacagaacatctcgttctatcgcataaaaacaaaatgtttttatatactgaaacaacttgtttttaaaggttgaaacaaagtgttcagtactgtgaactaacggactaattgagaaaagacccagataaactcatgttgtcacagtctctttagttcctcttccttcgtgaatatttcactctatttttctctgctccggattgattttcctgattgtgaaaagtgcttataatattctctctttcgtttaaaagaagttataaaacaagagatggaaacttttagacctgaaaaagtttttaattttgtgccttatctttgagaagaatatagtatggaacgacgatatatactgaatgcgattgatgccgctttgcaggctggcgagaaaattctttccatttacgatgatccggcatcggattttcaggtagaaaaaaaagcggataattctcctcttactattgccgaccgtaaggctcatgaaactatctgccgttttttggctgatacacctttccctctgctaagcgaggaaggcaaacatttgcctttttcggaacgacggagttgggaaactttatggattgtagaccctttggacggtacgaaggagttcatcaagaggaacggtgagttcacagtgaatatagctttggtgcatcactcagtaccggtaatgggagtcatttatgtgccggtaaaaaaggagctctattttggagtgcatgattcgggtgcttataagctatccagtattactgcacgtgatggaatgtcgtgggatgaactgcttgcgaaagctgttcggctgccggaaacaagcgtgcacgaacggtttgtaattgtggcttcccgttcgcatctgacgcccgagacagaagattatatcgagaaaatgaaatgcagccatgcggaagttgagcttatatcaagtggaagttccatcaagatttgtctggtagctgaaggcaaggctgatgtatatcctcgttttgcccctacgatggaatgggatacggcggctgggcatgctattgcacgtgctgccggaatggaaatttatcaggcggggaaggaagaacctttgcaatataataaggaggatttgctgaatccgtggtttatcgtagaacccaagcatactgaaataaaataacgactttatgacatttgagatattgtttgtgctgctggcattgttgggcatggtgattgccttggttctggataaaatgcgtccgggcatggtgctcttttctgtcgtagtattgttcttgtgtgcaggtatcctcactcctaaggagatgctggaagggttcagtaataaggggatgattactgttgccatgctgtttttggtcagtgaaggcatcaggcagtcgggtgctttggggcaagtaatcaagaagctgcttccccaaggtaagactacggtctttaaagcgcagttccgtatgttgcccaccattgcttttatttcagcttttctaaacaatactccggtggttgttatctttgctcccattatcaagcgttgggccgaatctgtaaaattgcctgctaccaagttccttatacccctttcttatgtgacgatacttggcggaatctgcaccctgatagggacgtcgaccaatctggtggtgcatggtatgatattggaagccggatatgaaggctttactatgttcgagttgggtaaagtgggcattttcgtcgcgattgcaggcatcctttatctgttcgctttttcctcaaggcttttgccggatgttcgtacggatgcggtaaagctggatgaggaaccggaggagcatggagatttacatcgggtggaagctgtactcggcgcccgttttcccggtatcaacaagaaacttggtgattttaacttcaagcggcattatggggccgaagtgaaggagattaagcgtagcggtcagagcattgttggaaatctggaaaatgaatatctccgcgaaggggatacgctggtggtgatggctgatgactcttttgtaaagacctggggggaatcttcggtgttcgtgttgctggccaatggcaaggatacggaaccggtgcccggaaagggaaagcgctggtttgccttggctttgctgatattgatgatagtgggtgcaacggttggtgaacttccggttgtcaaggaagcttttccggaaatcaagttggatatgtttttcttcgtttccattactactatcattatggcctggacaaagatatttccggcccgcaagtataccaaatatatatcttgggatattctgataacgattgcttgtgcttttgctatcagcaaggcgatggtgaattccggagtggcagatgctgtggcgcgtttcattataggcatgagccatcattatggcccccacgtgttgctggctgctgtgtttatcataacgaacttgtttacagagctgattacgaacaatgcggccgcggcactcgctttcccgttggcactttccatctcttcacagatgggagtcagtccgatgcctttcttcgttgtaatttgtatggcggcttccgccagcttctccactcctatagggtatcagactaatttgattgtacaaggtatcggtaactataagttcacggattttgtacgcatcgggttacctttgaatatcattactttcctgatatccattttcttgattcctttaatttggccattttaaaaaaagaagaaataataacatatggaagaaaacaaccacatatatccgatatttgacaaaatgctgatgcggaaagacaaagaagacttgttgaagcagcacagcgtgatggtttggtttaccggcttgagcggctccggcaaaagtacgatagccattgccttggagcgcgaacttcataaaagaggattgctttgccgtatcctggatggtgacaacatccgcagtggcatcaacaataacctcggttttacggaggccgaccgtgtggagaatatccggcgtatagccgaagtttccaaactctttcttgatacgggtgttataacaatcgcggcttttatcagtcctaataacgatattcgtgaaatggcggctgatataatcggacaagacgattttctggaagtttatgtcagtaccccgcttgaagagtgtgaacgccgtgacgtgaagggactttatgccaaggcacgtaagggagaaatcaagaattttactggtatttccgcgccttttgaggagccggctcatccggctctgacgttggacacctctgttctcagcctggaagaatcggtcaataaactgttggaactcattttaccaagaattcagaagaaataagatataatgaaagaagaatataaattgagccatttgaaggaactcgaagcagagtccattcatattatccgtgaagtggcagcggagtttgaaaatccggtgatgctgtatagtatcggcaaggattcttcggttatggtgcgcttggccgaaaaggcgtttgctcccggcaaagtgccgttcccgttgatgcacatcgattccaagtggaagtttaaggagatgatacagttccgtgacgagtatgccaagaagtatggttggaacctgatagtggaaagcaatatggaagctttcaatgcaggtgtcggaccttttacgcatggcagcaaggtgcatacggacctgatgaaaacgcaggctttgctccacgcattggataagtataagtttgatgcggcattcggtggcgctcgccgcgacgaggagaagtcacgcgccaaagagcgtattttctccttccgtgacaagttccatcaatgggaccccaaaaaccagcgtcccgaattgtgggatatttataatgcccgggtacataaaggagagagtatccgagtatttccgttaagtaattggacggagctggacatctggcaatatatacgtttggaaaatattcctattgtgccgttgtattttgccaaggaacgtccttgtgtggagattgacggaaatctgataatggcggatgacgaccgcttgcctgaacagtaccgcgaccagataaagatgcgtatggtgcgtttccgtacgctgggttgctggccgttgaccggtgctgtggaaagcgatgccgataccatcgagaagattgtcgaggaaatgatgaccaccaccaagagtgaacggacgacccgtgtcattgacttcgaccaagacgcaagcatggagcagaagaagcgcgagggatacttctaaaggaattaaaaattaagaattaaaaattaaatcattaaggatgaacgattctacacttgatataaaggcttttcttgataaggatgagcagaaagacttattgcgcttactgactgccggttctgtggatgacggaaaatccacattgataggccgtctgttgttcgacagcaagaaactatatgaggatcagctggacgcactggaacgcgacagcaagcgcatgggaaatgccggcgaccacattgactacgcccttttgctggacggcttgaaggcagagcgcgaacaaggcatcaccatcgacgtggcataccgctacttctcgaccaacaaccgtaagtttatcattgccgatactccgggacacgagcagtacacacgcaacatgattaccgggggctctacagctaacttggcaattattctggtggatgcacgtatgggtgtcattacgcagacgcgccggcatacttttctggtgtcgttgcttggcatcaagcatgtggtgcttgctgtcaataagatggacctggtggatttttccgaagaacgttttaatgagatagtcgatgaataccggaagtttatagctccattgggtattcctgacgtaaactgcattccgctgtcagctttggatggcgacaatgtggtggagaaatcggaacgtactccttggtatgagggtatttcacttcttgactttctggagacggtacatattgacaacgaccataatttgaaggattttcgtttcccggttcaatacgtcttgcgccccaatctcgatttccgtggtttttgcggtaaggtggcttcgggtattattcgtaagggagatgaagtgatggcattgccttccggtaagaagtcgcatatcaagagtatagttacatacgacggcgaattggattacgcctttccgccacagtccgtcaccctgactctggaggacgaaatagatgtgtcgagaggggaaatgctggtacatccggataacctgcccgtcatggaccgcaattttgaaacgatgctggtttggatggatgaagagccgatggatatcaacaaatcattcttcatcaaacagaccaccaatataagccgcacccgcatcgacagcatcaagtataaagtggatgtcaatacgatggagcatctttccattgacaacggaaagttgagcaaggaaacattgccgatgcagctcaatcagattgcgcgcgtggtgctgaccactgccaaagagcttttctttgacccttatcggcagaataaggctaccggttcgtttatcttgatagacccgataaccaacaataccagtgctgtaggtatgattatcgatagggtggaggataaggacatgcacttagctgaggacctgcctatactgaatttgcctaagctgggtatagctcccgaacattacgaagctatagaaaaggctgtgaaagagctggaacgccagggcgtggctgtacggatagagcgcagtacttctttataagtattgcagttctctctcggtatcaccggaagaaaaccataacatattaatataaagataataatgggattgttagaattcaataagcttccgataaacaccctggtaggtgcggattggaaaacattcaaggatataacgggcggtcgtgacatcggtgctgcctacaaaggcaagtatcggctgacaaaagccgtctgccgcctgctgtccactttggctcctctgcaggacagacgctatgaaaagctcctggcagataagcccttggagcatgatccggtattcattttgggacactggcgtagcgggactacgtttgtgcataatgttttctcctgtgacaagcatttcggctacaacacgacataccagactgtatttccgcatcttatgatgtgggggcagcctttcttcaagaagaacatgagttggttgatgccggacaaacgtcccacggacaatatggaacttgccgttgaccttccgcaagaagaggagtttgctttggcaaatatgatgccctacacctattataatttctggttcctgcccgaatatcagcaagagtatgccgataaatacctgctgtttgatgacatcacagagaaagagctgaaagtatttgaggagactttcgtcaaactgataaagatttctctttggaatacgaacggaacccagtttcttagtaagaatccgcctcatacgggacgtgtgaaagagcttgtcaagatgttccccaatgccaagtttatctatctgatgcgtaatccttatactgttttcgaaagcacacgtagtttctttactaacaccattcagccgttgaaactgcaggatatcagtcatgaggagcttgagaagaatattttgtccatttatgccaaactgtatcataagtacgaagcggacaaggcatgcattcctgaaggaaacttgatagaggtgaagtttgaggacttcgaagcggatgcaatgggaatgactgaatatatctacaaggctttgtccattccgggctttgtagaggcgcgtgtcgatattgagaagtatgtaggtggaaagaaaggatataagaagaataaatacaagtatgatgagcgtacagtgcagttggttcaggataactggaattttgcgctggaacagtggaagtacgatttataatgattgtcaattatcaatgagagaaatgattcaaaagaaaattcgtatgttgggagtgctgtctgccatgctttgttgcggagtcgtttctgcgcagcagcacgaggtagagatgattcctttcggaaatatggatcaatggattgaccgccaaatcaaggaatccggtattatcggcggtgccacgaagaatgtgtatgccatcgggcctactgctactatcactgaaaccaaggcatacaagaatatgggaggttcgccgtgggcgacatccaatgtgatggcgcgggtagccggtatcacgaaaactaatacttctgttttcccggaaaagagagggaatggtttctgcgcccgtatggacacccgtatggagagtgtgaaagtttttggaatagtggatatcacggtgctggctgccggctctatgtttctgggtgaggtgcacgaacctatcaaggggactaaaaatccgcagaaaatgctgaattccggcataccgttcacaaagaaacctatcgccatacagtttgattataaagtaaagatgtccgaccgcgagaagcgtatccgtgcaacgggctttagccgtatcacagatgttgagggaaaggacttcccggaagtgaatctgtttctgcaaaagcgttgggaagatgagaaggggaatatctatgccaagcgtgtaggaacgatggtcgtacgatattatactactaccgattggcataataatgccacttattccatcatgtacggtgatatcaccggtgaccctgcatacaaggcccacatgatgcgtcttcaggttgaagaacgctatacagttaacagtaaaggagagagtgtgcctattaaggaggttgcctgggggacgaaggacgatgtgcccactcatttgctgttgcaattcacctctagtcatggtggtgcttatataggttctcctggcaattcgctatggattgacaatgtaaaattggtctattagaataaaagcagttaaagttgatgtcatactttagctgctttttttatggagtcaacgagactttgacttacttcttatttcaaatgaattttgtatgtcagccctcccgtgaaatatttcatcctctgcatttcgacctgcacatgcagatgcttgaacagcagataagtggctcccaaagcaaagtccttggagtcgtactccgctatcaccctcaactgcggatggaaggagggattgtaggtgacacccagtgcaaagccattcagtttgtactccttgcggttgttgtaaaggtaggaaagatggacaccgatctcctccttacccacaacgggtatatgcttggaggcggcaatatagaaacggctgtaatagccgttaccttccgtggtgcctacctggccgccgccggaagaagtgaacgggtcggacgtccccagcacgacagccggcatgtatttccagaactgcccctccttcaacacacgcagacgggcggaaaagtagcggtcctggttcgtgaatccgctgtacccgtatggcttcaatcccaacgcctccgccttgaagagcgtacacgtgtaggccacttccagaaaggggaagatggtgacgttcaggaaatagttgtaggtatgatagtaccaggtgggcggtgtgagctccttgttcaggaagttgccgccgaccatgaaagtcttgtcgcgctgcatctccgcagagggcgcatgcaacagcccggttgtaccatacgtcaactgggaaaaggccgaaagggaaaggctgcaaaacagaacaataaagaatagcttaaacttcatcatcacatataaattcagtcgctgataaaaaatgggttgctttataacatacatcggacatagtaccaaaaaaaggcgtctgagtcccagacgccttcatttttagagtctatttgtcacttggagtgtattattccaggataactacgcggttcaggaagttcttaccgaacatgttttcagtaccaccgaatcctacgagttcaagctggtccttgtcaacaccctgagcaatcaaagcgtcgtaaacaacctgggcacgcttttcggacagcttctggttccaagaagcgctaccggtagccttgtctgcataacctgcaactttgtacttcttgtccggattagccttcagaatcttggcagccagttcgatgttaaccttgccatagtcgtccagacgggcgctgccaatcttgaagaagatggcacgcggaccggcaacttcaacttccttggtcacttccttaacttcaggtttagcgttggccagtgcattcttgcagttagccaggtcagcctgagcctgagccagttcacttctatatctgttgatttccgcattgactgcgtcttcgtcaatcttagaaaccggaacgaacttcttaccgccgaagatgtagctaacacctgcggtcagcatacctgtaccttcagccttgcgatggctgctgatattaccgaaaatggacggagcgatggcaccgcgagcttctacgtcaatggcccacttagtgttgatattgaacttcaagcccaaaccggcagaagcgccgatacgtgcacgcatttcagcttcaccggcaggagccatagactgcgaagtaccgtcagcactaattgtaacatccacattttgagattttgctacagaaatttgaggtcccaagaaaccgtaaacttcgaagaaacggttaggattagcaccggcaaacaatgtagaaagattgatcattgcatcaatgttaccacctacataagtcttgttgtgttcccagtatgcatcatccaaacacaaatgctgagtaataccgtttacctgagcacgtaccccccaagtcggagtaatcagcttaccaactgacacgctgaaatgcggagcaatcttattgaaaccgtcattgttgatggcgtggataccaccacctacactgacaaaaatattatcgctccatttcggagtgtagtagttcgttttttcctgtgcattcagatttgctgcacaagcgcctgccaatagtaaggaggctatcattaatttacttttcattttctcttgagtttaagataaataacaactaaaacttctattaatcaagttcaccaacaccaccaccggcattgccttcaccatgaccatgaccatgaccgtggctatgaccgtgaccaggaatatcttgattttcaagaacaaacagtgtagaagttgtataatcatctacttcaatagaagctaaaggctctgtttcagcttttgttacagccttcttcactactttatattcagttgttacaacagtataagtaatagatgcagttgttctagagttagcataaactttatacttattctccggtgttgttactgtcgtttcctcatatgtattctcaagcgtgttaaagaaagattcaatagctgcgcgttcaataagatcagttgtattgattttctttgcacctacttttgcaccttcttttactacataagggaatgatggaatgtcaaaccaataaagctcgtagttatcccaagtcttaactttaggatccgttactggttcaagttttgtagattctgctacaatcttagtctcagcatcttcttcctgaagaatgatagtcggagtcagagtagcaaattgcccagcttgcaaagcaggaaccttaactgtaacagttgcactcaaaccattataagaagctgtaacatcaacactcttagcagccagagtaggattaccagtaaatgtcaactctgcaggtgcgatagtggcttggccagttacatctgtagtaacaccatcctctatagcaagcacaatcggactaataacagcttgtgcattagtaggagttacattaacgttgaactcttccttctcacaagaagttaaagttgtagctaaagctactacggctaacgcaaatactgcacttatgccgtttaagaatttaatctttttcatctcaattaattaattaaaaatttaacaattctgacttaataaaatatgggttaaaactattttcttccattatattgtcactaacttccgctttatactgtctataatagtacctttcattacctgcattataaacaatgcccatattagcagaggtattcacacgaggtatatatcctttccttttatatttataaggaggtaatgccacttgaaatcggaagcctccattcatctttgcatgttctgctttcattgcatagaaaccaatcgaacaatagcgaaaatggcgaatcatttcaaatttaacacctttctccttcaataaatactgttctgctttcagattaaactgagtgttaaattgcggccaataaaagctaccgcccaaagaccaagtaacaagtgctgtcgaaggatcatatacatagcgaaatccgctccaatatcccattcctgtatacccaatccgagccattaaggaaaagcgttcatccttaaaagggcgataaaattcggcgtccactccatattggtcagcactaaaacatcccacagtcactttaccaaacacattatacggtaatctaaaacgctgtgaaattgtaatatgtcctggatgaactttatcttcaaaccttccatacccatcattataaaccggtattttcaactgtgccgttaatttcatacctttccataacgaaacttctatcgcaggactcaaatcaaacaagacctggtaaatctgtgtaatcaccagattcttgaaagctaattgaggatataccaatacatcaatcttgaacaaagaactatttttcaactttattttccgtgcatttttccaagtatcacccaattcatagcttacattccagtcatcacgttctgcttggagcaccgaatccccctttatgggatgataataaagagaaatctgaggtacattattgtccagaactattatccggcatgacttttcttccggtaaacccatcttttgaataacatccaccgctttgcctatgcctacgccttgcaaacgatatgcagagttctgcagaacatacacacgttcattgccatcttctgtccatccaacattttcaaatcccatttccactaaagcatctacagtactttcccccgtttggcaaatcccttttaaagggagcaaacagtataaaaagaacgctgcacacagtgctattgttttagtatttaggcactttcttatgttagagtttttatacctcatctttttcaaccattttttgtgttcgtataacacaaaatatgctgcaaaaatagacacatttttaataataccttaattccgcaacactattacaaatataactttttaagtacctgagcaacaaaaagttgctcaggaatttgccatgtcagatttttcacctatcttagtgttgcaaatcaaaatatgtatcaaacccgacagacatggcaaaggtagcaattaaatccgagaaactcactccttttggaggaatattttcaataatggagcaatttgactccagactctcatctgtaatcgactcaaccctcggtatgagatgcaggctgtatggttatcaatacagcgaaatcatccgttcgcttatgagcgtttatttttgtggcggctcatgcatcgaggatgtcaccactcatctgatgtaccacctttcgcttcatccgacacttcgcacatgcagtgccgacacgattcttagagccataaaggaactgacccaggataacatttcctacacatccgacactggcaagacctacgacttcaacacggcagacaagctgaatacactgctcctcaattgcctattgtccacagggcagctgaaagagggcgaggggtatgacgttgacttcgaccaccagttcatagaggctgagaagtttgatgcgaagcctacatacaagaagttccttggttatcgccctggcgtggcggttattggcaacttgattgtcggcattgagaacagcgacggcaacacaaatgtccgtttccaccagaaggacacgctgaagaggttctttgaaaggtttgaacaaaacaagcttattatcaaccgtttcagagctgattgcggctcgtgttctgaagagatagtggaagagattgctaaacactgcaagaccttctatatccgtgctaaccgatgcagttcgctctacaatgacatctttgccctcagaggttggaagaaagtggaattgggcggcattgagtttgagctggcctccattctcatcgagaaatggaaagggaaggcataccgtcttgtgattcaaagacagaagcggatagacggcgaactcgacctgtgggaaggagaatacacctaccgctgcatccttacaaatgactacgagtcttccgagaaagagattgtcgaattctataacctccgtggagggaaggaacgcatcttcgatgatatgaataacggattcggctggaacaggcttccaaaatcctttatgggagaaaacacggtgtttcttctgcttatggcactcatacgcaacttctataaattcatcatggcgaggcttgacgtgaagaggttcggactcaaagcaacaagccgcatcaagacgtttgtctttaagttcatctctgtgccagccaaatgggtcaggacatcaaggaagtatgtgctgaatatctattcatgcaacaatgcttatgccaatgtgttccagaatgactttggataacaccgacaacttatagtcgtgattttgcgtattgcctcaagtcgcatggtggggtaaggggcatttatatgtctttatggtgacattcgatgcactgtgccccctttttactaacgatgcagattcttttcgcttctgtatcatattaggcgcgtagttgcggatttgaggtaataccaaagatttttatatgaaaaaatgaaataatgttgttttttcttcaaaagcccccaacaaatactcagaatgtttatatgaaatatattagctatcttaaaatccttaatatagctgtgcataattactatacagaatgttgttttttgtgccaaatagtcatttttcagatgtttttgctaattcacttttctctgaaaaaggataaatagaagaaatatctgcaagaattaaagagaatgacaaattgcacttcgcatttaaccaacccctatgatatattaggaattaaatcaatagctttctttttacccttaattccgcaacactattacaaatataactttttaagtacctgagcaacaaaaagttgctcaggaatttgccatgtcagatttttcacctatcttagtgttgcaaatcaaaatatgtatcaaacccgacagacatggcaaaggtagcaattaaatccgagaaactcactccttttggaggaatattttcaataatggagcaatttgactccagactctcatctgtaatcgactcaaccctcggtatgagatgcaggctgtatggttatcaatacagcgaaatcatccgttcgcttatgagcgtttatttttgtggcggctcatgcatcgaggatgtcaccactcatctgatgtaccacctttcgcttcatccgacacttcgcacatgcagtgccgacacgattcttagagccataaaggaactgacccaggataacatttcctacacatccgacactggcaagacctacgacttcaacacggcagacaagctgaatacactgctcctcaattgcctattgtccacagggcagctgaaagagggcgaggggtatgacgttgacttcgaccaccagttcatagaggctgagaagtttgatgcgaagcctacatacaagaagttccttggttatcgccctggcgtggcggttattggcaacttgattgtcggcattgagaacagcgacggcaacacaaatgtccgtttccaccagaaggacacgctgaagaggttctttgaaaggtttgaacaaaacaagcttattatcaaccgtttcagagctgattgcggctcgtgttctgaagagatagtggaagagattgctaaacactgcaagaccttctatatccgtgctaaccgatgcagttcgctctacaatgacatctttgccctcagaggttggaagaaagtggaattgggcggcattgagtttgagctggcctccattctcatcgagaaatggaaagggaaggcataccgtcttgtgattcaaagacagaagcggatagacggcgaactcgacctgtgggaaggagaatacacctaccgctgcatccttacaaatgactacgagtcttccgagaaagagattgtcgaattctataacctccgtggagggaaggaacgcatcttcgatgatatgaataacggattcggctggaacaggcttccaaaatcctttatgggagaaaacacggtgtttcttctgcttatggcactcatacgcaacttctataaattcatcatggcgaggcttgacgtgaagaggttcggactcaaagcaacaagccgcatcaagacgtttgtctttaagttcatctctgtgccagccaaatgggtcaggacatcaaggaagtatgtgctgaatatctattcatgcaacaatgcttatgccaatgtgttccagaatgactttggataacaccgacaacttatagtcgtgattttgcgtattgcctcaagtcgcatggtggggtaaggggcatttatatgtctttatggtgacattcgatgcactgtgccccctttttactaacgatgcagattcttttcgcttctgtatcatattaggcgcgtagttgcggatttgaggtttactttcatctacaagctttgcataaatttgtgttgtttgtatattggtatgtcccaatagtttggagaccgtatataaatctactcccagtgtcagcatcattgttgcatgtgtgtggcgcgctgtatgaaatgttacatgctttgatatcccagcttgttcaacccatttgtgtaaaattacattacttctccccagtgagaccaatccggcaaacaccttttccgtttctggtgcatttcctctgtctggcaaatgttttatggcttccgaacagagtggaagcgatatggcttctttcgtcttcttctgaataatactcaatagtgcattgccattttcatcatagcgtatatcttcccatctcaatgcaataatatcacaatgcctcaatccacaaaaacagctgaataaaaatgctttccttaataaggtattataaaaaggagtatgaaccaatctggtcaattcctttatagtaagataatccctttctgttcgattacgttttggtttgtcctcgttctttatcttattcatcggattaacagttatataatcttcagagacggccctattcaagcagtagcgcagcgttttcaaataatagaattgggtgttaacatgcaatgtcttttccttcttacaatgttcttgttttgttttcttcaagtaatctataaaacccaacaaataagtcttgtccaccttccttagcaatattccattcggagtatatctttccaaatggcatacaacggcatgtatggcacttttccgtactctattgttcacactttgttctgctattaatttcatatagccagtcagcttcatattggacaatctgttatgattaaatccgtaagtttgattatatatttccaaaatcttctgagcctttatcgcatttgccaaatttagcgtctcgacatttctttttttatcagcttgattatgttcagggataatatacaactttaagaattcgtattgtcgccttccattcatataaatatccagatatatggattggcatccattaaccaatttttttgttctcacctttattggctcttttagtttcaattgttttttcatattctttaaataaaaacatacagtttattattagtagtaacaaaacagtaacaaaagtcaatcctaaaaattgttttcatgttctatcactcttgtcttttttataattaccttattaactatcaaatatttacagtgtagaacacagcgttactgaaagagcaaatataataataagccagtaacaataaactatcaagagtgtggctattgctatgacgacagcttcagctccggaaatttattttccatcactttgcttccacacttccacccacctcctgcatccccctatccatcggcatttgccctgcggtggaagtaacccgaaaaggtggaagcaaattttgcttccacctgtctgaaacgcctgagttttgcagtaacccactgtctactaccataatattacgcaagagctacataaatcaatcagttcggttttcctgcattttcgagtttgccttcctacgaagtcggtggatatcgagttgagcggtaggacgcatcattccgcagaggctatgaaaagtaccggtagagtgagccgttcaagcggatgattcctaactcacggctatgaataatgccgtctaatatcctttaagttgttgtacaatacatttgcgccctatccacaatagatgcgggctacgtacttcatccgtaaaagccttggagttagtgacgcctaacagctatgaacagccctgcttacggccataaagcaatcgcttgacgaccattagcagggctgttcatggccgttaggcgtcattaattctctatgcaacagcagacaaacaaaaggagagaagcaaaggattgtctgtgttttagatagaaagcccatttattaccggaagaaaagtcatgccgcataatagttctggataataatgtaccccagatttctctttattatcatcccataaagggagattcggtgctccaagcagaacgtgatgactggaatgtaagctatgaattgggtgatacttggaaaaatgcacgaaaaataaagttgaaaaatagttctttgttcaagattgatatattggtgtatccggaattctctttcaagaacgtgattattacgcagatttatcaaattctatttgatttgagccctgcaatagaaatttcgttatggaaggggatgaaagccacagcacaagtgaagataccggtttataatgatggatatggagctcgggaaggaaaggttcatccgggtttcctaactctttcacaacgtttcaggttgccttataatgtttttggtaaattctctgtaggctattttagtggtaaccgatatggtgctgatgtagatttctttcgcccctttaaagatgaacgtttttctttgttggcaagaataggatatacgggagctggacgttgggacggatttaggttccaatatgatccttcattatggcgtatgacgtggtctttgggtggaaatttctattggccacgatttaatacactgttcacactgaaggctgaacagtatttgttgaaggaaaagggggttcggtttgaaatgatccgtcatttccgctattgttcgataggcttttatgcgatgaaggcggagcatgccaaagcaaatggaggatttcggtttcaagtggcattgcctccatacaaatataaaagaagggggcatatcccacgtgtgaatacttctactaacatgggcattgcttataatgcgggtaatgaaaggtattattataaggactataaggcagaagcaagtgataatataatggaaagaaatagttttaacccatattttattaagtcagaattgttaaatttttaattaattaattgagatgaaaaagaaaatttttttaagtggcgtaaatgctaaattagcattggcggcagtggctttgacaagtgtgatgttcacaagctgcgaaaaagaagaattcaatgttgcgcctgtagaattggaccctgcaagtgctactgttgctattactgtatatgatttatcagatggttctatcataaatggtgcaagcattacagaaaatggtgctgctattactagcaatcctttcgtaattgaagctggttcagatggaaagattgctgctgcaacaagaacttttgcagctacaaaagacgagtatctgtctggagaaggccaagctactgttcctgctttgaataaaggacaatttgctttgattccggtaagtattttcttgcaacaagaactgaatgctgctgaagatgttgttgttgatcaggatgaggaaactattacccctagtgaagttggaggagaacaaaaaggtggtgaaaatacaagtagtaaagaaaaagaaatggatctgccatatacagcaaaagttggacaagaagttactaatattgctgctgtaaatgcatcgattgatgctatgcctataactagaggattgtctgatgatgaagtaaaaaaggtgttgaaagcattggttaaatcatatagcccgggtatcacagatgtaacttatactaagaaagtaacagttcctgcttatactattgtaactttgaagactactacagaatacgaaacttctgataatacaatctctacagtggtggatggcaaactgtacactattcctaatgtaaagattaagaaggtagttaagactgttgtagatccagtctttacttcaactgaacatggtcatggtcacggtcatggcaatggtaacaatgccggtggtggtgacggtgctgctgaataataatagttttagttattattttaattttaaactaaaggaataatgaaaagtaaattagtaatagcctccttattattagcaggcgcttgtgcagcaaatctgaatgcacaagaaaaaacgaactactacactccgaaatggagcgataatattttcgtgagtgtaggtggtggtgtccacgctatcaacaatgatggtttcaataaattggctccgcatttcagcgtatcagttggtaagttgattactccgacatggggtgtacgtgcccagttcaatggcgttactcagcacttgtgtctggataactcatattgggaacacaataagacgtactttggtggtaacattgatgcaatgatcaatctttctacattgttcgcaggcgttaatcctaaccgtttctttgaagtttatggattcttgggtcctcaagtaactgttgcaaagtcagcaaatgtgctgattcaaaacgatggaacaatgattcctgatggagatgaaaaggctagagcacgtgtaggcgcttctgccggtttgggcttgaagttcaatatcaacactaagtgggccattgacgtagaagctcgcggtgccatcgctccgtccattttcggtaatatcagcagccatcgcaaggctgaaggtacaggtatgctgaccgcaggtgttagctacatcttcggcggtaagaagttcgttccggtttctaagattgacgaagacgcagtcaatgcggaaatcaacagatatagaagtgaactggctcaggctcaggctgacctggctaactgcaagaatgcactggccaacgctaaacctgaagttaaggaagtgaccaaggaagttgaagttgccggtccgcgtgccatcttcttcaagattggcagcgcccgtctggacgactatggcaaggttaacatcgaactggctgccaagattctgaaggctaatccggacaagaagtacaaagttgcaggttatgcagacaaggctaccggtagcgcttcttggaaccagaagctgtccgaaaagcgtgcccaggttgtttacgacgctttgattgctcagggtgttgacaaggaccagcttgaactcgtaggattcggtggtactgaaaacatgttcggtaagaacttcctgaaccgcgtagttatcctggaataatacactccaagtgacaaatagactctaaaaatgaaggcgtctgggactcagacgcctttttttggtactatgtccgatgtatgttataaagcaacccattttttatcagcgactgaatttatatgtgatgatgaagtttaagctattctttattgttctgttttgcagcctttccctttcggccttttcccagttgacgtatggtacaaccgggctgttgcatgcgccctctgcggagatgcagcgcgacaagactttcatggtcggcggcaacttcctgaacaaggagctcacaccgcccacctggtactatcatacctacaactacttcctgaacgtcaccatcttcccctttctggaagtggcctacacgtgtacgctcttcaaggcggaggcgttgggattgaagccatacgggtacagcggattcacgaaccaggaccgctacttttccgcccgtctgcgtgtgttgaaggaggggcagttctggaaatacatgccggctgtcgtgctggggacgtccgacccgttcacttcttccggcggcggccaggtaggcaccacggaaggtaacggctattacagccgtttctatattgccgcctccaagcatatacccgttgtgggtaaggaggagatcggtgtccatctttcctacctttacaacaaccgcaaggagtacaaactgaatggctttgcactgggtgtcacctacaatccctccttccatccgcagttgagggtgatagcggagtacgactccaaggactttgctttgggagccacttatctgctgttcaagcatctgcatgtgcaggtcgaaatgcagaggatgaaatatttcacgggagggctgacatacaaaattcatttgaaataattaatgaaaaaatcagcggagggatgtttgatactatcagacatcccttttttctgtattatatatgtaagattaacggaggaattcaaattttaatcgtaattttgtaacccattatgagtagaataatagccatagactacggtcggaaacgtacgggaatagccgtgagtgatacattgcagatgattgcgaatggactgacaactgtgcctacacaccaattgttgcagtttcttcttgattatgtggctaaggagccggtagagcgtatcttggtaggccttcctaagcagatgaataatgaggcttcggaaaacatgaagaatatcgaaccttttgtccgttcgctgaagaagaaactgcctgacatgccggttgaatatgtagacgagcgttttacttctgttctggctcatcggacgatgcttgaggctggattgaaaaagaaagaccgccaaaataaagcactggtggatgaaatcagtgcaactattattctgcaaacttatttggagaacaaacgtttctcctttttataatgtatagaaaataatttgtaattagtaatttgtagtaaaggaaatgattttacccatttatgtgtacggtcagcccgtattgagaaaggtagcagaggatattgccccggactatccgaatttgaaagagcttattgagaatatgtttgaaacgatggaccatgccgaaggcgtaggacttgcagcaccgcagattgggcttcccatccgcgtggtggtaatcgatttggatgtactttccgaagatatgccagaatataaagatttccgcaaggcgtatatcaatgcccatattttggaggtgtccggtgaggaggtttctatggacgaggggtgcttgagccttcccggtattcatgagtcggtgaagcgtggcaacaaaatacgtgtgcagtacctggacgagaatctggaaccgcacgatgagattatcgaaggctacctggcacgcgtgatgcagcacgagttcgaccatctggaaggaaagatgttcatcgaccatttgtctccgttgcgcaagcagatgattaaaggaaaactgaatgccatgttgaagggcaaggcacactgcacttataaggtgaaaaccgtaaagaaataagtcaaccatataatatggtataaaaggctcaaaaaatataaaaagtgttccgctaatcctgacaagtaaacgaaaaacgttacttttgtttcgtttacaagcatttataaaacaagatgataagaaaaatactgacagctattttgctgttacccacattgttgtatgcgcaaatcaatacggaacgggtgatgaccattgctcggaatgcattgtattttgaggattacgtgctttctatccaatattttaatcaggtaatcaacgcgaaaccttatttatatgagccttatttcttccgtggactggcaaaaatcaatttggatgactatcagggagcggagagtgattgtgatgctgcgattcaaagaaatccttttgtggtaggtgcttaccagatcagaggattggcacgtatccgtcagaacaagtttgacgaggcgattgaagattataaaaccgctatcaaatacgatccggagaatgtggtgctttggcataatctttccctttgccatattcagaaagaagattatgaggcggctaaggaagatttgggtacgcttctgacaattgcccccaaatatacgcgtgcctatctgatgcgcggggaagtctccctgaaacagaacgatacgatacaagctttgcgtgattttgacaaagctattgatatggaccgttatgacccggacggatggggggcaagagccattgtacgtctccagcagggaaagtataaagaggctgaagctgatttggaccagtctatccatctgagtgcaaagaatgccggtaactatatcaaccgtgccttggcgcgtttccatcagaataatttgagaggcgccatgagtgactatgatttggctttggatattgatccgaataattttctcgggcactacaaccgcggtctgctgcgtgcccaggtaggcgatgacaaccgggcgatagaggattttgattttgtgttgaagatggaaccggataatatgatggccattttcaatcgtggtttgttacgtgcgcagacgggggattaccggggagctatcagtgactattccaaagtgattgcagaatatcctaactttatggccggctattatcagcgtgccgaagcccgtaaaaagattggcgactgtaaaggagccgagcaggatgagttcaaaatcatgaagatgcagatagacaagcgtaacggtgtttcttccggtgacaaaaaggaaggtggcgacagtaaggatgttgcggataattcttcggggaactccaatggagatggcgggaagacccgtaagaaatccgacaagaatatggaaaattatcggaaaattgtaatagcggacgattcggaagttgaccagcgttataagagcgattatcgcggacgtgtacaagaccggaatgtgaccatcaagctcgagccgatgtatgctttgacttattatgagaaactgagcgatgtgaagcgtatcgtacattatcataagtatattgaggaactgaaccattcgaaactgttcccgaagccactgcgcatcaccaatatggaagctccgctgacggaggaacaagtacgcttccactttgctttgatagacgctcatacgtctgatgtggtggctgacgagaagaacgccaagaaacgtttcatgagaggtctggacttctatctggttcaggattttgccagttccatagatgactttacaaagagtatcttgttggacgacactttctttccggcatactttatgcgtgctttggtgcgttataagcaactggaatataaaaaggccgaagccacaatgagtgaaggcgccacttcgggtacaacggaaatgaagaagccagaagtgatggccatcgattatgaagttgtgaagaatgacctggaccacgttatccaattggctcctgattttgtctatggctattataaccgtggcaatgtgtcttcgttgctgaaggattatcgtgccgccttggcggattatgacaaggcgattgagctgagccccgattttgctgaagcatactttaaccgtggattgacgcacatcttcctgggaaataacaaacaaggtattgccgatttgagtaaagcaggagagttgggtattgtgtcggcctataatatcataaagaggtttacagatacacgtgaataacatttttttgttaaaaaatagaatatcaaaaagaattagctatttttgcgttctgaaaaatgaaatatacatataaactatgataaagataacatttccagacggctctgttcgtgaatataacgaaggagtaacgggactgcagattgcagaaagcatcagttctcgattggcacaagatgtgctggcttgtggcgtgaacggagaaatttatgatttggggcgtcctatcatgcaagacgctgaagtggttctttataaatgggaggatgagcagggtaagcatgccttttggcataccagtgcccacctgctggccgaagctttgcaggaactctatccgggcatccagttcggtataggtcctgctatcgaaaacggtttctactatgatgtggacccgggtgaaacgactatcaaggaagctgacctgccggccattgagaaaaagatggctgaactggtggctaagaaagaagcggttgtcagacaagacattgccaaggcagatgctttgaagatgtttggtgaccgtggagaaacttataaatgcgagctgatttccgaattggaagacggccacatcacaacttatacgcagggtgcatttaccgacttgtgccgtggccctcacttgatgaccacagctcctatcaaggctattaagctgacttccgttgccggtgcttattggcgtggacaagaagaccgtaagatgatgacccgtatctatggtatcaccttcccgaagaagaagatgctggatgagtatcttgttctgctggaagaggcaaagaagcgcgatcaccgtaaaatcggtaaggagatggacttgttcatgttctccgacactgtaggtaagggactcccgatgtggctgcccaaaggtactgcactgcgtatccgcttgcaggacttcttacgtcgcatccaggcccgttacgattatcaggaagtaatgtgtccacccatcggcaacaaattgctttacatcacttccggccattatgcaaaatatggtaaggactccttccagcccatacatacgccggaagaaggggaagagtacttcttgaaaccgatgaactgccctcaccactgtatgatttacaagaactcaccccgttcttacaaagacctgcctttgcgtttggcagagttcggtacggtttgccgttacgagcagagtggcgagttgcacggtctgacacgtgtacgtagctttacgcaggatgatgcgcatatcttctgccgtccggaccaggtgaaggatgagttcctccgtgtcatggacattatctccatcgtgttcgaatctatggacttcgagaacttcgaggcacagatttccttgcgtgacaaggtgaaccgcgaaaaatacatcggtagcgacgagaactgggaaaaagcagaacgcgccatcatcgaagcttgtgaagaaaaggggctgaaggcaaaaatagaatatggagaagccgctttctatggtcctaaactggacttcatggtgaaggatgccatcggtcgccgttggcagctgggtaccatccaggtggactacaacctgccggaacgtttccagctggaatataccggtgctgacaatcagaagcaccgtcccgtaatggttcaccgtgctccgttcggctccatggaacgcttcgtggctgtgcttattgagcatacggccggtaagttcccgttgtggctgactcctgaccaggttgccatcctgcctatcagcgagaagttcaacgactatgcgcatgaagtgaaacaatatttgaagcgatatgacatccgtgccattgtggatgaacgtaatgaaaagattggtcgtaagattcgtgacaatgagatgaagcgtattccgtacatgctggttgtaggtgaaaaggaggctgaaaacaaggaagttgctgtccgcaagcagggagaaggtgataaaggaaccatgaaatttgaagaatttgccaaaaaaatgaacgaagaagttcagaatatgataaataaatggtaactttgcgcccaattgtagaagcatagcatatattagatgttctaaagttcgcttttacttaacaaaaacattaatttgggaatagtaaataagaaacaaactggaagtaaacgttatttaatgaagaatgacagcttaaaagggcaacatcggattaacgaacaaatccgggccaaagaagtccgcatagtgggcgatgaagtagaaccaaaagtgtatccgatagcgcaggctttaagacttgctgaagaacatgaagcggatctcgtggagatttctccaaatgcacaaccccctgtttgtcgtattattgattattctaaatttctttatcagttaaagaagcgtcagaaagaacaaaaggcaaagcaggtgaaggtgaacgtgaaggaaatacgttttggacctcagactgatgaccatgattataacttcaagttgaagcatgccaaaggctttttggaagatggcgataaggtgaaagcctacgtattctttaaaggccgttctatcttgttcaaagagcaaggtgaagtgttgctgctccgttttgccaatgatttggaagactatgcgaaggtagaccagatgccggttttggaaggaaagagaatgacaatccaactctctccgaagaaagtggcggcacctaagaagagcgcggctcccaagcctgcagaagatgcgccaaaggctgcgtcggctgaaaccgaagaagaataaagaagtgagtaacgccataggtatagtgcgttgccatataatttaataattaaaaagtttaaaaaagatgccaaagatgaagactaactccggttctaaaaagagatttactcttaccggaacaggtaaaatcaaaagaaagcacgcttttcatagtcacatcctgactaagaaaactaagaagcagaaaagaaacttgtgctactctacacttgttagtacaacagatgtaagccaggtgaaagagctcttagcaatgaagtaattgaaaagcgtacaaaagtattaaagttattaaccgaatgcattagctttaagtccgctgcgtgaagtaacggcgctaacattcaaaaacaagtaaaactatgccaagatcagtaaatcatgttgcttctaaagcaagaagaaagaaaattttgaaattgaccagaggttactttggtgcaagaaagaacgtttggactgttgccaagaatacttgggaaaaaggtttgacctatgcgttccgtgaccgtaagaacaagaagagaaacttccgtgctttgtggattcagcgtatcaacgctgccgctcgtctggaaggtatgtcttactctaagctgatgggcgctttgcacaaagctggtattgaaatcaaccgcaaagtgttggctgatttagcgatgaaccatccggaagctttcaaggctatcgttgctaaagcaaaggctgcataaaaacagttagcagataaattacgaggtgctgattactcttttggtagtcagcactttttgttttctgatactccggggaggggttaaaacttgaaaaggacttgaaacaatttactgcttttacttgtttctttcatagaaactcattacctttgttatagaaaaaatagccgcattgattggatcgggaaactcatcaatttttatgaaataccgagacaagcttcgcttctcaatggcgggccacgcccttcggggtaactcttgagtcggtggattacaaagaggaggagcactcaaatcatgtcatacggagtttcatcacatcatcggtgcggctttctataaaagaggaacggtaatctgtttggataaccgttcctctttcgttttatgcggatgtgggtgattgtgaaacgatgatacgtgatgctgaaacagatgatgtgtcaagggaagatagatgatgtgtttatacaagacagaccatctgtatcgggtgaacagatggtctgttttgaaaagagtttttttaagtttatttgttgtcccgtaagtcttttaccctgacggcttttccttcgctctgcggcaaggaacctttctttaccaaccgtaacttcggagttaccagaatctcgtctttcagctggcgggtaatggctttgctaatcttttgtagctcgatgtaattgtcagtagagaggtcgctaagttcaacttccacaatcatctcatcctggttattgaccgtttcgagcgtgatgaggtaattgctgcccaattcggggaattgtaccagcaccttttccacctgcatggggaagatattgactcccttgatgatgaacatatcgtcgctacggcctttgatgcggtctatacggatgtgggtacgtccgcaagggcacttgccgggcaggatgcgggtaaggtcgcgtgtacggtagcggatgaggggcatcatctctctgtccagcgttgtcagtaccagttcgccgatttcaccttccggtacgggttcgccggtttccgggttaatgatttcgaccaggtagcaatcttcccagaagtgcatgccgtcttgttcggtgcactcgaaggctacgccgggaccgttcatttcagtcataccaaagctgttataggctttgacgccaagcatgcgttcaatctttctgcgttgctcgtctgtgtggggttcggcaccgataacaagcgttttcagacttgtgccggcggggtccatcccttcttcctggaatacctctgccaagcggatggcatagctgggaatggcatgcagggcagtggtcttgaagtcggtgatgaactttatctgacgcttgctgtttccggcagcggcaggaacagtcagcgcacccagacgttcggctccatactgaaagcccagtcctccggtgaacatgccgtaaccggagctgttttggaaaacatccgtcttacggatacctaccatatagaggcagcgtgccactaagttagcccaagagtccaaatcgtgttgggagtgtacgatgaccgtcggcgtgcccgtagtgccactggaagaatggatacgtactccgtcctcacgcatatcgcctgctactaatccaaaaggataattggcgcgcatatcggccttggtagtaaacggtatcttacgtatgtcttctatagaccggatgctgtcggcagtgatgccatgctcttggaatacctttttataataaggagagttggcggcaatgctgacagtcttttttaaccgttgcagttgcagttcgcgcaactgctcacggggcatcgtttcaatctcttcttcccagtatttgttattcatggtatgttgaaatttagagtcaattatagtttacatcagtttttcagcaatctctttgccggcagccaacgctttgaggttcagctctacaatggcgtcgcccttgcgttggaagatttcgcggatgctgtcttgcacctttgcgtagtcgatgccgaggaaggggatggtggcgcccagcagtacgatgttcgctacgcggggagagccgacttcttttgccacttcgtttacgttcagcatgattttatgcggcagcttgttgatttcggccttgatgtcttcttctgccggatagttgggaatgttgatgaagggggcttcattggtcaccagccaaccttcggggctgaggtaggggaggtagcgcagtgcttccatcggttccagggagatgatgaggtcgcattttcctgtgggaatgaggtccgaagcgatgggttggtcgctgatgcgcaggttggactgcacgtcgccgcctcgctggctcatgccgtgtacttctgcctgcttcatgtagagtccgtccttgagggctgctttgccgattacggtggcgatggagaggataccttgtcctcctacgccggaaagtatgatgtcttttttcatggctttacttgtttctttttttgcgtgctaatgtttggatacattctctgcgggggatgatgacggatacgccgtggtgctcgatttcttcccggatgatttgcttcatctcttcgtagtttttcttcaagggcactacgacgcggatgtgttcgggagctacaccgatgccggcgcagatggcttccagacgtccggtgccggcagaatcttgtcctccggtcatggcggtggtttcgttgtcggagatgacgatggtgacgtcggcgttttcgttgacgcaatccagcagtcccgtcatgcccgagtgggtgaaggtggagtcgccgatgacggctacggcaggatgcaggccggcatccgaagcacccttcgccatggtgatggaggcgcccatatccacgcaagagttaatggcgttgaatggggcattggctcccagcgtgtagcaaccaatgtcgctgaacaccttataagtgggatattcttctttcaatacttgggtcagcaccgtgtacatgtcgcgatggccgcaaccctcgcacaaagcgggcgggcgcatctctaccagagaaggaacgctgaattcagccttgttctccttgcctacggcacgtgccacgctgtccgggttcagctctccgtctcgtgaaagagtgccgtccaaacggccttttactttgatgccgatgcccagatagccttttagctgtttttctacgaacggttgtccgtcttccagtaccagaatctcgtcacatgcttctaccagctgcatcagctgtttcttgggcaacgggtattgtccgattttcagtaccggatattcgcaaccttcgggatagttctccatcaggtagttgtagccgatgccgcatgccacgatacccagctttttgttggggccgtcggtatatttgttgtaagcggagttttcagaagctttgataaattcgtcctggcgttgcagcaatgctttgtaacgtttgcgtgcattacccggcaggaggatgaactgacgcgggtcttcgctgaaggaaatctcattctgcggttgttgctccttgcgctctacgccggaacgggagtgtgccaggcgcgtaaccatgcgcatcaggatgggttcgccggtctgttcggagaagttgaatccgttgtacaccatgtcgtatgcttcctgctggttgcttggttcgtacatcgggatgagagagaagtcgccatagaaacggctgtcctgctcgttctgagaggaatgcatgctggggtcgtcggcagcaatgattataagaccaccttttacgccggtaatggcagagttgatgaaacagtcggcagccacgttcatacccacgtgcttcatgcacaccagtgaacgcttgcctgcaaaggacatgcccagggcagcctccattgcagttttctcgttggagcaccagcggttatggatgttcttttcggcagtaatcggtgccatctgaatatattcggtgatttccgtagaaggagtgccgggataggcatatacacccgaaagtccggcatctaatgcagcttgtgcaatggcttcatcgccaagtaagagttgcttgctcatatctgaatatttaagtgttagtcatggattaatatttgacgcaaatataggattttgcttttattttatcagcagattacttgaaaatctttctttcgtttaatgcattccaatattttcttgcatttttcatgtgctcggcataattggatgcaaagttatgggtgcccgagaagtcctctttggcacacatgtagaggtagttgtgtttcgtatggttcagcacagcatccagcccgatgggtgaggggatgcgtatgggaccgggaggtagtccggtgttgagataggtattgtagggggattctactgccagatgggcattcgtaattctccgcaagccgaagtcctgcaaggcaaatttgatggtagggtcggcttgcaggggcatgccggtgtgcaggcggttgatgtagagccctgccaccattggtttttcgggagtgttgtttgtctcttcctcgacgatggaggcaagggtgcagacttccgtcggggtcattccgatggcggtggctttgtctaagcgttcctggttccagaacttctggtgctctttttgcattctttcgaagaactcttctgcactcatgtcccaatagacttggtaggtttcggggatgaagaggcagggcagggtctctttgttgtatcccagtttttgttggaatgcggagtcgttcatcaatccggctatttcggtggagtctatcatgagctgtttgcctacgctgcgtgccagccggtccagtgtgcgtacgctgccgacggtgaggttcgtaggttcttgatatccgcggtacagacggctgaatacgtgatatacgttttcccccggccggatggcgtagcgtccggtgtgtatattttcggaatatttcttgtattgggccatccagcggaagccggtgaagcttcgaggatggccttgttgttccaccttattatatatggagtcggcggtgtcgtcgcggtctatatagatatagactgtctttttcggatggaattgcggggcaaacagatagtagtatactgttcctgcacaagctgctccaataagaatcagtgcgacgaatgttccgataatgattttcttcttttccattttgttttactgcatctttagtcgggcaaagttagtaaaaaatggagtgaaaaccatcaagtcatatcagttaattcgatagctgacaaaggttatgcgtttgctgtccggtgcccatgagttgacattgatggtgccttgtccgccgaaaagctttaacaatgtcttgggttctccaccgtttgcgggcattaggcgcagctctacgttcttgtttgccaggtgctctcccggttccaggtcacctttgtagtaggtgatgaatacaacggattttccgtcaggggagatgtgggggaaccaggagttacgggtttcgtcaaaggtcatctgggtctgttcggagccgtctgccttcatgcgccagacttgcatgagtccggtgcgtacggaattgaaccagatgtattgtccgcagggggaatattccggtccgtcatccagaccttcggcagtggtcaggcgggtttcttcacctccttccgccgggatggtatagacgtcatagttgccgtttcgttcggcgcaataggcaagctctttgccgtcggggctccaaccgtggaggtagctgggagccataggtgttattaaacggggagtgccgcccgtgatgggaagtgtataaatgcgcgatttatagtcttctttcgtcccgtggctgatggctatctgctgtccgtcggccgagaggacgtggtcgttgttgcagttttgggcaaatccggtgtttatcagttccggttcggcaggcgaggtgggggaaaggcggtaaagctttccgtcgctgttgtatagcagccattgcccgtcgggcgtccaattgggagcttcaatccggtagggaaattcttttacgacggtccggttaccgttagttacatccagtatttcgaggacgctggtaatctcgtttttttgttgagcggttgcggtcagtgtaacagttgcaaagaaggggattagatagggtttcatgttcatatcgtatttaataaatctccgcaagatacattttttattggaaactacatagtcggagcatgcttttttcagagagaatctgtagtgatggtcgaatgcgtagtgcttatcatatgaatagtctccgggattcttgaaatagttgtccacatactgccagttgtcggtgtcgagcggcgtgtgcgaagtcatgtacgatagggagcttttatctctactatctcgctgtccagactaatcaggtctttgcccaagcggacaatgcgggcatcttcgggcatgtagtcggtgccgacttccccctttccgcctccgccgaatgacaacccatcctgtaccttcgtcatctatcacggcacccgggtcgaaaggagccctgcagtggcctaatccttgggtgaactggttcaccagcatacgtcttaccgtccgattccacccgcgatacgatggatggtgcccatgaggctataccccatggcgaaaggacctttacctcaatcagtccgtgataagtccagtttaccatgtcatcggtggacagcatgaccagtgaatggatgtattagtatgtgtttttgccgtcttttcccacactgtccagttgctgggtgtcattggttccatacacatagagccttccgttgtattccaccgatgtcgggtcggccacaaaaatgaaatccaacagcgggttggcgtttccactgaagaattggggtgattctaccggacgcgtgtctttctttcttgaatcggaaagcgcccacacatcgtttcctgcggatatagccgccagcagcaaagccgctgtaaataacttgattcttttcatttttttatagtatgttataggaatctatggtagccttttgattttggcttgtgttcttcaatcacctcaatcctttatttaagattgaaaaattgggttattgaaaagttgccgcaaatattggggattactatgtataatataaggtgtattatgcttttaataatgtacctatatgtttcaagttatcattgtaatcggatggtgctgttttaaactagctttacttgctttgggataattatgcggctatggattaaactgtttggaggggcattttttattctaacgattcttgaaaagaaaaagcactgattattccagataatcagtgcttgaatatcgagccgctagccagacttgaactggcgacctacgcgttacgaatgcgttgctctaccaactgagctatagcggcaataagcttttgtttacggggtgcaaaggtacatctttatttgaaaaggcaaaaagaatctctgttttttttagaaatattttagtgggataattttctatttgaatgtcctgaactttattgccataaaaattggataataaaacgaaaagaagcatctttgtcgtaggtcctatagcaaataagtctgatactgattatgaatttaagaatctattataaatatctttcttcacgcatagcgtccaaatggacggtgttgttggtagatgtaattatcgttgtgatttccatgctttctgcatgttttttgcaatataggctttcgtccgtatcttatgaaatttctttgtatgtatggctgatcattttggctgtcttgtgtaatgtctgtttctttcatattctccgtacttatgtgggtgttatccgtttttcctcttttgtggatatttatcgtgtgttttggagtcttacgataagctatgctgtactgtttttagggaattactgttggtctgtttcggggcttggagaaactttgccgaacagcattctgtttatggcatatatgttcaccttctctctgatggcttgtatgcgcattgctgtgaagatgctttatgaagctattgcttttgatgcacgtcattgcgtgaatgtttttatttatggattccatgggactggagtcaatgttgcaaaatccttgagagttagtcgtaataatcattatcgcctgcgtggctttatttcggacgaacctgatatgataggtaaacatacgatgggatgcagggtatatcccaatgatgagcagctgtttgaccgtctaaagaaaaagaaagtggatacaatcattatctctccaagcaaggtgtcggatttggaaaattccggaatgctggataaactgttctctcatgatattcatgtaatgaccgttcctcccttaagcgattgtatggacgatggactgataaaggacattcaaatagaagattggctccgtagagaaccggtacaagttgacgtgcgtaaaattacggcccatatcgaggggcgtagagtaatggttacgggagcggcgggagctgtaggaagggaaatcgtccgccagttggctacactgaatccttatcagttgattctggtagatcaggcagaatccccattgtatgatgtacagttggaattgtctgatcattggaagaatctggaggtccgtgtattggttgcagatgttgctaaccgtacgcgtttggaggctatatttgaagaaacacgtcctcaacttgtttttcattctgctgcttataagcatgtacaactgatggatgattttgtgtcggaggcaattcaaacgaatatatcggggacagtgaatattgcagacctggcggtaaagtatagagtgtcccgtatggttatgatatctgctgctaatgcacgtcatccggaaaatgctatggaatatagtaagcgtgtggcggaaatatatgtgcagtcatctgattgcaggttgaaacgcgacaaaggggaaactgatatgttcatagtacgtttgggtgagatgtatccgatgaatgcgaattgtttgatgaccttgtctgaagcttgtatgctcaccctggaagtgggagtcatgggggatggaggagaagtgtacattgtaggagggcctggggatgggcttttggattctgtaatcagtgaaaagataaagcgtgaaaaggcatctgttgatgattatgaacatgtgcgggaagaagtgctggccttggtgcaacatagttataccgaaaaaaaggctattttgattggactaatgaaaaaaatagtgccaattttctcactttcttctacccaaggaaaagacgtgaaaatgacagctttttaatgctttttctgaaacttagaagtggaataaatgtatattataaaataatatattacctttgtgcccgatttatatttattacaagaactcaaaagattaatcagaatattttatgcgtagattaataacactattctttttggtatttactttgtcaggagtagcttttgctcagcagatgtcagatgatcaggttgttcagtatgtaaaaagcgctcagcagatgggtaaaaatcaaaagcagattactactgaattaatgcggcggggagtgacaagggaacaagttgaaagaattcagaaaaagtatgaaaattctaaatctggaagtccgcagagcaatacccaagatgagaaacgttctcgtcaacgtggtgaaatgagtggcgtagtcaaaggggtgcgtacaacttcggaaatgtattctgccaggcaaacggatgttgcaggggattctttacaaatgatggataatcgttccttgtctcaagagaaaggggcgggggatccgacttcgcaaatttatggtcataatatttttactaacgataatttgactttcgaacctaatgtgaatgttgctactcccgagaattatcgtctgggacctggtgacgaggtgattattgatgtgtggggagcttctgaaacaacgattcgacaaacaatctctccggaaggaagtattcttgtgaataatttaggaccggtttatctgagtggcaaaacagtaaaggaagccaataattatttgaaacaagaatttgccagaatatattctggagtaaccggaaatgttccgtctacccaagttaaattgacattaggagaaatacgttctattcaagtaaacgttatgggtgaagttgtggtgcccggaacttataccctctcatcatttgcttccgtatttcatgctttatatcgtgcaggtggtgtgaatccgattggtagtttgcgcagtattaaagtgattcgcaatggaaatacaatagcggatttggatgtttacgatttacttatgaaaggaaaaatgaaagatgacatccgtctgcaggatggtgatgtaattcttgtggatccttaccagtccctggtacagatattaggtaagccttaattccgcaacactattacaaatataactttttaagtacctgagcaacaaaaagttgctcaggaatttgccatgtcagatttttcacctatcttagtgttgcaaatcaaaatatgtatcaaacccgacagacatggcaaaggtagcaattaaatccgagaaactcactccttttggaggaatattttcaataatggagcaatttgactccagactctcatctgtaatcgactcaaccctcggtatgagatgcaggctgtatggttatcaatacagcgaaatcatccgttcgcttatgagcgtttatttttgtggcggctcatgcatcgaggatgtcaccactcatctgatgtaccacctttcgcttcatccgacacttcgcacatgcagtgccgacacgattcttagagccataaaggaactgacccaggataacatttcctacacatccgacactggcaagacctacgacttcaacacggcagacaagctgaatacactgctcctcaattgcctattgtccacagggcagctgaaagagggcgaggggtatgacgttgacttcgaccaccagttcatagaggctgagaagtttgatgcgaagcctacatacaagaagttccttggttatcgccctggcgtggcggttattggcaacttgattgtcggcattgagaacagcgacggcaacacaaatgtccgtttccaccagaaggacacgctgaagaggttctttgaaaggtttgaacaaaacaagcttattatcaaccgtttcagagctgattgcggctcgtgttctgaagagatagtggaagagattgctaaacactgcaagaccttctatatccgtgctaaccgatgcagttcgctctacaatgacatctttgccctcagaggttggaagaaagtggaattgggcggcattgagtttgagctggcctccattctcatcgagaaatggaaagggaaggcataccgtcttgtgattcaaagacagaagcggatagacggcgaactcgacctgtgggaaggagaatacacctaccgctgcatccttacaaatgactacgagtcttccgagaaagagattgtcgaattctataacctccgtggagggaaggaacgcatcttcgatgatatgaataacggattcggctggaacaggcttccaaaatcctttatgggagaaaacacggtgtttcttctgcttatggcactcatacgcaacttctataaattcatcatggcgaggcttgacgtgaagaggttcggactcaaagcaacaagccgcatcaagacgtttgtctttaagttcatctctgtgccagccaaatgggtcaggacatcaaggaagtatgtgctgaatatctattcatgcaacaatgcttatgccaatgtgttccagaatgactttggataacaccgacaacttatagtcgtgattttgcgtattgcctcaagtcgcatggtggggtaaggggcatttatatgtctttatggtgacattcgatgcactgtgccccctttttactaacgatgcagattcttttcgcttctgtatcatattaggcgcgtagttgcggatttgagggtaaggtaaaacgtccgatgttttatgaaatgaaatccactgaaaccgtaggtacattattgaagtattcaggtggttttacgggtgatgcttataagaaagcattacgtataatccgtaaaagtggacgtgagcatcaaatttataatgtggatgagatggattattccgtattccgcgtagatgacggtgataagataacggttgattccgttttacagcgttttgagaatcgtgtggaagtccgcggtgctgtatatcgtgaaggtttgtaccagttggacggtatgatgaatacagtgaagcagctgattaagaaagcggaaggacttcgcggagatgcattcttaaaccgtgctataatcgatcgtgagcttgaagacttgtcgcatgagattatacaagtagatgtgaaaggtttgctgaacgggacagctgcagatattcctttgcagaagaatgacattttatatattccaagtattcatgacttgaaggaagaagctacacttaccatccatggtgaagttgccaatccgggtacatatctctattctgataaaatgacagtagaggatttggtgttgcaggctggtggcttgttggaggcggcggctacaacaaaggttgaagttgcacggcgcatgaaagatccgaagagtacatctttcagtactacagtaggccagaatttctcttttgatttgaaagatggcttattggtgggagaaggaagccaggatttccatcttgagccttttgatgaaatttatgttcgtaagagtccgtcctattttaaacaacagaatgttatggtgggtggagaagtcctttttagcggtaattatgcactatcgaaaaagaatgaacgtttgagtgacttgatagctaaggctggtggagtaactcccgatgcttatataaaaggagcgcgtcttatacgtaggatgaccgaagaagaattccgccgtaaggaagatgctctgcgtatggcgcaagcgggaggcggagattccatatctgtaaaaagattggatttgtccgatacctattctgtaggtataaatctgggagaggccttgaaaaatcctggttcagatgctgatatggtgcttcgcgagggagatgtattatttgttccggagtacgtaagtacagtgaaaatcaacggtgctgtaatgtatccgaatacagttttatataaaaagggtgaaagcttgaaatattacatcaaccaggctggtggttttggtaatgacgccaagaaacgcaaggcctatgtaatatacatgaatggtacagtttctcgtttaagagcaggaaacaagaaagccattgaaccaggttgtgaaataattgttccaagtaaagaacagaaaaggaagatgactaccactgaaattctgggaatgggaagtacgacagcttctattgcagcgatgattgcgactatggttaatctctttaagtaatttgaattatgagcgaagaaaaaatacaaaacataacctctccacaacctgaggaacaagaaatagatttgatagaactggcccagaaagtatgggctagtcgcaaattggtttttaaggcgtgtggtatcgctgcccttgttggactggttgttgcatttagtattcctaaggagtattctacaagtgtgacgttggctccggagagtggtggtaaatctggtggcggaagtatgggagcccttgcagccatggcgggtatcaatttgggtacttcttctggtgaagatgctttgtcacccgaactttatcctgatattgtaagttctactccttttctgattgaactgttcgatgttaaagtcaaggatcagaaagcaaaagtagacacaactctgtatgcttatttgaaagaggaacagcgttctccttggtggagtgcaattttctccgctccttttaaggtgttaggatggacattgtctttgtttaaggatgaaccggaagagggggatgcaaagctggatccttttcgtcttactagagatgagtctgccattgcagatgctttaagtaaacgtatctctgtttccgtagacaaaaagacaggtgtgacaaccttgtctgttactatgcaggatcctttgatatctgcttcgctgacggataccgtgatgcattgcctgcagaactacattacagattatcggactaataaggctcgtcatgatttggcatttaccgaaaaactttatggagaagcaaaggccagttatgagtctgcccagaagaaatacgcaaattttgtagatgcaaaccagaatataatattgctgagttatcgcgcagagcaagagcgtttacagaatgaaatgaatttagcctatcaagtatatacacaagtgtctctatggggcacagaacgaaacgtatattgagggttgggagaaaaaggcatcaaacctattgatatacaaaaggttgtgcaagatatgagtggatggctctgcaaaacgaaacgtttacgtgggtttaatttgcagctacatttaggtgctttttaggcatacagatttgcagataggtttaattgggtttacatagggcttacatggttgattcgggtgggggagtgcatggcagctgcggctgctttttttgtacctgatgatttgatataatattgcttaatttattccatataatagatatttggtatatttgtagcaaaatattataaactatggcaaaggtaatacatgtgcatttgacgcacggaatagaaggaacaaagcggaaagattggtatttcagcagcatttcggcggtttataccgtttttacagctgaacaggtgggtgcaacgaagaattatttgctgcatgcaggattgtccgggaacggtactatatgcaccaaaaaggctataataaagcaatctacgctcatttcttgcgggcgtagtggaaatgtgtcagacgaatagtaagcggccaaaaacgcaataaaaatggctttagaatgatccggtgtggggaggtggttatacctccctttttttgtgcttgaaatcggtcttttttgacgctggatattcaggtggatgttcaaagtggatattcacttttatagaactggatattcaaaatatggttttggcggtgtgcgatacagacgtactaaaatactataattttaaaaatacccctcgttttttatttgatagcccccccctaaaaacctatcatttttcacgctttagtttttaaatgccctaatatcagtgtttttatacccatatatgaaggtaggggagggggattgcttaggagggggacatcatggggggtgatagggggtacgcttcgtttcccatcaccggtgtatggtaacagtaaatccgcctacccgacatttgcagtaccggaaatgtgtgcatccgacacatgttttcccttttcgattgtcatttggcgaatctgttctttaagccttcctatttcttctgcctgctctcttattatagacaagaaagattcagtggtactattatttgtttcctcatgaagtatattgttttgattctttgcggctttaactgctttcaacttagcttgtgcttgctcttctgtcatttcccccttaataattggcaaatctgattcatagtaagtttcttcaattataggattcccttccccagtaaataaccatcgaaggttgatgaatacagaatatcctgacattataaaccttttaaaaaagtcatagcttggagcagactttccgcttactatatcatagatagtttgggctctactgtaccctaatgcattggcgaacttatttggattagtgtgcaagataaatataacttcttctattcttgcagatatttctgtatttttttctttcatatcttttgttattacaggattttctgtacatttgcagcgtgttcaaaaaagaacaccgcgccaaagatacaaaaaaggcgtgtgattagcgatttttaagtataagattatgaaagagacattattgatgaaagtaaatcccaagacgctggataacctgatgaacgaattaaccagtgccattattcagatgaaagatgtagaaccagtgcagaatacaagatttaaagatgaggtctatacaatgtgtgtatgttttcaagcagagctgctgcagaccattcggaatgtggaattaaagaatcaatcaagtaaagatactcaggataacccagcgtgacaacccggaaggcgttaagagacgggtgacggtgtggaaagacacacgggagtgcatggttcttgcgccggggttcgattccccggactccctccaatattaatcattaaaataagtgagatatgaacaagaggtacattcacattacgaaagctgaccgcgactttattgcaaaggcgctcaacgtgacagataagactgtttataacgctatccgttttgatgaccgtcgtggcaactccgaactttctgcaaagattcgtaagttggccatggaccgtggcggtattgtgatggttgttattccggaggtggaggtttttcacgactatgacaaagtatcccgcctatattgtcccaatggtgctcttatagagcttgaccgtaaggatggtagcggccaggtaatattcaaaggtgagactgtgaaaacctttgagcatgtaatggtttcggagattgaccacattaaagcgtttgcatcggcattgagataggaggcggctatgttggtgtattacggtaacatacagtgtatttctgcacgtgagctcatagatggcggctatatcaccgaatcctgttataggaactgggtgaaccgtggtcgtatcaaggtggtgcgccgtggtggaggtgctgctggaaattgcgcgttggtcgccctcaatagtctgcctaccgagtgcctggaacgggtgaaggaagataaccccggtggaacagagcaggcacttcgccactggatactatcaaactatgtgctggatcaggctgcagtagcctattttttggattgggcctctcattcttccagcaacagagctacagacgaacttgcccggaaatatgcggtgaatgcttcagttctgaatacttgtatcaagctttataacagaagcaacgattaccgcaaactgatgggtgaaaaatataactgggacatgatggccactaccatcgagaccttacgcgaagactttggtcatgatcttcctgccagtaccctgcgtttccgcaagaaagtgaacgaatacaagcagtacggttacgaatgtctgataaccggaaaattcggcaaccagaacaagcggaaggtaactcacatggacgaacgcctggtgatgagtttgaaagtacttcccaaccaaccatacggcagtgatgtgcatgaaatgtatctgtcgtttgtatgcggagaactggaagtatgggatctggaaacaggagagatattcaatccggaaaattttacgaacaagaacggggagccgaaagaactgagcgaaagcactatccggaacattctgaacaacccggcaagccagctgctgatagaaaaagccctgcgtggacgtatggagttctatcatgagcaaatgccgcacatgcaccgtcatggcggtgagttttcactgtcacaaattacgatggatgacgtggatttgccgcgcagaatgaaaggcggcgagtatgtgcatgcctattatgcctatgatgtggtgagccagtgccgtatcggtttggcctacgggcgggataaggatgatgccttggttgtggactgttttcgtgatatgttccggctcatcgaacgcaacggatgggggattccagccggtattgaggtggagcagcacttgctgagcaagtataaagaaggattcctgaagacaggtgaggtatttaagtttgtgcatttctgtgctccacagaactcacaggagaaatatgctgaacccctgaacggtgcgttcaagacaaccatagcacataagaaccatgaaggcattggccgctggtatggtaagggtgcacggcgggtggatcagaagaaagtgagcgacagcagcaaccacacctgggaagacaaaaagtattatacgtttgaagagcttgtggcggatgaccgtcgcgattgtgaagaatggaacaatacgcttcaccccaaccaaaagaaatatcccggaatgacccgttggaatgtgctcgtagccaaaatcaatccgacccttcgaccgcttgataaactgaccttgagcagatatatcggagaaaaggtagataccagtattcgtagaaattccacagtacgtgtggcaaatgcagactggtggctgagcggtccggaagtgctggagcagctggaaccaaacaaccgcagggtgacggcctactacctgccggatgaagagggtaagcctacggatgtcttcctgttccagaacgaccgctaccttgacaaggttcgtccggtagtgacttacaaccgggtgatggcagaacagaccgaagaagaccgggcagcctatacagagcaaaacaaagttctgagtcatttcagcaaatacctcaatgaccacgccatcggaaaggtgggaaccggtacaccggatcagccaacggatgatccggaagaggaactggaacttcccccggtggaactatccgatgatttgccagccgacttgtcggcagatccggaatcagattatgaatggcactccggaataagcgaggcaatgagggccatcagtgacatgtaagaacagaattagaacaacattaaaacagcgttagaattatgattacagaagcgcaaaaacagaagattttagcagcgatagccgccaaccgtgtgaactatcccagtgatgccaagcatgctgcctctttgggcatcagtacgtctgtgtacagtgcaatcaagaacggacagacagacaaagccctgagcgatgccaactggataagcattgcccggaaattaggggtgaacctccgtggtgaaatggaatggaaagcagccaagaccccgacctttgaatatatcacagcccagctggagttttcacagcagtccagcctgtcgggtatcttgtgcgacatgcccaatatcggcaagactttcacggcacgttattatgtgcagagccacaagaatgccgtttatatcgactgctcgcaggtaaagaccaaattgaagctggtacgcaagattgctgcagagtttggggtggacagtaagggaaagtattctgatgtgtatgaagacctggtatattacctccgttctatggaaaccccgcttatcatcctcgatgaagcaggcgacctgcagtatgaagctttccttgaactgaaggccttgtggaatgccactgaacgctgctgcgcctggtacatgatgggggcagacggattgaaagagaaaatcaaccgctccatagaatgtaagaaggtgggctataccgaaatgttgagccgttatggtgaccggtacagcaaggtgacaccagatgatggcaaggagcgcgaacagttcttgaacaaccaggcacgtattgtggccaaggtaaatgccccggcaggtgctgatatagcccagattgtacggaagacacgcggtggtttgagaagagtctatactgagattgaaaaacttaaaatgactgcagaataatgaagcgtgcgtacagtccgaaggaaatagccgccaagaaatgggttactctgccgtgggatgagaaatggagcaaacctttcgggttcccggcagagaacgcttcgtggttcatcagcggtgccagtgccagtgggaaaagcagctttgtgatgcaacttggaaaggaactgtgcaactatgggacggtgctgtacatgagttacgaagagaaaatcaaccaaagcttccaacggcgtatgggttatctgaagatgaatgaggtgcagggcaagtttcgtgtggtgacagaaggcagtctggaggaagtgattgccagactgaaaaagccgaaaagcccgaagtttatcatcatcgattcctttcaggtggccggatgggattatccgcaggctgtggaactgatggaaacctttccgaagaaatgtttcatctggatcagccaggaaaagaaaagccagccgatgggtggcggtgcagtaagattgaaatatatctgtgatatgaagattcgggtggtcggttataaagcttattgtcaaggacgcgccattggagacccgggaagctattatgtggtatgggaagacggaatcattcaaacaagtaataatttaccaaaatgattatggataataacgagaaggcttttgaaagctacaccggaactgaagtgttccagatactgctggacggaagttccagcagggcagtgttggatgactggctggagagaaatatccaaagtgacctgaaagtgagaagagcgaaaacgcccggtcatgtcgtaatagaaacgggtgatgtcttgtttgcacgtaatgtgctgatatggaatccaagttgtaaagtcaacatcaaaaagaagtgatatggaaaaagacaaagtttacatcagtggggcaatagcccactacaatatcgatgagcgcaaaggtgcattcctcgatgctgaaaacagattgcgtgctatggggttcaatccggtgaatccatttaaaaacggacttccggatgaagcgcactggagagagcacatgcgggcggatatacgcttgttgctggattgtgagtatatctatatgctgaaggactgggaactgagcaaaggtgctaaactggagcttgatgtggccagttcgtgtggcattaaagtattgtttgaataacataaaatcatcatgatatggcacaggaagtaaccaatttcgcccggttctatgcattgttcaacaagctgccctgtacaggagaccgggaagaattcaagaaaagcattgtgctgcagtacacgtggaaccggacggacagtctgaaggaaatgacggccaaggagtatgaagcctgttgtactgctctggagaaactgagcggacaagacgaatggcggcagaagctgcgtgaggagctgcggcggaaacggagtctctgtctgaacctgatgcagaagctgggtatagatacatctgactgggcacgaatcaatgacttctgcagtaatccccgaatagtcggcaaggcgttcagacagattacggtggacgaactggatgaactggcggtaaagcttcggtccatacaacggaaaggcggcttgaagccaaagaaagaaaagcaaacgattaaccccatgagcatggtgtcactcattcagattgaccctgatgctccggcaaactgataggatatggaaaatagaaacacaaagattttagagaatctgaaaaaggaaatcaacctgcttgcctctgatatggagaagcaggatgcagccgagttttatagcgaactggctgattgggcatacgccaacggagaggctatgctgatggaagacgaacctgaaatgcaggattatgaaaaccaataaccccaaaaaacaagaatcatggaagaaatgaaacaaacgaccgtggtaatgacggcagaggaaaaggcggaatttgaagccttccagagagaaaaagcaaagaaagcggcagaggaaaaagccaagaatgaccgcgaaatgtacaaacagatggtggatgaggagatagccaactccattccggtactgctgggcatcagtgagcagatcaaggcaagcaagcagactgtgatggacaacttcaaaaccattctggaaatgaaggcagaccttttcaagaccaaggtgaaggatgaccagcgcagccatacctttactaacagtgaaggcgacaaacgaatcacgctgggtgtgtatgtgaccgacggttaccgtgacacggtggaagacggtatagccattgtgaaggaatatatcgaaggcttggccaaagatgaaaagaccaaggcactggtgagcatggtgcttcgtctgttggcccgtgatgccaagggtacgctgaaggcttcgcgcatcgtgcagcttcgcaaagtggccatggaaaccggagatgaccgtttcattgaaggtgtacgcatcattgaggaagcctaccagccggaagtgagcaaacagttcatccgtgctgagattaagaacgaaaacggaatgtggaaacctattccactgggaatgacagaatcttaatatgaattgatatgatacagaatatagaaaagccctctaaagtagccttgtgccgtgtatgtcacggcacaggccgcataaaaacaggtgattattccacttttccgacctatggtgtttgcccccagtgtgaaggaagtggtcgggtaacggtaagtgcaaaaatgacgcttgacatccgtccctataaacctaaagtaaaaccgtctatgaacgattaaacctatatgggaaagcggcacggagttagttatcagaagcgtgtagcagaagtaaacaggatatatgaccattatgccagtcacggtgtaccgaaccgtgaaatatggcggcggtacatatatcctgtgtatgctattagtgagcgtacattctacaatatgcttaaagcgtccgcagaccctaaaaacgatttgccggacgatacggtacaattgaaatttaactttgactgggaatgaacgaagacgttaaaaaagtagtggcccggatactgaaagacattcaggtggaaatgagcgatgagtttgacaagaactttgagcggcaggcttttttcagtgaaaaatggcagcggcggaaaagccccatccgggatgaaggcagagccatactgacagataccggggcgcttcggaaaagtattgggagccggacgacggaaaacagcattaccttctttacttctctgccctatgcggccattcataatgatggtggtgaaatagtggtgacaggtcggatgaagcgtttcttctggcataagtattatgaggccactgggtcgttcgggagaagaaaggacggaaagctgcggaaagacaaacgaaatgcccggcttgatacagaagccgatttttggatgttcatggctttaaagaaagaaggaagcaccatcaagataccccgccgccgtttcctcggcacatcgcctgaagtggaaaaagccgtccgtgagattgtagaagagaacctaacagagtatttcaccattgaatataatatcataagaaaatgagaaaagaactttatcggctgctttgcagcgaactgaaggccattgaccttatcaagcacatagacttgtggaaccacaatgtggagttcatcgagcaggaagagaactgggagcgtccggctgtctttgtggaattctgccctatacagtggaatgcgattgttcccggtgtggaataccgggcagaacctttaatcaagctgcacatcgtgacagactgggaaggttcgagtgctgatggaagcgagctgcaggaagatgcgctgaaggtgtttgacctgcccgggctgattcatgccagacttgccggcttgagtggggaaacctttctggagctggatttggtggagagtgataccaatcacaaccatgaggatattgtggaaagtattgaggtgtatcagtgtgtggccatcaagcggatgcaatagtcgtcattattagaaacgaaaagccgtggacgtataaattaccgtctgcggcttttctgttcaatacaggcaaagtaaacgccatcaggcggcctctttcttgtaaagcatcatatccgtgtaagaagagctgtaattcatgtgagcattgaattccacctttgtgcagttttcaaaaggattacccaaatccctatttctacctatccattcgcacaactccagaattgaagatttgttggaagtgaaatatacgtatgaatgtcccttcagtacattcagcacatccaggtagtcggccatattccagtacatgttataggttcctacgtcagtggacagatagggcggatcaacaagaaatactaccccaggaatatctttataccggttgaacacttccttgtaatcgcaggatacgatttccaacccttcaagatagtccgtacattccgggtagctggtcttacgtatgttgttgtataaagcttccttccgcatatcctgaacagacagtttgtatttcatggaaaacaagatagaggaggagagggtaatgaaatccacatatccggtggtattctcttcctgctcgatgcggctgaatattcgttcacgcagttctcctttaatgattttatgacgtggtacggaattccctaccatttcgcgaatgtcagcaagcagctgattcgtttgcggaatgtgcttcatgcggaagcggtagttatcaaagtcattatagataacagtagagtggggcttgagggatttggtaatgtgagacaacaatccggagccaccgaacaggtcaacaaacaatgtcccatccggatattgctccagcactttcatgaattccttggcgaacatacgcttttgcccgacaaatgggagaggggctgacagatacatctttctcatacgttcaattcaaattttacattttcattgccggcaagcagctgctctgttttgtcgatgttgttttcgtaaatatgcacgttccccagattcagggtgatggattttagcggcaactcaatctgccttgatattaggtacaaatgataaatatctgccggcagtcctaaatttgcatcactgcttcgctgataggcggtcatgaccagttctccttgctctatctggaactgaacaagactaaggcatggagcctggttactttctgttcctgtagatccgagaaacaatatatagtttttgctgttccttttttccctgtttatgcgttcgatgagtggcggcagtttttcaaaataggttgggtagctgttcacaaggattgagccgcagtagtcccaccagttgatgccgacctctctgtatctttccacgttgcgctcgcctctcataaacagttgtagctcgttttttaacttcttccgcgctatggtatgcccttcgaatatatcaagaaggtcggcagggagcagcgtcagctgttcattcagcaggtagcggatattccctttcttattgctttgcatctttccggatgaaagcaccttgcctaagatttgataatatttgttcatgatatgaatgttgtttattgcgatacaaaggtagggtaggggaatttgcctttagtgggaggaagccctgattacactgcacacaaattgcagtcggttttaaaacgcctgatcaggtcatatacctttcgctcactgatgccatatcgtagggaaagcgttgctacgatataagacactttttcaccattggtatgcaacttgttatattcattatatagttctatatattgcacatcatcgggtcgtatgcccatgtaatggcatgtttttaaaagctccctgttcaattttagtatctcaattactttcatatccagttaatttttgtacatttgcaacatctcacttacttttgatttaaaaaacgcatccagtgcgcggcgagggcattgcccccggtcgtgcgcactggatgcgtttaagttaaaagtaggtgagatgatttttaacaggccgggggctttttttattcctcccccgtgggaaattcactcaatcaacccgatacaattccaagttgcatacatctttccttttccatccttctgccagtgtatgttggatgtgtctgaccgcttgaacatagaaatccttcaattcatccaaattatcaaaggtatggtattcgggttgctcatccgaaccgaatttgaatgtaactggaagggtctctccgcccgtctgaacagccaagtcgtatgctgccttatagttgtactggttttctgtagaaagccatacaggggcatccttatacacgaatccggataggatagctgcatcagtctggctgttataccaggacataatcaatgtgcggatttcctcatcagtgggcttatggctgtactcttcttccatataggatgctgagccatcctctttttcctgcacatcccagcggatgcgccatttgtctttaaccgggttcgtgcattccatcagctgaacaccggcgcttccttcaactcttctcatgtaaacacatatttggttctacctttgccgaatgtttccgtcttgatggtcgtttcaaacggaaagccatccggcatttctttcacttgtgcgagaatattcttcatttcctcgctgttggtgaagaatttctttgcctcgccgttcacttcgatggccacaatacagcggtcttctccctgctcggtcttgataccggtctcaaaatccttcactacaatcggtaagtttaccagttcccggatgcttaccaccactccgggaaatcgcttcttgccgtcctccggtttgtaagcgacattcaagtctttaaaacttctcatttctttgcctgttaattttttaaacaacttattacagtcggcgtgtttcgtcatgccgtagaaactggcaatcaattcccgccgtctttttctcgattttacctcgtgcatcttccgggcaaacttctgcttgatacgtttccgcaatctcacatagtcaggacgaataacatagccaaggaaatcaatgccttcttctacagggaatacccgttcattcggtttaatttccaagtctattttctccatttgcccgtgaataatatcacgaatcttccacaattccgctttcgttttaccgagtaccagtccgtcatcgcaatagcgatagtaataacgaaccccgtacttatccttcagatagtggtctaaaaatacagacagaagcagatttcctgccccttgtgaactgcgcagtccgaagcttataccttccggcagcagcttaacaaaccgctccagtagcaccaacagcctttcgtccttgaacaccctccggaagcaccacataacaaagtcctgccgcgcattgtcgtaaaacctacggatgtcaaacttgtatgcgtaaagtgtgccttccgggtctttttgcaaatcggtacgtatgcagttcatcagatcatgagtaccgcgccttttgatgcttgcaccggttgtccggatataacgtttttgcaggtggcggtccaccacattcatgatggcaaacacagcgatgcggtctttcatggacaggatctgcaaaatacgttttttaccgtattcttcaatttccctctcatggtagccgcccagccggaatgaaccgtccgcaatggaagccgtcagttcggcgataatcttctccctatgggcaagcaggaatcgtccctgccttgacctcttacgaccggttccgcgaagtaccgaatcgaatgcctccgacatattggagtattcgatgatttcctcgataatatatccttccctgcgcataagctattggttaataaacatgaaagataagggccttcctttccccggatctgacttcttcgaactgataacagcctaccaaactccacccgacgcgtgatttttcagctttccaccctaatgggtgctgttgctgtggcttgcttccctcggcaccgcttcggggacacgtccccggtgctgtacgccgattaattagatttccagacgcgagccgatattcgcattcgtattcgaagcatcgttattcgcattcgcattcgacacaccgccattcgcgttcgcattgttgtacccgcgatagaccacacggactatcgggaagctccaccgggtacaaagttactgatttaacaggcaaaatgagctaaagcattacactatccaccaaaatagggccgacaatatgccgcctatgacggtaagagaccagtctatccagtcccaaagtccgcctttcagtttgtctttcagttccagacaggaggctgcgacagctgcagcatagagcgctgtccacggggtgaaggccaaaatgcctaccaacaaaccgccaataaggtgtttgtagcggttgctttgtttgagaaattcgataattttgttcataacgggttgtttttaaaaattgttttgtatatttgcagtgaggaatagcgttagatgttcagaacgggattgtagttcccggagcttgcgtctttcgctattctttcttttttatatgtttgtataattcacctccttctgaaagactgtgcagcgtgtattcgtgccagtcgtattcccgaactattatcagtgctttttcacctcttacttctatctcgaaaatgtgcgattgtatgaggtgtggaatacctttgtggttatctgctgttcccaggtatttggctttggcaaatacattctttatatccagaagcatgaggttcttttcatggtagaacttgtatggctggttggtccattcttgaagcgtgcgttttgatatgtttaccgggaatgggaattcattattcgtgataactgttccctgcaatggcttggcttgcttctttatctgtttggcatctgcattggccaatgttcttaccagtttgcatgcggcgcacaattcattttccggaacgaagaccagtttcatatttccgttgttcatatcgcaatccttacagcgcttgatggtgtatggattatagtcgggcatcgtcttttgttccatgcctgcattgaaccggaacattccctttttgtcaacttccaaagctgatttcccccttgccatggcctcttcgtggtctgtaggcggatacttggatttgcgtacctggaccacggaacagcggcagccccatccgttaggaggatagaattctgcccagaacgggtctgaagccgggagtgtgatgccggccatttctgcatgggtgggacgtacctttgcatccccggccgtgcggtactgtagataatagcggtcgccgtcctgcatgaaccgttcccatttggctgccatttcagccgaagcctgtacaaaggtgaattcagcccgtagatagtttgaattgtatgtttcgtcgatcttccggacatcattcaaaaagcgttcgaacgtctttctattgccgttttcatccaacagggagggaaaggcttcattcagttcatggaaggtcttcaagccggagaatacatagttggaacgctccagccgcttgcgcatggtctcggacatttccacctttcggaatgaaccgttcaagacagaagaatgagcttctataaaatcctgcgcttcttcggatgccaggatacctatttcaaggtttgccccttcttgccggaacagcaccttcatcatgcggtcaaagcgttccgtgagcttgtcgcgcatgagttttgcctcgtcctccatggagaggcatagtttctgtttgcccaacaggtgggcataccgctggtgcagccccgaataatcatcggggctcagtcgaaaaaacgggacagcgtttcagccggtttgccgtctttcttttttttcggttctgtcgggtccggctcttctttcggt

SEQ ID NO: 96 - DNA, 98241 bp, Bacteroides uniformis
  source 1..98241: mol_type = genomic DNA
taaaccggaaatgagaacagtcattccgatgaaggggagggtgggaaagaatactacgtgaacgcaaaaacacagtatgtcatcttaaaacaatatctttaaaaagtttttcagaagaaatgcttaccaatatcctaataattattacttttgataacataatacaacgatatggaaaagaaaaagattacaatagaggtagaaccagctacagccgtagctaccgtcggtttattgcgtgggatatttcccagtatcatcgaacaactggaaaggcaagccgcaacaaacggcagccccttaaaattcaataaagtagaaaatatgcaagaagtattggatgagatttatgaaaagtgcattgccgaaacgaacctccgggagtttgcccaggcgcacttaaatagtgacggattacctaactgatacagaaatacggaatctgccagccatccttattccaaataacaaatggtacagaattacacacctgtcatgtgggatgacaaagcatttgcctttgtcccctacgaagcattcagtgatttgccacattatcccaaagaaaaatgtgagcaaatttgcaaagagctgaacagccttataagactatgtacttataggccgaaaaaggaagatatttattttcatccggtaagttatgtacgtcgttccggaggtttcatagttacggataatcaggcatcctttgagaaatgcccctatcctgcttgcgcagaccgtcatagctgccaaaaaatatgtgatttgatgaaccgtatcattgaagagtcttaattatataaaataccatggaacatccaaactccaaatgcagaatagcacaagctgaatatttaagtcggctacctgaagaagaacgggaaaataaggccagagatattagaatcggaaacgccagctatatttaccaccaacaagcggttccaatccaagaaaacagattgataatgtattataaagagtggttggaaggtcttcctcccaacatttcacgccatatgagaatgcttggatttgaagcatgtaagacaatgattccgtttacgagatatgtgaacgaaagaaacgatattggtatgcgtgactggatgcaagagcatctttcaccgagtgacttcaactattggcaggaactttcgaaaaaagcaggttcgccaacattttaatcccatcccgttcaatacgctgcctgaagaataaaaggtgcgtattaaacgagaatattttttagcgtttagtcatctcttcccgcaccagttccgtttctgtcggggagagtttcggcaatttgacagttgccggactttctaactggtaagccttcacctcattgataagcagctgccagtcaaaaagaaattcttcggaacaaccatgtttacgataaatttcttttgctgcttccaaaatctcaggagcgcaaaaatcgtctccctgaaagacaactgccggacgatcattattgatacagtctctcaataatcgtaactgatctttcattgtgtttacctattatgcgttctgttgttttaccattttcaaaaattcgtcagacggtttaaatgccggtatgttatgagccggaataatcatagtagtattcttagagatattccgagctgtcttttgcgctctcttcttcactatgaaactaccgaatccacgaagatagacattttcctccttacccaacgaagtctttacctcgttcatgaatccttccaaaacagcaagcaccgctttgccgtcgatgccggttctggcagatatttcctttacgatttccgatttagtcatttctttataatttgaaaattagcgtgcaaagataattaatccaatggattatttaaagtctggcatccgcagcaagccctgccttcgcccaatgaagtgttaaattgttgcgtatgggtcaagttccttaatccgcttacacaaataatcaaagcgtttcttggtaagcggtgtgagtgtatcgaggttcttgccatcgaaattctctccgaaaataaggtcgtccactcctatgccgtgattgtaattctcgcgcacgcaatcacgcagaatccaaaggttatgcaggttcacccagtcggctgtaatgtttctgattttactgaacagcagcgcagcagtgtaaaggtagtgtccgcaatggttgtagtcatgcaacaccagcttgccctggtaatagatgtcgaaatccttgttttcttcatcttcctttgtatcgcagtagaagaatggaatgtctttcagaccgtcccaattaatataagtagttggcttcataatatcttttttgaatacgctacataacctgttatttgcacactttccattattcacagaacatttgatgaaacacttccttcagtctttttatctcactgaaattcaaatctccaatctttcttttcagccggcttttgtccaccgtgcgaatctgatccgtggctatctccccatcacgcccggctacagaacacagaacccggtaaggatagttccttatggtggaggttatcggagcaatgactactattgtaaggtacatattcaaatctgaaggagttacaacaacacatggccgtgtctttgccatttcacccccacgggtagggtctaactctacccaatacactccatactgttctaccatgtccaatcctcaaacttttcatcctcaaacacatcagggataagcaactcatcatccccattctcatgggcacgtttggcagcttccgcccatccctgccgtggttgtgcctttatcacaatattgttcccgtccaaagaaatgctcacagccgatttcaaggacaaacgcaactgtttcaatatctcggaaggaagtattatccccttgctgtttccaatctgaataatgtttgttaccataatgttataactttaaaattgattatcacaacacaaatatagacaaagttataacaataccaaaagaaaagccaacttttttccattttcaccgataacccggccaacggctgcactcgtcgggaggctagtgccccccttgccgtgcggcgctccccgacctatgattcttatcatgtcttgtgtccttttctccgcttctaacaaacaaatctgcataaaatatagatttgcgtttccatttgaattttagttatttgataccctaactatgaatagcaaacagataactgatttttaaaacagcagaatgtttctgttttattaaaataaaaagggaacaaatttttaaggtaatacttacggaaaaaacagactttataacgtttctttttcgtacatttgcaacaatataataaaagcgaaacatataatggagaagcaaggagaaatcatactataccaaccggatgaagctgtaaggttggaagtacgtttagaagatgaaaccgtttggctcacacaagcgcagatagcagaactttttcaacgtgacagaaccgttattaccaaacatataaataatgtttttaaggaaaaggaattggaagagaaaagcaatgtgcattttttgcacattgctaattccgataagcctgtcaagttctttagtctagacgtaataatttcagttggatacagagttaaaagcgtaagaggtacgcaattcaggcaatgggcaaataaaattttaaaagaatatttattgaaaggttattctataaaccaacggctcaatgacatggaatatagaatgaacaatagattcttccaaatagagaaaaccattgctgaacatgatgcaaagatagacttctttgtacgcacctcattgcctccggtggaaggtatattctttgacggtcagatattcgatgcgtataagtttgctacagatttaataaagtctgccaaatgctcacttgtgcttatcgacaactatgtagatgaatccgtgttactcatgttgagcaaacgaaacagtggagtatcagctactatttatacacaaaataaacgcacagctccaacttgatttaaacaaacacaatgaccaatatcctcccattgaagctagaacctacaaaagtagtcatgaccgcttcttaatcattgataatacggaagtatatcatattggggcatcgctaaaggatttgggcaagaaaatgtttgctttctccaaactggaacttcctgcccatacgataattgatgtattatgaaataagctaatcacccatgcgagaagcggaagagaatataaaattcaagatggaaattgacgtattggttcccattccacgtactgtcacccgtgatttcaccagtttgaagcacctgcgtcaatggcagaaacggaatgacatcgatggttctctttactgttttgcacaccgggaatacctgctcaacgaaaagggagaatgggaacaatttaccgttatcggcaaacaggtagtgactatcggagaactggaaaggcttcttttggcaatgaagcaaaaggggttcaaccaatacagccgtgaggaatatgaagaattaatgtcttcatatttgaaaaagtgaagaattaaaaccttcattacacatttaaatacgaaaacaggatgaaaataggatatgcccgtgtttccaccaaggaacaacatctggatatgcaactggaagcgttgaaggctgccggatgcgagaaaatcttctctgagaaaatgaccggacgtcaacaaaaccgcccggaactggatgcctgcctgagctttctccgggaaggcgacacacttgtcgtatataagctggaccggcttggccgttcgctgaagaatatccttacgctattggaagatttcaagaataggggcatccaattcacctcactgcaagacaacatcagtacggaaggcgcaatcggccaactgatgaacaacattctcggtgctttcgctcagtttgaaagagaccttatctatgagagaacccaagaaggcagaagaatcgccaaggaaaaaggtgtcaaattcggcagaaagacacttatcaacaaaaacaacatcgccaagcagaaaagctgcatccaactctatgaatccggaacgccggtaagggagatacagaaaatattaaacataggcagtagcggaacagtatatcgcctattaagaaggaatggaattgcgctgaaatccgagaacaaaaataacaaataacgaataaacctctgcccatccttcaaagatgattctcaaagatcgtctgcaattccacctctcagcaagattataggaaagtccccttcacggggactgattttttttaattttaatacaataactccatgcactcctgtaccgctttttccaatgcttcttccaaacaacaaaaagcgtccgcattactttcggagtcatacaacacataatctccagccctcacaaccacatgccagaccgccacgttttgttctgtttgaaacgtatattcacgagtctgtatcatccattggatacatgctgccagtgtcgggcactcgcacatatacatcggggtattccttccctcaatatcggtgcgtagcctatcctgtttgtcataccaatactcacaaggcacgtaatagtataattccttcatcataagagctgtgtcgctattaaccaatctctctttgttgatttgtgtaatcaaattttccatattagcattatttaagttgaacatctgatttattcttcagctagattcaagaccttttcattttttgtatcgggaaggtctttggtcagccgaccttttttttgatgtcattccccatctgagttctgagccttttttcggcatatcaaggtctggattgcaagcaataagccaagtttcacttatggaaaatgtcgggaagacacttcttcatcgttattttccatacagtaaaggcgcatggccgtaacttgccatttgcggaatcccgaaacctttgccgagcaaaaagccggactcggatcggaggaaagaagccgggggaggcagcccacagaaagggcaatccgatacaatcaagaaattaacctgctatacccttgtgcgagtgaaataatccatcatagacactacatacctaagtagtggtatcaatacaccgatcacatatatcatagcgtagcccaaaaggacaaaaggtaatgttttacgataaagacatgcaacagcgagcaatataaacgaaaaagaaaagccataaaccccatattgaaaaccgggtatcaactcataaacaggtacgggttccggatgaagcatggctccggccacaatagaataaaggctggtcaataatataagcagcgtatataagcaactcttaagaatcctgggatcattccttttacaatagagaatcgttcggatatcacttctaagaaactcaatgcccagtaagagagccaccataacgcctgtatcaaaagtagaaaatacattcattccgatcacctttggcgcgaagatatgtatttattctgaaaagccacgtctttgcgtattttacgatgtcgcatccgatagtccgggaagcatttttttggttcttttttggggtgactgccaaaaaagaaccccgaagccgaaatcccgggcagacgggatttctcccgtccaccttacctattttgcaatcttccctcgtccgcatagctataatagttattgcctgccacaatcacatggtcaaccaaacggatgtctaatgtttcagcggcttttttaactgcttccgtcaagcggtcatccgcactgctgggcttgcgtgctcctgatgggtggttatgtaccatgataaaagatacggcgttataatacaatgcctgcttcatgataacccgtatatccacaggggcggtatttatcccgccgcatgagatacggactttacggatgagtttggacgaactgttcagcaacagcacccacatctcttcagtagctatatcgcacaaaacaggatgcatcattttataaacattattgctggataaaagcgcaggactttcaacttgcccttctttcagccgtttatatagctcaatcgccgcataagcgacttttttacggctgggtgttagtgtttccagtacatcagacaagcacaatccttctatttccatctgttcatacttatattcttcacgtttcagtttctcactgttcgtcaaggtataaatcaactcgctgttttccatcacccgataaacgtcattcacttcaaatacggttctcttcgttttcatactgccaaaaattaaaagattaatactcgcaaacatcgcttgtcgccccaaccataaatttttcctcaactgattgggaacagtgcattgaagagaaagcgggaaagacggatcagaacgggattgaactggtaaatactacctcccggaatgggaggatggagatttggcttttcaatatcgggcgttccggccacgcctaccttcgcaatgttcctatcagttcaggaaaaaatcatcatacctctcttccggcatagccggagcgtagagcgttagggatagcagggaaaggcctggagggtaacgaggacttgcaacgaatagcccggtcagaagggaacgccctgaaaaactaattcggatacagaagatgaacagaaccgccttccaatcatataaaaaagcgtgaaaatcaacacatacttccgaaaaatctttttccgaaagtacgtatagggcatgtgaagggaaaatttattttcccagtcatttctatgttatcgctttggggatatttaaaggggttaggagtttaggtctttattatgtattttggtggatggttttacacagccgataccttttatttaaaaatttctctcttttatttcactgatataccgacatataaaaaaaacagggattacctattcccttcattaacgggtggacggttttacacagctgacaagtgaaaccggacgcttttacacaactaaagcaaaaggagtggacggttctacacaactagaagcaacaaacgggacacttctacacaactaaaacaggcaaagcggatgactccacacatctaatcaccccaatagggacacttctacacaactaattctataaaaaaccgtgaaacgtggacggttctacacagctggatcgtccatgttcaccgccccgtccgtctccggagatatgaactcttcaggagcaggagcaacttccgttccattggcactctccaactcttcctgtgcccatccttccggaaacctgccgaatacagccacgaaatcactgatatatatctgtttcttcttttctacgctttccggggagtttgcccataaaaggaactctttatacagtccggcatcttcctccacctctttgatcttcttcctcctgacagccatatccgtgtccgggtaggcaatctcgacatacagcccaagcaggttcttatagaatttcttcaccacgacagcatattgtccttcatcaaaatagtgcagcgtatgcctaggaaacgagaacaacacggtatatgcccatctctcatgatcgcctttcacaaaagagaaattgaaattggtatatttcaggtaagtattcatctttttcagtatcgaggcgaccttctttttccggtctttgggttcggcaatctctatgccgagctttttagccagctgatcgactgtcagcacataaaaaggagcctcattcttggtggtcttatacttgatcaggtaaaccatcttggaaagttccagatagaaatagcggtaacggctgggcaggctacggtaatcctgaagttccaagaggttatagagcgagaacatgaaattctttatctccgggcttaccactgccgagtacagccttttcgttgacttcttcgtcttgaaatcggtcattatgtcgaaacgtttcaagatctgcacgaaattataggatgtacggccatcctcgccaatggtcggatagcagaggttctccaatcccagtttatagagagccgcctcaaaaaccgtctcgataggatggctgattctctgtcctgccgtgtcggtacatacatattccggctgcatattctttccgaacatggccgcgagctgccggctatccagcttgcgctgcaagttggtacggtcataccccatcttacggcagaagtcttctacggagaaccaggaagtcccgaacaagtctttgaggtgatagctgcccaggtatatgatcagatcgagcatgacatttccacctgcctcatacaaccgttcaatcagcacggaattatagctttccccaagcaccctagggacacgaatcagttcttttgccatgataatacttacaaaatcaatcctttctctgttttcattgccacaaagataggcataccggccaacatacgcgtcataattatcaatcagttttaacggtatgaccggtatgggaaaaggagaagtactttcctgaagaatgctttatccgcccttcatcagaaagaaagcatcttacacctgtaccccatagacatcctatattactttttcagttcttccgataaaaaggaacggtctatcaatacttgcaccaatggtttctctttgacaaactcatcaagctcacgctttatcaatttattgcccaaccctatgcgtcgtccaaattcctcgaaatccttccgccctacctgatgagcaatttgactccacattgtcatctgtaatcgactcaaccctcggtctaaggtgtagatcgttaggttatcagtacagcgaaatcatccgttctctcatgagtatctacttctgtggtggctcatgtattgaggatgtcactactcatttgatgaaccatctctcgcttcatccgacacttcatacttgtagttctgatactatcctcagagcgataaaggaactgacgcaagaaaacatctcatacacatcagatacgggtaagaactacgatttcaacacggctgacactctcaatactttactgctcaattgtatgtttgcatctgaccaactgaaagagggtgagaagtatgatgcaaagcctacatacaagaagttctctggttatcgccctggcgtggcggttattggtgacttgattgttggcattgagaatagcgatggtaacacaaaagttccatttcatggcacgttttctcgccatggcagagcttaagtaaacttagctctgctcatctggcttaacgaaaaccttcgttttcatcagaaggacacgctgaagaggttctttgagagatttgaacagaacaggctcactatcaatcgtttcagagctgattgcggatcatgttccgaggaaatcgtggaggaaatagagaaacactgcaagtccttctatatccgcactaaccgctgcagttcgctctacaatgacatatttgctctcagaggctggaagactgaggaaatcaatggcattgagtttgaattgaactctatccttgttgagaagtggaagggtaaagcataccgacttgtgattcaaagacagaaacggatggatggtgtgcaggatctttgggaaggagaatacacataccgttgtatcctgactaacgactatgaatcttccgtaagagaaattgtcgagttctataaccttcgtggaggaaaggaacgtatctttgatgatatgaacaatggtttcgggtgggacagattgcccaaatccttcatggccgagaacactgtgttccttcttcttacagcacttatccgtaacttctacaaggccattatccaaagacttgacgtaaagaggttcggactcaatgcaacaagtcgcataaaagcgtttgtcttcaggtttatctctgtaccagccaagtggatcaggacatcaaggcggtatgtgctgaatatctatacctgtaacaatgcttacgcagatatttttcagactgattttggataacgcctacaacttatgggtatgatactgcgtattgtctcaagtcgcattgtggggtaaggggatgttgtaggcagaagtgggtgtttctgcctcaatttatctgataattcagtaatgagaggacgtgtacacgcaagaaggacgttgaagggcttagttgcggatttgaggcaggtaagaaaatacaaagaattaacagcaaccgagaaactgaaataccgtatcgcagtgaaaatgacggcagccgactacttccgcctgctgacacgatcgcatgaggcgggcgtatcaccaagcgagtacatgagggaatgtttccgtaacggtcatgtgaaagaacggctgtcggaggaacatgccggatacatccgccaactctgcggcatggctaacaatctcaaccagcttgcgcgtaaggcaaacgccggaggcttccacgatgaacggtgggactgcaaggtggcagtggcaaggattcatgaacttataaccaagatagggatatgatggcgaaaatcgtaaaaggaagcgacttcaagggtgcggtggattacatcatcgacaagaagaaggatacgcagatagtagcaagcgaaggcttgtttatggaaaatctggaaactatcgccatgagtttcaatgcccagtcacggatgaacgataaggtgacaaaacctgtcggacatatcgcgttgagtttttccaaagaggatgagttacggctgacgaaccgtatcatggcaggcatcgcgcttgaatatatggaacggatgggaatcaagaatacgcagttcttcatcgcccagcatttcgacaaggagcatccgcacgtgcatattgctttcaaccgcatagacaacaacggcaataccatatcggacaggcacgagcgtctgcgcagtacccgcatctgcaaggaattgaccttgaaatacggcttgcatatggctggcggaaaggacaatgtcaaacgcaaccgcctgaaagagccagacaggacgaaatatgcgctttacgacatcatcaaaatggaagtcggcagatgcggcaactggaacgtgcttatcgccaacctgaaacggcagggagtggaagtacatttcaagcataaggggcagaccagcgaggtgcagggtgttgtattctccatgaatggctaccatttcaacggctccaaagtggacaggcgtttcagttattccaagattgacgcggctttgcagcacaacagatgcagggaacgtatgggaataacagccggaatatatgaaacggctacaccaagcgcaccgtccggcacggcacaaagcgagttgttcaacggctcttggggattgctaaaaagcagtggctcatcttataacactgctgatgcggaagccaatcaggaaatggtggatatacttcgcagaaggaagaaagttaagcgcaagagaggtgttgggttctaatattctgtactaatccaattctcacgacacttgcgctctatattcattcggagtgtaacctacctctttcttgaacagtcgggtaaaatgttgcgggtactgaaaaccgagattataggcgatttcattaacggtgtcgtctgtagatgcaagttccgtcttggctatttcaatagacttgtcatgaatgaaatgcagggcggttgaacctgtttcttttttcaataaatcactgaaatagttgggcgagaggcagagcttgtctgcacaatactgtacagtgggcaagcctatccgtttagcagccccatcatggaagtattcgtcaagcaaccgctcaaatcttgcgaggatgtctcggttttggttgtcgcgtgtgatgaactgacggtcatagaaacgtgtgcagtaatcaaggaacgtcttgatgctgtctgtgatgaggttcttgctgtgacggtgtatcggatggttcaattcatattgaatcttgtggaagcaatccatgatgatttgccgttcttccacactaaggtgcaatgcctcgtttgtctcgtaggaaaagaacgaatattcacgcattatccgcccgagaggtgtattccgcagcaggtcgggatggaacataagcaggtagccatctggttggaactgcatgccgtcatcttccgcaccgaacacctgtccgggcgcgataaatatcagtgtgcataattattcctaagtctgtgaaaccggaacgcatgaagcagaatctcgacatattagacttcaccctgtcggccgacgacatggcacggataaagacgctggataccgacaagcctttcttactcggctcgcacgaagatccagaaatcgtaaaatggttcatgcagtacaaaaacgcctgaacatcaacaaccatatttcgatagccgctatcgactatattaagaagttattcgtatatgcctttattgtaatccgtcatgtactgagtaaatgttttgcctgtttgctgtttgaagaagcgcatgagatggctcggatcagagaaattgaaatcatccgccatttcactgacagtgcggttggagaatagcaattcgttcttcagttcctcaagcagacgttgttttatcaaatgggtagctgatactccgaattgggcttttactgagttattgagtgtgatgcgactgacatgaagcatgtctgcatattcctgcacccgctggtgggtgcggatattctgttccaacaagtccttgaaccgaaaagcgaaattgtttttagcaatttcagcgggcaagcaataggcggcagcgtatgtacgattgataatcagcaaaagataatatagtaaggaaacaatgatattgtacgtatcggacactggattcatcagctcatacttaatctttccgagcagccgcatatattccttcatttcgtcatgtgtggcattgatgtaaggcggcgtatctgtctggtaacaatacaaaaggcgaaaaacgaagaacttgtcggcgataaaagtacgcatgaaatcttcgcggaatataaggaacgtgtaatccaacgccgtctcatctacatgccactcttgttgctgatggggtgaaagcaggagaaccatgccgtcgcgcagttcaatcttgcggaagttcagtagcaaatatccgtttgccttacggaaaaagtagaagctgaagaagtctgtcttaaaccgcttgttttctgtcagcacaagtccgatgtccttgtttatggcagtattgatgtaaaaatccacgccgcagcgtgtcttgttgaacggtacgctgaccagtcgatcagggttgattatctcgtccatatccttgtcgtttttgcaaagataataatttcatttatcaaaatggcataattaccgttttttcaggcatagatgtttcgccggattcttccgaactttgcacccgtaatcaataacaagacatatagtcatgaaaaagacatctacagtacaattggtgcgcaatgccaccttgaaaatcaggtatgcgggacacaccatgctaattgaccccgttttagccgacaaaggcactttgatatcggccctcggtgtgaataaaacaccgagggtacacctcaccattcctattcaggatattatcggaggcgtggacatggtgctcctgacccacaatcacatcgaccattacgagccgagtgtccccacacatttgcccaaagaaattcctttctacgttcagccccaggacgcggacgccatcagaaacgacggatttacaaatgtgatacccatcgaagaaataaaaacaatagacggcatatccatttaccgcacgaccggacatcatggtttcgggcagatcgggcagatgatgggacctgtatcaggttatgtgctaaaagccgagggcttcccgaccgtttatataatgggtgactgccgatgggaagcatgtatccgagacaccgtggaacggttcaatcctgactatatcgtggtaaactccggaggtgcaatctttcccgaattttccaaaacggacggtcctatcatccccgacgagaacgaagtgatgcagatacttgacgaattgccttcgcatatcaagctgatagccgtacacatggatgccatcgaccattgccagaccacccgtgcaattctgcgcaatgaggcaacgcatcacgaagccgacatgagccggctgattatcccggaggacggagaaacagttgtgttatgagtgtctgcattaaatccctgataaaaaacatgaacatagtggtagggtgcactataggatgcccttactgctatgcccgtaacaactgccgccgtttccacattaccgacgacttttccgtgcctgaatacatggaacgaaaactgcgcatcatcgatacgtcccgtcctcatgtgtggctcatgacaggaatgagcgatttctccgattggaagcctgaatggaacgcagaaattttcgagcggatcagcagcaatccccagcacgcctatatctttctgacgaagcgccctgacaaaatcagtttctcctctgacgacgagaacgtatggatgggcgtgaccgttacgcgcagttccgagaaaaggaggattgatgatttgaaaaagaatatcaaagcacgacactaccatgtcacgtttgaacctctcttcgatgatatcggcgagattgatttcgagggaattgactggattgtcataggcacagagaccggaaaccgaaaaggaaagtcatattcgcgccccgaatgggtgcttagcattgcagaacaggcaaaggctcatggcataccggtgttcatgaaagaggatttgctgccgattatgggcgacgaaagaatgattcaggaattgccggaacaatttaccagacgaatacaatgaatatggatacaataaaggaaatagatgtaaagagtgtaatgaccaaatcctctctgccggtgggaggatattcggtcaacccttatgtagggtgtccccacgcctgcaggtattgctacgcatcgttcatgaaacggttcaccgggcacaccgagccgtggggtacgtttttagatgtaaaaaactggaagccgataacgaatcctcataaatacgacggtgaacgtgttgtaatagggtctgtgacggacggttacaatccgtatgaagaagaattccaccgtacccgaaggctgctcgaagagctgcgaggaagcgatgccgagattatgatatgcacaaagtccgatcttgtccttcgcgatctcgacctgttgaagagttttcccaaagtgactgtgtcatggtctgtcaatacgctcgacgagcagttctgcgcagatatggacaacgccgtaagcattgaacgccgtctgaaagcgatgcgtcagacatacgaggcaggtatccgcaccgtatgcttcgtctcgcccatattccccagaataacagacgtaaaggcaataatagaggaggtaaaagattatgctgatttaatctggcttgaaaacctgaatttacgcgggcagttcaaaggcgggataatgacgtatatccgtgagaagtatcctgacctcataccgctttacgaggaaatttacaataaaaaaaggcttgaatactggcaggcattggagcaggacatttcaaattacgccaaggagcagggcttcccgtatcgtataaacgatctgccatacggacgctcggaaaaaggcaaacctgtcatcgtaaactacttctaccacgaaaaaatacgattgacaaaatgaggctatgccggactgatgcagaaaagttgtagcgcggataaaagcaccatgtatgtggataatatccggcaatcttccgagcgtatgcgggagatgctcaacacgctgctggatttcttccgtctggacaacggcaaggagcaacccaacctttccccttgcaggatttccgcaatcacgcatattcttgaaacggagttcatgcccattgccatgaacaaggggctgactttgatagtggagagccacaccgatgcggtggttttgaccgacaaggaacgtatcctgcaaatcggcaacaacttgttgtcaaacgccatcaagttcacggataacggtagtgtatcattggcagcggattatgataacggtttgctgaaacttatcgttgaagataccggtacgggcatgaccgaagatgagcaacaacgagtattcggtgcatttgaacgtctttcaaatgccgccgcaaaagacggcttcggattaggcttcctgcaaccagccgttatccaacagccgggttaaatgcgtcctccctatctcggccgtcccttgcaggacgacacagcggtctttctcctggagctttcttaattcctccagtgaagccgccattttctccgccattgttgccataaccgtttttatttagattctgattattttcgtgcaaatactcgtttttagacacgtgtaaatactcgtttttaattatgtgcatttactcgtatttgttgcaaaaatacaatatttgttccgataatcagctactaatgaagtctttttttacttgttgtatcgtcgaaacggcctttcccgtgagcttcgccacgttccggatcgagtagcctttctttaacaaggcgatcgcctcccggtattcctctttcctctgttcggccgttttccggcttcccggcttccgtcccagcctgccccctttctggatgtacaactcccgtccgctattaaggcggtcgatgatcccctggcgttcgatcgcggccagttcccccaacagggtagtgatcagagaggacaaggggtttaccgtcttgtccggccgtaacgtttccaggttcaggttttgaatatacacgcatattttatgcgtgtgcagcgtatcgagtgactttaggatctccagggttgaacgccccaggcgtgagatctcggtcagcaacaacatatccacccggttctgcggatctgtgcagtattccaggcaacggcttaaaaccgggcgttcgatattggcctttcgtccgcttatcttttcctcaaagaccgccgtcacctcgtacccccgtccggctgcgaacctctccagatcgacaacctgccgttcggtcgattgcctggccgactgcgagcttacacgtgaataaataaccacattcatcccttttgcttttgttcttccttatctattgttttaatcaccttatccacctctttcaaggaggcattatttccggatctatccaaaaaagaaattcgctaattaacctataattactatctttgcattgtaatgcttggtaaagcctctgttatcaaaacacgtaaccaagtcaaggatatacccgttcatcaagaacgggtttttcttttgcgacagcccattcataagacaaaggatattataacaggtcagtaatcacagccgccggaatatccagctttgagaaagcgaacatctttttccccagatcctttaacgaggctccgatatggtacacgtccgtttcatcaacgatcaggaaacggtcgtgactgtcccggtacgtcctgatgtcgataggtgggtactggctgttatgcctgtcaagatcaagttggagttgctgcgtgatacgctgggtgtaaatggtggccgagacaccgacgctgcgtttactcaacatgagcaagaccgtttcgtccacatagttgtcgataagcacgatcgaacgcctggccgactttaccagatcggtagcgaacttgtacgcatcgaaaatctggccgttataaaaaatgccttcgaccgggggcaaggcagtacgcacaaaaaaatctatcttctcggtatgttgagcgacagtcctttcaagttctgacaaacgtttattaatggaatacccttttaaaagatagtcctttaaaaccttattcgcccattgcctaaataaaatacctcttttactattgacacgaaacccaatggatatgatcgcatccaaattgtaataagtcagattgcgcatcacttgccgtttgccttcctgtcgaactgttcggaaatcccgaacagttgaactttcctctaattctttctgatcatatatgttttttatatgctcgcttatatttgctttgctggattgaaaaagatccacaatttgcgcctgtgtcagccaaacggtttcatcttccagcctcacttccaacctgaccgcttcatccggctggtataatatgatttctccctgttccattacttatttaccttttcttaattcatcaagcctctgcatcgcaccgctgaacttctcactaaacatcatatcatcgggcaaaacaaaccaggtgggaatacctctcgactgtggattacctatacattcatcttgcccgttctgtttgcggtaatcgtcccattcactataagcgatgttccaacgaatacctaatttataggtattttcccatttaataatagccagtgaataggccggatcatctttgccgtcataaatcacttctacaacttcaaccacccctttaggggaatttataaacttcggatttttatacgaataagtgctcatgtcttttattttttattcatagcacacaaagatactcaaaacaaatatatacatatatacatacgtatgattaacgtataaaaacatttatggttattctaatctttgattaattccggtacagaaacaaaacgtaccgaaagacggaaacaggatttatttcggtacgcttccccgatcggtacaaaaaacacgcaaaaaacgaaaatactacttttagtcttttagtatattagtattttgactatatgttgcggacatgacaaccatttaaaaaactgaatttatgagcaaagcaaaagtaatctccgtattgaatcacaaggggggagtaggaaagaccacaaccacgatcaacctgggcggtgcgttacgtcaaaaagggtacaaggttcttttgatcgaccttgacgggcaggccaacctgaccgaatcgctgggcttctctgcggagcttccccaaacgatctacggtgcgatgaaaggcgaatacgacctgccgatctacgagcataaggacggccttagcgtcgttccctcctgcctggatctctcggccgttgaaacggagttaatcaacgaggccggacgggagcttatcttagcccaccttatcaagggccaaaaggagaaattcgattatatcctgatcgactgtcccccctcgctgtcgctgctcacgcttaacgcactgacggcctcggatcggttgattatcccggttcaggctcaattcctggcaatgcgtggaatggccaaacttatgcaggtcgtccacaaggtgcagcaacgtttgaactcggatctttcgatagccggggttctgataacccagtacgacggaagaaagaacctgaacaagagcgtttcggaactggtacaggaaacattccagggcaaagtgttcagcacccatatacgcaacgccattacgctggccgaagccccgacacaagggcaggatatttttcactatgcccccaaatctgccggggcagaggactacgaaaaggtatgtaacgaactgctaacagaaataaagtaaccatatggcaaagaagaacgatttaaaaaacagtatgtcggccgggctgaccgggggattagacagcctgatccaatccacggccgggcaaaaagaggctcaaaagccgaagaaagcgaaaaccgtgcattgtaattttgtcatggacgaaacctatcaccagaacttaaagctgatcgcgatccgcaaaggcgattcgctaaaatcggtattgcaagaggctatatctgactacttggataaaaacagttccctgctataacagcgtatcgggaatatacagggcaaacactccacaaaagaaattctccaggaaaaaggtacgcaaaaagcacccctacacatcaaaaagtatattgaaaatgcgattccctataaagaacccgttggcgggattaatcttgcgtatgtttaacctgccaacgggtacgatattgataaactttttgtttaaggtttaacgtttacgttgctatttgcatcaacccagcctgttgtctctgcatcaaactggatcggattcaacacagcctctccctgatcagtataaccaccaccgaaaatcaacgtgtagatatgacgcttgcccgctacccatgtatctccgaacggaacataaattgttccgtaactatctgctgaacccaacagataacctccggactgctggattttgcaggtgatcgacaggtaacattgatgcgcaccgtcggcttttatcttggtattggtggcttcttcggaaactttccatgctgtcagcttctgtggtatattcagcataggagttttttcggaaatatcggtagctgtggtattactattgacctcgatgaatttgccttgcactacggtaataaaacctcctcctgtagagctttcaggccaatcacccacagcccaacttcccgttccatcggctgtcgcaggcaatgtgtagacgccgcccatttttacattaaaaatcttgatgtcctttatattcacctgcatgttatcgtattcggtctttgctttgaatacgacctgtgacagaatatgcttgaagttaaatttcactactccgttgttcttgtcttttgtctggcctttggctatggcatacatcacgtcgtagttttcatgagcattgataccagatccatactcatcggagcaggaataagttatcttttgagtatccttggtggcttcccacatataactccactgcatggcttcatcaaccgttccgggattgaatgcgtaaaagtccaaagcctcggtaggccaataacgaaggtcgctcgcatttttataatcccacttaccattattgtacacgatattcactccgtcatgtccaaaatccgtgtctacctttcccatgaaggcagtaccatccgccgtaaaagcgaacacgtcgaaatcggtgttcttcaagttggtgttggtagtaggggtagccctcgtttccgccgcattacttaacacgttaaaaccaatcgcattccgtgaggaggtttccacattcgcaatctcctcgtctgagcaacccatgagtagagctccaaagattgcccaaagcattactgtactttttttcataaataaaaataaatcaaattgatacatataattaataaactcatattacaacactatatccatattcacatcatcccaatcatcaacgtccacatcaaatcccgcaccgtcacttcccggctcggatggaacctcataatcaaaattcaacaccagatgcacatcaccgacatgccccactaccgggacatcatgcacttggccgctcacgtcctgttccaatacagacatgctgcctgaacggttcttgagatacaaccggaaaacattgggctctccttcaagtgcggaatgtccaaacgtatagaatccgcctataatctgattccgtgaaaccattccatcaaagagcaggctctccgaaagaccggcgggcaaactgtcggcggacatgttaagcgagccggacatgccggaaagagcggcccgcaaatccgccaccctatccagtccccgaagaccgttcacctcatacgtgtagtgacataccatgtttacgggagtcagccgtactatctccgcgcttcctcccggaatgtccttgaggataacttcgtctatatggtcgccacacagccaaggtggggtgacagccattgtccggttatccggcgactgcacatcacgcgtatcggcagtaaaaagcgtgtaactgccgttttctttccaaaccatcccgtcggtatcgtagttgaagcaaattacccggtaatcattctcgggaagctccacttccccatcctctcctccggggaaatcaaatatccacgtgttgctttcatcgtcggtcggataaaatacgaccctcatgccttcaggcttgtcatgattggaaatcttggtccagtcgaatattacccgcaccgtggcaaagtgcggatgatcgtaacataaatccttatgctcacaagccgtcagtcctatccataaaaatatgaacaccagactaaagcgtatccgtatcactgcctgcctcctttcttccggctataattcccccgcccgatcaaccacaccaaagagatacccgccttggtcgggccgaaccagcggcggtttttagtggtctgccatacatagtgaccgtccaaagggatgtactccttgtacgatcctccaaggtagccgattcccaacgtgaaatccacattgaaccgatgtcccacaggtaacgagtagccgtaagccacgcctcccccgtaactccatttatcccccaagtaacctttcccacccaattcgaaatcataggtgacgatctgcccgtacaatccgacatgatgcccggaaaacggtttttccaccgctctccgaccgaaccagcggcgcaactccacatctcccccatagatacgccaataattatgcttccgatcacttttccaccaggcatacatccaattcccggccacagaccagttcttccccaaacagaactcaaccccgatgtcaggtatcaaaacagcgtcataaagcaagtttgttttcaccgccatgcaaaacggccgtttctttaccggagctatgacggtaacggtatcacggatgcacaacgtatcacgtgtatgtatatataccgtatctctgacgggatttatcggatcactatcatagcatattttcaccatcgacgaacgaagtttcggaaaatggaatttatacaaatatgagtatggcctcccccctttcagtcttttcagttctccccccaaataagggctgtcctggttttccaaacggacgatcttctccaacaaacgaaggacatcctccctctccggaacattcacatccgctctcaccatcgttataagtccgttccagtcgcttcccgaaaaatgaaaatccttctccaataccggaatctttatataaggtgatatataccgccacaaaacctctgctcgtttttcagacagccttccattcaacagcccccctccttccggggaagctcctcctattatttgaattttcctgataagacggacggagtcgttcaatgcggaacagattttagcaaaccgctccatctcgttcccattgtcaagtaaacatgtatctatatttacctttccttgatgaaaatagatccttaccgaatcacgcttctcctgagcggatatttctccgcttatactcaacacgagcacgaacaatacacatttaatataaaaaaaacatcttttcgtcatttaatcatttgttaatatgacaatccaaacccaggcttttacaccccctgaatttcaaccgctaaagatatgcacttataaaccaacctccaaagcaaaaaacaagtattttaaacttataaatacttaaaaagacaaccacacaacagctacaacacttaccacagcagccaatcacgcttacacaacaattaaaaacacttaacatcataaagaaaagtacttaaacatacaaaaaaaaaaaaaaaaaaaacagttatttttgcaggaaacattatacttaataacacttaaaacaataaaacacatgaaaatcagcacaaaagccgcctcttttctaagttcaataaaaactcaaacttacgacaaaaaagaaagagaaatgataataacgtatcaacaaaaacgagtctttcatctatccctgctcatgctggtcttatgcgcacccatatacatatattcagttccatttcccaatgaacagttttattatattaacagcgtattattcctgtttatcattatgtgcactctcgcttattttaaaaagagagtaaatctgaccacgaccttttccattatactgatagccatacatatcgagatttttatcgaaataatttattgctcaatatgtagcggatatgaatatagttatcaaagagcattgataatgagtaacattactatctctctcttatttaccatgctttccatctgtgcctatatgagtaatatctccatcctattgtcctcccttaccatagcttcctatacaatctgcacacttatcaccgacgaaccgttcctatacagttatctgcctttgatcatcatcatatacaccatgatccccttattaggaagatccttacacagtaatatcagcagcttgctaaaaagtagcaacttgctaaaagaggaagaggaaatgcttttgaaacgtctccaaatgaaaaaggaagaactattcgcgttcgccgagttgttaagcgagaataacccggaagaaaagacaagctccctgttaaacataataggggaacaatccaaagaaaatctttttacagcccttgccgcataccagaaaaaggaaaaaagtaaacttgatacaatcaggagaatatatcccaatttatccccgtccgaattaaacatctgccgtttaatactgcaagacaagaccgtcagccaaatatgcgaattattacatcggagtagcggaaacataaccagccaacgagcgaacatacgtgccaaactcggactgaaaaaaagcgacaatttaaaagaagcattacaagaacgcatgaggctgtatgaagaagaagaacaccggcaagaagagttttcagccatgcgttagggattgcagagtaaagcccacagcctttaggcgaggacttgaaacgtaaagcccgaccgtcccacaggaacgcccaaaagaaaaagaatcccccgaacattcatccgggggacatccaagccgtcacatcaattataatacagattcagatcatccgtgccaatctcctttccgtcccggaaaacaaggcgtaaatcaatcctctctctgttttcattgccacaaagatagacataccggccaacatacgcatcatacttatcaatcagttctaacggtatgaccggcatgggaaaaggatacacctatattgcatatagcggaaaatttgtaagattaccctgtactttataaggcaacatagaaaatctctccgcatgcaattccggtctttttcccagtaatgctgtcaacgaattggcccggacattcccttcggccttcacttctatcggcaccatttgggcattacgttgaataacaaaatccaactcaagacgcgaattgtctgtgttatggtaataaatcggtgacacgcccttacttttcatctgctgcaatacatactgttcagtcattcctcccttgtattccttaaatatgtcgtttttaatcaagacttgggccggatctgtcttgaccatagcacccataagccccaaatcaaccatatagagtttgaaagccgacaggtcttcataaatatcaagcggaagctccggtttggtacatcgaggcactttatacaacaacccggcatttacaagccattgaatggccatctcaaaatcattggctctggcaccttttcgcaaagctccgtaaatgaatttcttgttttctttaaataattgggaaggaatgctgttccataccattcggacacgcggaacctgttctttgggcgcatgttttgagaagtcaagatcatagccttgcaaaatctccgactgtattcttctgacttccagcaaggaatccgtttctacatatttgagtacaacttccggcataccacctacataataatattgccgaaggagatccgtatatttgtcatgcaggaggcttatcgtttcaaaatccccactcataagcaatttacaagcttcttcttctcccttggcgacaagaaactcttcaaagttcataggaaatatattgatgacatttaccttccctacgggataagacacatcctgatgaagggatatccccaaaagtgaacctgccacagctatatgatactccggaacctcctctttaaaatacttcaaagattccagtgcttccgggatatcttgtatctcatcaaggataataagcgtatcacccggagtaatgtcaacggaagtcatcgcacgcagcccccgtaaaattctgtcaacattgaaatcctgagaaaaaagctggcgtgcaaggttattcttacggcataccacataagcctcttttttgtattcaagtttggcaaactcatggagcagccatgttttcccaacttgtcgggcaccatttaaaatcagaggttttctatcctcacggtttttccattctataagttgttgcaaaacaaatcttttcatctacaaacagcatttttatacatgtaaaaacagcgtataatacatttatccgcacttatttaaagcacaaatatactaaaataaacagataatagaagcaatcttatacatttttccgcactttaatcaactccaatggaaagcagtagccaatttaggattgccttctccacgctcgatggccaccagcgtattgatgcccacgcccgccagttcggagaagttccagctgattgaccttcaaactcttcctgcactctttaatcatctttcctagctctttcatattcacaacacattgtgattttagtcagttttcatcctagttcaaagaaaaaaacagccgataaagcaactataatcattgtattcatatagattaacatcatatattcaagttaatctatatatttacatggattatttgtatatttgcaaaaaaggaacaaccatgtggaatgaaatgagcaatccagctgtgctgatgagaatcggccagcgcatcaaagagacacgtatcaggcagcatatcacgcaggaagaactggcaacggcttccggtgtaagccccttgaccgttgcgaacatcgagaagggcaaatcggtatcgctgctgttgttcatcagcgtactccgctcgctcggcctgctggagaacctggagcaactggtaccggaaatccgggtcagcccgatagagctcaaaaaactgcaaggaaagaaacgctaccgtgtacgccatttaaaacaagataaccatgaatgatttgatagtagatgtaaagctatggggagaaagcgtaggctctctctattgggaaaaggaaagcaatgccgccttgttcgactatgaacggaagttcatccgctccggtcttgacatttctcccatcatcatgcccatcagccagtacaggaacaccccctaccggttccttgaaaaccgtaccgactgtttcaaggggttgcccggcctgtttgccgattcactgccggacactttcggaaaccagatcatcaatgaatggtttgccagcaagggattgtccggagaagagattacccctttagacaggctttgctatgtaggcaaacgtggcatgggcgcactggagtttgagccgtcctcgccaatcaacggcatgaacgaatcatcagtgctccatatcgaggaactgactgagcttgccaaatccgtattcacggacagaatggcttttcaggtccaactgcgccaggaaggaagaaacattctggatatactgaaagtgggaacatctgccggaggtgccaagcccaaggccatcatcgcctacaacgatattaccggagaggtacgctccggacaggtaaaagctcctgaaggattcgggtattggctgttgaaatttgatggcggcaaatacagcgaacacacgcagataacggacaatccacaaggaataggaaatatcgaatatgcctatcaccggatggcaaaagcctgcggtatcgatatgatggaatgccggttacttcaggaaaaagagtcatatcactttatgacacgacgttttgaccgtatggaagacggagagaagatccatgtacagacattggccgggcttgcccactatgaccgtgaccaacgccattcatacgaagagatattccgtatcatgcggcagatgaacctcccttatccagagcaggaggaactataccgaagaatggtgttcaacgtcatgagccggaaccatgacgaccatagcaagaacttatctttcctgatggatagacaagggaagtggaaactggccccagcatacgacctctgctactcatacacaccgggcggcaaatggacgaaccgccaccagctgtcactcaacggcaaacaagacaatttcacgatggaagatctgcaaaaggtaggtgagaacatgggtatccggaaacacaaacagattatcgaagagatacaggaaaccgtatcgcattggcatgagactgccaaggattgcggggtcaagccggaacacgccgattttatcggagaaaacctgctcttgttcggcaagcaactgcatacgatccatatgccggacattgccaacgaacaagagcaggctttcatgaaggctatgcgaaatgatgacttcaataccattctgaaactgaagatgagaggatatcagccatcggagaacacactgaaaagcctccagccggatgtatccgccaccaccttcatcgctgccgccaaaatcttccaaatggaagggatgctaaaaagccttcaggacataaaacccgcgcaaagcccgattacaggcggcaataaacgtagcatggaattgggggattagcacacaaactacatcgcgcacaattcaatataacagtaaatatattaattgttatatatcatattttgatttaacaattaatatatttacctttgtaaaatgacaacgaatcacatcacccaagccatggccaatccggaaatcatagtggaactgggcagacgatttaaggaatacaggctaacctataggctcacccaaaaagaggctgccgagaaagccggtgtcagccttatcaccttacgccagtttgagaacgggaaggcctataacatcaatatgggcaactttcttgccctgttacgagtagtggactgtctggaacagatggatgatctgatgccggaaatacctgtttcagcctatacaatggaacgaataatgaataaaaagccgaaaaggataagacatggaaaataatgttgtgagtgttatgttatggggagaagaagtcggaaagctctattgggacgaaagaaacaaaagagccgtcttcaactatcatccggatttcatcaagaaaggagtggaaatcgccccactgaccgcttctgtcaaaggaccggcggcaaagggtatgcccatactcggaaacaaagaaaagacttatcaaggtctcccaccgtttttggcagattcattgcctgatcggtggggtaacatggtcttcgaccaatgggcggcacaaaaccatatccccaagcgcaaactcacaccggtagataaactgtctttcatcgggaaacggggaatgggagcctttgagttcatcccggccactcctggattggaatcctcttccactctccagatagagagtttataccaactggcacgccgtatctttgaggaacgggaggaaatatccgtgcaagatgacgaagcactgcaactgcaaagtatctatgagataggtacatcagccggagggcagcacccgaaagccatcatcgccatcaatgaaacgacacatgatatacgttccggccaagtccctttaccggagggctatacctactacatattgaagtttgcagaaggggacgattttccgttcacgcaaatggaaatggtatattatgagatggcaaaggaagccgggattacgatgatgccttcccgactcattcaaattgagggaaaacatcacttcctgacggagcgttacgataggataaacggagagaagatacatacacagacacttgctgccatgaatccggatgcaacgagctatgaggatttgtttgaagtctgccgaaaactgaacatcccggcaagcgaacagtccgaactctaccgtaggacggtattcaatatcatgggcggcaatgtggatgaccacatcaagaatttctctttcctgatggaaagaaacggcacatggcacatcaccccagcctacgacatgacattcaccaccaatttggacggtgcggcatacgaaaacgcacactccatgagcattgcaggaaaagataacgacatcacggaagatgacctgatgcaatttgccaaacagaacggaataaagaatgcgaaaaggataatcgaagaagtcagccttgccatcagccatttttacgattatgccaccaatcatcaaatcgatgactattggaaagaccgcatcgaagagcatctttccggtttggtatctccgatcatagggaaaaccatgaaacactacctgcccaccattgtcgaaccctacgagacagaggatggctttttggtatcagaaatcaacatcatcgaaaacacccggcatgatttccgtatcgaggccttcataaacggaaagcgacagaaatacattgccgggcgtaaaagcgatttggctgctgaagtcattgccaaaggcagaaacaagatgcccgttgagaacaagaaagaacttgtggaacggttgttactgcctttagctagaagataaaaacagacgaatagcgacactattacattaataaaaagtctgttcttgttcggcaagcaactgcatacgatccaaatccggacattgccaacgaacaagaggaggctttcatgaaggctatgcgaaatgatgacttttcaataccattctggaactgaagatgagaggatatcagccatcggagaacacactgaaaagcctccagccggatatatcctccaccaccttcatcgctgctgtcaaaatcttccaaatggaaggggtactaaaaagccttcaggacataaagtctgcgcaaagcccgattacaagcggtaataaacgtaacatggagcaaacaaatttactattcaattttcagtttttttctatttctatactactgtacgccataaaataacgaagaaacttattcctatatcaattcataatcaataacatacaattcaccaagaatattagggaatgctacagtatcatatatcacctgccctactccattaaaattacccggagatattacagatgctacaacaccatgataagctgtgggagaaaaagaaagatctgctaatccatttatcccaataacatttttctgtacaccagcattattaacattacaaaaaattgcataatgaatagtttgatgtaaatttacagcagcattaggaagatgcacaaaatataatatatctccattattacatttagctaaatcatgataggtatttattttttgtatcatactttctaaagaagctccaaaaggattaactgaaattctttttcctgttgcctgttctataattcctctaactaaattagcacaccctccaccatttgtaggtaaattaacattcaaattctgagtattagtaataaattgtgtaatcaattgtctatcatttatacttatagccatatattataactcatgttctcctactctctcaaaggcttttcggaacctgcctataaaaactgtctctgtaagcttaccccacaaatctaccctataatccccaaaccgctatcatcccttttctgaatgccatggaattttttccgaatacataagttagaagatgaaaaaagattgtattcaaagtttttggttcttttttgaaaaaagaaccgctggccaaaaatccaacggttactttactttcggaaaaatatgcaatgaagtttataggccgaatgaggaacgcagcttcttcatggcattctccacatcaaagaaagacacatccataagatcttctccccatgcttccggaaagtcaagaatggaacgtccgttattaagaaccgcatcacggatggctttcatcacattctgccgagtcggttccagcttgaagaaaaggcaatgcctgactgccattgtaagggtatcatcatctataaagaaacggatggtgacggtcatgtgtacctgcgtccgtttctccagtttcttctttttagtttccagtttggccaaccgggaaacatagaatgaagggatatgtttcccggattcaacgcaagtcttcatcgcttcatgtatttcagcgatgccgtcacgtatatccgtcaagtcggtgcagttggatgcaaccgtataagccgataactttttcatctcaaaagccgtttttatatggcaaaagccctgtttgtgaaacttataatatatgaatctccttatcacctaccttctcgtccgatacgaccaatacctcgtacttcatcctcttgtaattatagactacggcaagcgtattaaagccaccgttatcataccgcctgtcataaacggtatgtacatactcatacatcgcattccccatcatgaactttacggaaacatccgtaaagtaaaatgccaccgcataagccagcgttttctttttatcaaccttttttgttttcataaccatttgtcctttattgttttctgataaaatattcaatggccgaatgaaccaatatataatgtgtgggtgtctgcctgcactgttccgcataaggattatagaactggagagccagcgcatggtataattccggcaattcccgcttgattctcgccgtaagcagccgataggagcattttctaccgtacttcatcagctcacgccatttgtcctgtgttatttccgtgcaattcgtctcgtaaaccataacttccgtttttaagttcaatattccggttggaaagcggaaaggggttgttccctctccgtttattctctaatcaattcaggcaagcttttaccgttataccggttttcagtcctttatccagctgcacggtcaacccacgaacattcacctcttgaatttgagaaagaagcacataaccccattcccattcttgaatatggcaataaccgaaaaaaagccagtcaccgtcttcctgctgttcggcttccgttaccaaccataccaccgaagaaaaaggaaggaaaaaccttgcgatgacttccgcattaagcccctgcccctcttttgagtacaaagggttggcttcaaacacattctttagttgttccgtcactgtaatcatatgtcacatttttaaagggttaaacttctaattttatgcttcagctagatttaaagacctttttttaaaacccctttccgggatgaccttttctttctgccgactttttttttgagctttcatgccccatctgagtttataagccttttttttacggcacacaacaagaaggaaggagggattgagaaaagttttggacgacaaaaaatgttggggacagcgaagccgtccggcgttatttttttcggtacaaagggcgaagaccggaactctttcgtatccatccaccgaaataaatttgccgttcaaaaacaaaggctctcagacggggctatgaaaaaacgtacattaggggaggcagaaaacaaggaaaagggcagtacggaaataaaagaagaataaaatccaacattattcacattgatatataatagccaagtatttcgccatatcaatataaatccaactataatcaaaatcaaacagttatctaatttattggttattaaacatataatacgccaaaacatttattttggagaatataatattaattaaacaaaaaaatggcatcattaaaaataaagtatcgacattcctctatagaaggaaaagcgggaacattgttctatcaagtaattcataatcgtgtagcaaggcagataaattcaggatacaagatttatcctgacgagtgggatattttcaattcccaaataatcataccagcaaagacaggagaaaaccggcatcggtatttggtttctttaaaaaaatgtattgaggaagacacctcacgtctaaaagatattatgataagatttgagaatcttggatacaaatatacggcagacgaaatcattgaatattattccgctcctcctgtgaacgagtactttgtgtcattttgtgagaatctcattgaagaattgagacaaataggtaaaatacgcaccacagaaacttataccactacgctcaatagcttcaagcgattcatgaatttcagaaagaaaggcagagacatccctttcgacaatatagactccaacctgatgatggaatatgaacaatatctaaaatctaatgacatttgtccgaacagtacttcctattacatgagaaacctcagagccatgtataatcgtgccgtagaaaaagaattggttatacagcgatatccgtttaaacatgtatatacgggcatagataaaactgtaaaacgggcagttccggccaaaattatccgacagatacgcgatatggatttaagtcacgactcctctttggaatatgcaagagacctatttatgttcagtttttatacccgagggatgtcatttatagacatggcttatctaaagaaaagtaatttgcaaaacggttttttatcatatcgcagaaaaaagaccaaccaacagctagtaatcaaatgggaaaagcccatgcaagaaatcatagataaatacgataccataggttcttcttatctattgccgatcattctcgacgcaaaaacggatgaacggaaacaatacaagaatgcagcccagctggtgaattcaaaactaaagaaattgggaaaacaaatcggccttcctattccgctgacgagttatgtggcacgtcacgcctgggcttctatcgccagaagcaaaaacattccgttggctaccatcagcgaagctatgggacatgattcagaaagcactacacggatttatcttgcatcgttagacacctccgtagtggataaagcgaacagtattattttaaatacactttaattcacattataaaacagtttacgccataggtttcagcatacgtgcccaatcggcccgctgttattctatggcaattattatttttatttatctgacaaaaaataagttggaattatgttatacaaattgaagttttctttctgagagaaagatttgtaaatgcaaaagtacaaaagataacacaaaaaacactaaaaatcagaagaaaaatattagtcataccataaaaaataagaggtatgattagaaaaaactgattatttgttgagcaaattgattataccaatcttataaatatttgatatacatcaaaataccaatcaccccatttctctcagaaagagaaacaccgaaaataggagaaatttcctatacgaatgccataggaatataatgaacaagtatataccctatactttcagttgtatgacaagatggattcagaaaggaaaaagccccgtgaaagtacaaaattcttgcttgaaaaagattgaataaatgacggttttctccataagagaaatgttttgaatatgcaaaaatacataaattattgaacataatagcataaaacaaagaaaaaccttaatagccacctcgttaaatgtcgtggttacataacaaatgttgagtaaactagattgtatttacagcgaataatccctgtaaatcaattatatatgttaaatatttatgtcctctatttctcttatggagaaaaataggaatgcggcaagataaaagacggcatgaatggttgatatgacagccaaaaaagacataaattactataatacagaccaatacataagttggaatgaactatgggtatatcttgacctgccgtaataactaaaaaacacacgacgaatgagtactcccataaccacaagggaagatctaactagaatccaatggttcgccatgagcgcttataaaaacgagaaaaaggcggaagagatgctcaaaggcaaggatggtctagagtatttcataccgaaacactatgccgtaagggtctatcacggagtgaaatccaaaaggcttgtaccagtcatcccgaatctcgtcttcgtgcatgcttcccgaaaacagatcacggatttcaaaaaaaaatataatttcttacaattcatgatgtgggagaaaagcacgggactgaaatatatcgtggtgccggataagcaaatggagagctttatcaagattgcctcgcagtatgaagaaaacactatttattataaaccggaagagattgacatacggaaaggtacccacatatgtatttacggtggcaagttcaatggagtaaagggcgtattcatgcgggtgaaaggaaaacgtcgccgccgggtggttgtgatgcttgaagggattatgggtatatcggtagaagttcatcccgatttgattgaagtcatcaatgattccgattgtgacaaattttgagagatgacacaaaaaggagatgatgaagttccccttcctcgtggccttacacaaataaaataatatttgaatatatgtatttttggattgtaaattgttcactggcatttttgctttgtgttctctgtgcgggtatcgtcattccccagattctgctaatcgctttccgtaagaaattgttcgactttcccgatgagcggaaggtacatcattgtgcggtgccccgattgggtggtatcgcattcaagccggtagtgtttttcaccatagccctgttgctaggaatcaatatggtgctgggacattcggagatattgtccgaaatcgggaacgacgtgtgctctttggcttttgctttctgctccatcatggtactatatctggttggcatggccgatgacctgatcggtatccgttatcgtgccaagtttgtcatccagattctgtgcggcgtgatgcttattgccggtggggtatatatcaacaacctatacggtgttctgggcatccatgcggtgccgttatggttaggatatcccctgaccatcctgatcgtggtcttcatcatcaatgccatcaacctgattgacggcattgacgggctggcttccgggctatgcagtatcgcctgcctattttatggactgactttctttatgctccatcagtatgtttatgccatgctggcgtttgccacattgggagtgttggtaccattcttctattacaatgttttcgggaacgccaaacacggaaggaagatcttcatgggcgacacaggcagtttgaccatcggcatgatgctctgtttcctcagtctcaaactgaccatgtgcggactagacgataatacaggaaatgtacatccgatggtgctggccttctcacccttgctggttccatgctgtgacgtggtcagggtttacctgcatcgggtacgcaacggaaagaacccgttcctgccggacaagaaccatatccaccataagctgcttgctctcggaataaagcagcgcaataccatgatcatcattgtttccgtgtcaactatattcatactgctcaatattcttctgtccctttatctcaatgtgaactggatcgttttgggtgatatattgatatggactctcgccaacatcaggctgacaaaatctatcgcacaacttcaatcggaacagaaaaccaacaaataaaaatcaataaatatgaaaatcagatacattttatccttattaaccgtggcctttctattgggatcatgtgccacaccgaaagtcgcttatttcacggacctgaaacggggtaccgcagagcaagtcttgaacccgctggaaatccggatacgtccagaagacaagatttccatacaggtcaacagcaaagaccccttattaatgaaccttttcaaccttccgatcatatcccgacagattggtacgacatcaggtacatccaatagtcagggaatatcaggatatacaataaataaggatggggatattgattttcctgtgctgggacatatccatgtggcaggaatgacacgcgcggagatcgcctcgtatataaaagaggaattggtttcaaagaatctcgtgaaagaccccgttgttacagtggagtttatgaacctgaccgtttcagtgttgggcgaggttgccacccccggacgtttcaatatcgaaaaggacaagctgacacttttggaggccttaagcatggccggggaccttaccgtctatgggaaacgggaaaacgtgctggtacaacgggaggaaaacgggaaaaaaaccctgtatcaggtcaacctgaattcgggatatgacctttatgcctctcctgtgtattatttgcagcagaacgatatcgtttatgtggaacccaactcaatgaaagcacggcaggcgaccgtcaacggcaataacgtccgctcagcctctttctggatgtcattggcctcgttgctgacgaccattaccgtgttgattgtaaaataatatagaatcagatatgatgaccgtaaatcaaaagaatataaaaccggggcagcaggatgatttcctgcgaatacaggacctgttatacctgtgcctcgcaagatggaagtggttcgtcttgtctttagcggtaacgatcggtgccgctactgcctatctgttacgcactcctgccgtatatacacgtaccgcttcggtattgatcaaagaggattccaaaggcaagtcggtctcctcggatttggaatccttctcggagttcgggctgtttcaatccggtacaaatgtgaataacgaactcatcacctttcgatcaccgtctttaatgaccgaagtggttaaacggttgcgtctggatatgaattacttcgttcggggaaaattccaccgtcaggtagcctatggactgacattaccggtggatgtaacgataaatgacttgcctgagaatgaatcagccggttttacgttggaaatacagccggacggtacgttatacctatccgactttatacgtaacgggacagatcttgaagaaaaggacgtaaagggaagcttgctcgactccatcactacgccattgggaaaaatcattatccatacaacacccaattacgtgaaaggcgaggcatatacattatatgtaggcaaatccagtctgtataacgccgtcaactcctgctcgtccaatctgtccgtttcattgaacagcgagaaagcgtcagtcatagacttgtcattcaaggataactccacacagcgggcagaagatgtattgagcatgttgatttccgtttataacgagaattgggtgaaggacaaaaaccagatcgctgtcagcacctcaatgttcatcaacgagcgtctgggcgtaatcgaacgggaactgggaaatgtggacgaggatatctcctcttacaagtcagaacatctgttgcccgacgtgcaggcggcatcgagtatgtatatggctcaaagcagtgcggccaacgcgcagatcctgtccctgaacaaccagctttatatgacccgttacatccggaactatttagccaacgatgccaaccgtacccaactgcttccggccaactccggcattgaaagcgccaatattgaatcgcagattgccgaatacaacaagcaactgttgcagcgcaacagtctggttgcgaacagcagcacggaaaatccgctggtcgtggatatggatcaggctctggcatccatgcgtggggcgataatcagatctatcgacaatcagatagtgaccttgaattcgcagataaaaagtttgcggcagacggagcaacagacgacatcacgtatagcggccaacccaacacaggccaagtacctgctttcggtggagcgccaacagaaggtaaaggaagctctttacctattcctgttgcaaaagcgtgaagagaacgaactctcacaggcgttcacggcttataatacccgcattgttaccccgccacacggcagcatgttgccgacatcccctgtgcataaaaatatctttatggtcgcattcgctctggggctgctcattccgatagtcattatcttcatgcgcgagaatatgaatacccgtgtacggggaaggaaagacctggaaaacctgactataccgttcatcggtgaaattccgctgttcacaagaaagaaaaaagggatattaggaaagaaaccgcaggaagtcaaggccgttatcgtcaaggagggcaaccgtgacatcatcaacgaggcattccgcgtattgcgtaccaacctggaatttatgaccggcaaggacaagacttcgaatgtcatcatcatgacctcattcaatccgggcagcggcaaatcgtttctgaccatgaacatcgccgtgagccttgccatcaaaggaaaaaaagtgctggtaatcgacggagacctgcgccacgcctctgcatcatcctatatcgactctcctgacaagggattgagcgactatctgggaggtcgtatcgataatctggatgagatcatcgtacccgatccgaaacataaatctatggatatactacccgtgggaacgattcctcctaacccaacggaattattgttcgacgagcggttaaagcagacaatcgatactgtaagggagcaatatgactatgtgctgatcgactgtccgcccgttgaactggtggccgacacgcaaattattgagaaactggccgaccgtaccgttttcgtagttcgtgcaggattacttgaacggagtatgcttgctgaattggagaaaatctacgaggagaaaaaatacaagaacatgtccctgatcttgaacgggaccgagggaagtggcggtcgctatggataccgttatggctatcgatatggttatcactacggttacggctcaggataccactaaggttccgacggaaaacagggtggggataaatggatgattattaattaaaaaaaataaaatgttttatataaaaatactcgtatcattgtgtggccattcaggaaacgtatatcgctgaaagatagcggtatattcaagaattttaccgactgtcactcgcacattctgccgggtgtggacgacggtgtgcagacgatggaagaagcattggaaatactgcgcctgtatgaagagttgggcataaaatccgtatggcttacaccgcatatcatggaagatatgcccaacaccacactgcacctccgggagcgttacgctgaacttcaagccacctatagcggtccgataaaactgcatctggcctcagagaacatgcttgacaacctcttcgaggaacggttggaaaagaacgatctgctgcccttgggtgaaagcggtgaccatctactggtggaaacctcctactttaaccctccgatgggattgaacaacattctgctccgcatcaaggctaaaggctattatcccattcttgcccatccggaacggtatgtttatatgggtgagtcggattatcaacaattaaaagacatgggagtgaagtttcagttcaatcttccgtcaatagcgggtatgtatggcaaccggattaagaaaaaagccatgctgctattaaaagaaaaggctattactcatataggaacggacattcacaattacaatatatttcaaaagttcatttgtacgagtattacaaaaaatatacaaaactgtttaattgatagtcagactgttatagtttaaatagattataattatcggttattaagacctgtagattctgtttaactttttctctctaggtggatttgcataaaatacatacaaaaaaatccaacaggctggaattcaatggaaattgtaacaatcgacttggagcagatacacacaatctctcttttatccaaaccagtcttaaaataaatcattacacccctatcaagcaataggcttgcaacttcaacataaaacaacaatccatatgtcattaacaaaagttttagttactggtggagcgggattcatcggctccaatttatgtgagtatttattggctcacgactatgatgtaatctgtttggataatttttccacaggtaaacctgaaaacatttttccatttctacaacgatatccgaataagtttaaacttatcgtaggagatatacggaatctgaacgattgtaagaaagctgtagaaaatgtagattacgttatgcatgaaggagcattaggctcagttccacgttctatcaaagatcctataactacaaatgaaactaatatatcgggattcttaaatatgctgacagccgctcgcgatgccaatgtaaagcgttttatatatgcagcaagttcttctacatatggagacagtcagtctcttcccaaagtagaagatgtgattggtaaaccgctttcgccttatgccataacaaagtatgtaaacgagctttacgccgatgtgtttgccaaaacctatggaatggaatgtatcggcttacgatatttcaatgttttcggtcgtcgtcaagatccattcggggcatatgctgcggtgattcctttgttcgttaagaaattcatggctcatgagagtcctgtcattaacggagatggtgaatatagccgcgattttacttatatagacaatgtgattcaaatgaacatgctggctatgaccacgacaaatccgaatgcaaccaaccaagtatacaatactgctttcggagaacgcaccacattaaaccagttggtcggttacttgaaagaatttttgagtgaatttgaccccgaaattgccaacgtgaaaataattcatggtcccaaccgcttgggggatattccccattccttggcatgtattgataaagcaaaatcccttttaggttacaatcctcaatacagtatgcgtgacggtttgaaagaggctgtcaaatggtattggaagaatatttaaagtaataataacagatgaaattatgaatgaaactaaaatttgcgtaattggtcttggttacgtagggctccctttggctcgtcttttctcgacaaagtataaaacgataggttttgacatgaaccaagctcgtgtgactgctttgatggcaggtcatgatgcgacactcgaagtgtcagatgaactactccaatctgcccttgccaatggttttaagtgtactgccaatatagaggaaatccgtgattacaatttttatgtagttgccgttcccactccggtagacaaaaacaacaatccggatttgactccgctttacggtgccagcacaactgttggtaaggtaatctccaaaggggatattgtggtgtatgaatctactgtttatccaggtgttacagaagacgaatgtatcccggttgtggaaaaagtgtccggattgaaatttaatgaagatttctttgctggctatagccctgaacgtataaatccgggagataaacttcatacagtagaaaaaatcaaaaaggttacttccggttctacgcctgaaataggtaagaaagtaaatgaggtatatgcttctgtaattaccgccggtacacatctcgctcctacgatgaaagtagcggaagcagccaaagtaatagaaaactcacagcgtgatatcaatatcgcatttgtgaatgagctatccaagatatttactaaaatgggcattgatacacaggatgtactggaagcagcttctaccaaatggaatttcctgccatttaagcctgggctggttggaggccattgcattggagttgatccgtattatttggctcaatgtgcacaacgtcacggttataatcctgagataatcttagccggtcgccgaatgaacgacggtatgggggaatatgtggccaaccaagttgcgaaattgatgctgaagaaaggaatacaggtgctcaactctcatatcctcatattagggtttacttttaaagaaaactgtcctgatgtgcggaacacaaaggttatagatatttacaatgctttgcgagagtataacgtacatatcaccgtatatgatccttgggccaatcctgatatagttatgcgagaatatggaatctcggtaacgaaccaacatcctttggataagaaattcgatgcggcaattatagctgtagcacacgaacagtttataggctttgatgtaaaaacgttactaaatgctcaacacgtcatattcgatgttaaagctatctttgaaaaaaacgttgtagatggtagactctaatcggattgtctcctttgacatattgaaagggggaggaattttattggtcatccttggtcatatacaaatcccttacatgttgaaaaccgttatttacagttttcacatgccccttttcttttttgtgtcaggctgtttctttcgtccaatcagtttgagagagttttttgcaaaaaagaccagacaattactgattccttgggccttttttgcctttttgttgttcgcatatttgttcgttttgaaacttaacgaaactcataattgggcaaaagcgatctcgctccctgtaacgagtatgtttgatggttttctcggtgatgaaaactcttttattttatttcatgtaatttggtttttaatttgtttgttcgaggtttcattcgtttatttattgatacataaaatcacccctacaataaagcattaacaatcagcgcattatgtatattattatatggagtaggatattggttaaatgctaataacattgatttgccatattttattgacacaacaatgtctaccttgatttattaccatcttggtttttgcttcatgcggaacaaatggtacggcatgaaggtttcaccgatatactcattattcttgcttattatcgccattgttttcatcgttctatttccctcttacgttgacttaaaatcaaacaattttccattgcatctattgttgctttcaatggtttttattatgaatttttataggtttatcaattcatattttaattcgagaaagctgaaacttattccattggataaaatattgatttggtgtggaattaacagtttggcattattggggctacatatattatttgtagatacattctggatcgtgcgcaataagttacatcttgtaaactacagttggaccatattggaatttgcactcattgttgcaatatgctattttgcgacaaccttaataaaaagatacattccgtctgtattaggaagatcataagcttgctatgaataagacatcgtccgtaaataataaaaaaatattcaagaatacagtggcactttatgcacgtatgttgctgtccatgattgtatcactatatacatcacggatcgtgttaaatgcacttggtgtagatgattatggcatttatggacttgtcggcggtattgttgtcctatttagctttttgaatgtaacgatgagtggagcgacttcacgctttcttacagtcgaacttgccaaaaatgaccctcgacaactccaacaaacattcaatacagcctttatattacatataggaattgcaattatagtcttgtttttggctgaaacggtcggactttggctgttattcgaaaaattgaacattccagatgagagaatgagtgcagctgtttgggtgtatcaattttcaataatttcctcaatggtcagcatcactcaagttccatacaatgcgactcttatttcgcacgaaaaaatggacgtgtatgctattgtggaaattgttggatcactgttgaagttgctgatcgctacacttctacttattacagtatgtgataagctcattttatatggaggacttatgctcttatcttcattcttgattgcaatgacatatcgcatttattgcattaggcattatgacgaatgccggattaattgggaatggaataaggttatcggccgttctctgtttagcttttcaggatggaatctttattccaatatttgctttactactcgtcaacagggaacaaatatgttgcttaatatatttggcagtacagctgttaatgccgcagccggattggcaacaactgtgcaactgatgattgaacaagtatcaaccaatttggtaatggcttcgaggccgcaaattataaagcaatacgcattgaccgatttcaatgccatgatacaattactaaagcaaactacttgtttggcaaatgtgttatatctgttggttgctattccttttatctctgaaatacattatgtaatgaatttatggctcgtggaagttcctccatatacaattgaattctgtattttattgatagtctcaagcttcatatcattgaataataatattatatatattggaatacaagctgtcggacgtttgaaattttattcatttatggcggggacagtatcattatcagtcattccgatactttggttattgtttagtaaaggtatcggcttgacttgggcttttggattgcctatagtgagcacattattgatttatatcgtttgctcatatacactccatcattatgttgaagatttcaaaccgatacgttttttcttcacaacgatggtagtgaatcttttcataagtattccttcttttaccgcaatcctactcatacaacatatcttggttgagtcctttacaagagtgattatcgtggctcttagttcttcaataatattggttgttctgtcctattatgtgctattagacaaagaaaataagaaaaaagtaaaagcattgattttaaacaaattaaaacgatgaataaaaacatacttataattactcctttttttccgccacagactcatgctgcggtatttagggcatttaaacttgtaaaatatcttaaacgtacaggttggaatccgatagtactgacggttaatcgtaattatctatatttagaagatcctgatttgttggacgaagtccaagacgtgcctatttatcaagccaattatatagaaccgacattgcgcggccttagaatgttgcttggaggagaagatacttcactcaaagccattacagccaaagcaaaaactattggtgcacagtcaaaaagcacggatacagtcacctctaacaagcaatctttattcggtaagttttataaatatatactagaccgatggattcaagttcccgaccgctttagattctgggaaagaagtgccgtgaggatgggacgaaaaataattaaagaacatgatatatctatcatatataccacttgcctgccttttacctcaaatagaatcggtatgcgacttaaacatctaaccggagtaaaatgggttgctgatttcagggatcctaccacatacgctaagcgaatgtattctgattattttcctgtttttgccaagcaaaagaaaattgaacaagatacttttaaatacgctgatgctattactggtctgtcgggagcatacctgaatatatttaatgatttatatgagggacgatactcaaataaatcatattttattccaactggagtagatgatgattatttgccttcttttcaaaatagagaaaaagagaattatataatattcgtgggtgaatacctccatgaatataaagataatttcttgaaaatatttgccgaagctgtcaattctaaggaattaaaaggcaagggttgcacccttaaaattgtgggtaataagaatatcaatcaaaaacaaacggaagaatttgtcaatgatttgggaatctgtaacaacgtggaatatatcaatcatgtaccgcagcgtaaattgtatgaattgatagttaatgcaaaagcagcagtacttattcccggacacacggctttatggtggactaatttcgcaaaaatggtcgattatatcgcattacaagtgcctgtattagcaatggtgcccatgactagcgaagcacgaaccgaattgataaaagcaggcataggtatttttatagatactcctcagcaaggtgttactgtcatcaaacaagtatttagcgaaaaatttccaatgacggcaaacaaagaatattgccgccgttacttggcatcgcaacaaacaaaatctttcattgatattttccaaaaaatacaatagagatgcatatagcgtttttaactacagaatatccgatattgggtatgaaatgtggcggaatcggaatttttatcaaacatttgtctcatcttatcgttaagagtgagactggtgtgaaggtatcagttgtgtattggggcaataagtttacagaaactgtgtgggacgatggtatatctgtgatacctataaaccagcctcataagtctccattttcttcttttatcaatagaaggtatctaaataaaaagttaaatctattagtggcaaagattggcatcgacctcgttgaatctatcgactgggagggacctttggctttttgtagtttatctgtaccagtagttacaagattacatggttcaaatgtgtatttcgatcatttgtctggaaacaaaactccatggaacgtacggcttatggaatataatgctttgcgtaattctgatgcctatataggagttagccgacaggctctcgacctgacggataaattattcagtctgtcttcgaataagagaaaatgtgtaatatataatcctgtggatataaacatgccccctctttcatctagtgacatgaacaaaaatacaataacgatactttattgggggacaattgttgagaaaaagggggtacttgatttgcctcttattttcaacaggatatgcgagcaaaacgacaatgtcaaactcattctcatcggacaggatgcagtagtgaatggttcttcgacatgggaaaaatgcaaatctctcttttcaaagcaatcgatcggttgtgtatcgtatttaggtcgcttaccttatgacaagactatgtcatacgctaacagtgccgatatttgcatatttccaagccatgcagaaactttcggtttggtcttactggaggcaatgttactgcggaaggcaattgtttgttccgatatcgattgttttcaagagattataggagacagtaactgtgtttgcaaatgcagggtgaaacgtatcgatgaatttgcagaggctttgcaacggctaatctcgaatcccatttataggtgtgaacaagccgacagggcttatctaaatgcaactgctagattcaacaccaacgagatagtggcacaaaacatcgaattttacaatcgagttataagagatagctccaaacatcatgtagaagaatcctaactcaactgctttattagaaaatttaaacggactttttatttataaaatcacatattcatacgaaggggagttaaggctttttttgtattgccatcttgaagaaagtcaaacatttcagtacaactacgtaaaatatagaaatgcttcattatagtgaaatttctgatagagtataattcctaaacgaagtgattaatttcttaactcttgattcatattattcataaacgccttatgcaaaaagggataagcattattttgcccacacttaatcgggctgattatctggcaagtacagttgattgcttaatagagcaagattttggggagccgtatgaaataattattgtagaccaatcggcagccattgacagtactatgtatagtcgtgcaaaagatagtgatacattgattaagtactatcatgtgactgaatttagagggctacctgaagctcgtaatttcggtgtgcaacacacacaatacgcctacatcctatttctagatgatgatatcgagtgtgactgcaacctgctcaaagagcattacaagttcttgtcacaacctgatatcgcagtagtggcagggggaattacagaaaaatataagaataatcccaaatcgaaaaatgtaggcaagttccatttctatacggcaactccagaacggggattccacattaatcataaagaatatgtagatcatggcggaggtggaaattatagcataaaaaaagacatatttttagaagttggtggtgttgatgaatatttgaattatggagctgctctatatgaagaaaccgaaatatgtttacgagtaaaggaacttggatacaaagttttttttaattatgatgctcatgtatggcacttggctgctgatacaggcggttgcagggttctggatatcaatcgctatattgcttcattagtacataaccgggctttattgattagccgtcatctcaaatggtatcataggccgactgcttacatctatttgttgcgtcttgttgcatcatacgcttttacttaccgcaatcccggactgtttagactttttgcaaaaacttataaagaaggttataaaaaaggaaaactaactcctaaatatactcattatgcaaacatctaacaaacacatttttattgtaacctatgattatccaccaagtaatggtggtattgcaaggctttgttttgaactgaaaaaatatttagagaaaaaaggactgaatgttacagtcatttgtccccaaagtacttctaccgatgcagaggaggataataatgtggtgagattgcatggaagaagaggaatattggagttgcgtacattgaagtatttacgcaaaaaaactgttcccggtgatattgtaattaccgggaattatcatccagagggaatgctgtctctattgtcaaacagagaaacctatatattggcacatggagccgaatatcttgccggaaagagttttttccgacgctgtatttggcctacttatcgacgttttatactaagaaacgcctcttgcgtgattgctaacagtcattatacagagacattagtaaaacattgttctccaaatgctaaaacaatcgctattccgttagcggttgatgcaattcattttcgccctacttgtgaaaaatataaggatggcttgctacacctctgttctatttctcgattggaaaaatttaaaggacatgattttattatccggacgatagcttctttaccggcaaagtataagcaacaagtgcgattgcatctcggaggtaaaggaaaatataagagtgcacttgagcggatggttaccgatttaggattgtcagatattgtatcatttgaaggtttcattgatgataataaactttgcgatttctattcagcctcgcatatattcattctctgtacacgtgaagaagcggataataggaatgtagaaggatacgggcttgtttttgccgaagcgcaagcttgtggaaccgccgttataggtactcgtacaggtggcattcccgatgctgtcgaggagaataatggcggttggttgatacatcaggacgcccacgaagaattggagaatttactcattaagttaatcgacgataaatctcttgctataaatgaaggtcgtaatgcacgtcggcgcatagaagctaaaattacgtgggaacattatgtggaccaaatttgtgatgtcattttatgagtattagtctatatatagccttatattacaacttgttgctgctattagttgtttacatcgctattcaaccggtcagggcagaaacagtaagacagccttatatcaacaaccagatatttagccttgctttactcttgattgtatatgttcatgtaactttccgaccgaccgattatcactactttggagatacttcagcttatgccatggctttccaaaagaaagccttctatggtacggttgctataagagatagagatattggttttgagtatcttacctattggctttcacaactcgtcaatttaaaagggtattggtttgttctttgctcattatatatattgcctgttttctttgctttaaagaaacgattcaaacaacaatatgctgtagcactagtgttgttcgtttgttctttgagtttttggggatacggagtaaatggactgcgtaacggaatagctacatcgttagttatcttctcttttcttgttccaaacaacgatattaaacgaattcctgtttggattatagcatgtcttttccatcaatccgtcatgttgccaattggctgtttcttgctgacccgactttcaaataatcccaaacactacttatacttatggggaacgtttttcctgcttatgcttgttgcacgtgattctttctccactttgttgacaaacattccttggtttgaacaggataaaaggatgtctgaatatttgaatatgtcttataaaggcatggagcaaatgttctctaatattggatttcgctgggacttcattatttatagtttgatacccattatcgcaggagtgaaatatatctatacatattgctacgaagacaaattgtttatccgtttatttaatacttatatagcaagtaatgcgttctggctattgaccattcatgtaccgtataataacagatttgcttatctatcttggtttctttatcctatagtattgatatatcccttgctaaaagataacttaataaataaccagggagaacgaataaaatggattattctatgttattatatgttcacttatgtaatgtggataaaataaaatacaaaacaatagaaaaagatttttatgaaagatttagttactgtatttacaccggtatataataggaagaatttaattggaaatctatatcagagtttgttgtctcaaacctataaaaattttgaatggattattgttgacgatgggagcactgatgatattgatgaaattataaaatcttatcaaaatgaagatcgtatattaattcgtttcatcaaacaagagaatggtggaaaacatagagcaatcaacaatggcgtattacatgcaaaaggagaattattttatattgtagatagtgatgactatttaacaaaagactctatagaacgaatagtttttcattatcaatatataaagaataatgataaatttgctggagtttgtggtatgaaatgctttccagatggttctcgtatagggaaagaggttacatggaaaattttaaaagattcttggattaactattggattataaaaaatataaaaggggatgttgcgtttgtttttaaaacatcagtcctgagaaattatttatttgacgatatacccggagaaaaattttgtgcagaaagtttggttctaaaccgtattggaaaaaattaccttatgttattttttaatgaaaaaatatacatcgcagagtatttatcagacggtttatctgtttcatcaatcaaaaacagaatgaattcacctaattatgccatgagaatttattcagaaatggcatcactagatattccatatttaaaaaaaataaaagctcatataaattactggcgttttgctccttgctctaaattgaaaatgaaaaataaaataaaacaaataggaatttctagttatattatttttatgcctattggctatttgtttcatatgaaagataaaaaaaacaattatatagatattagacatgtcggatctaagcggtagaactttatttaaacggattaaaccattaattaaggtattcgttatagtagattcatatcttcctaggaaacttaataattttttatttgtaagtttaagaggtattggaggaaaagttggtattgtgattagatacatattggtgaaaaatctagcaaaaaaatgcggtgataatgttgtaattaaagaaaatgtatatatatctaacatagagaaactagaactgggagataatatcagtattcatccgatgtgttattttgaatgtagcggaggattgatgatcggaaataatgtgtctattgcccattcaagttcaatactaacaagtactcacacttattctgattttaatttacctattaaatataatgaaatcctaaaaaaaacggtagttatccatgatgatgtatggattggttgtggagtgaggattttatgtggagttcacattgatacaagatgtataataggcgcaaatagtttggttaataaaagtgttgactcattctctatttatgggggagttcctgcaaaaaaaataaaatcttttcaatgaaaaaaaagaaattattcaaaataacaaattcagcttattttcaagtccggcaacttcaaggtcaattgaattatttttccgcatatttcgatgtcattgccgttgcccctaaaggagaaggttgggaggaattacagaagcaacaggcacgttgtattccggtaaaaatgtcaagagccataaatccgattttcgatttaataactcttttccaattggtaaaactttttatcaaagagaagccgactattgttcactcgcacacccccaaagctggtcttttgggtatgttagcagcatggatagcacgtgtgccgatccgtatgcacacggtaacaggcttcccattgacgacggctacgggcataaaaaaacaaattcttcgttttacggaacggttaacttacgcttgtgccacaaatgtatatcccaattcacaaaagatgtgtgatattatttgttcaatggggatcggcaatcctaaaaaaatgcttgttatcggtaatggtggttcaaatggaattgatacggcattctattcgcgaaatgctacacaagatattaagatttcaactttcgatttcacgtttggttttgtaggtcgtatattttatgagaaaggaatcaatgaattagtagcttcttttattcgattacagaaagattatcctaacataggattacgtttaatcggctttatggaagaaaacctttatccggttgatgattgggtaaaacaagagattagcacaaattctcacattgagtttgtcggctttcaacaagatgttcgtccctatctaatggggtgtgaggcttttgtttttccctcctatcgtgaaggtttccctaatgttgtcatgcaagctggggccttggaattaccacaaatcgttacagatatcaatggttgtaatgaaataattgttcaaaacaaaaatggaataattgttccaccacaagacgaacacgcattgtataaagccatgaaatattttttggataatcctaatgaggtaaaaagaatggcaaagaatgcaagggcaatgattacatcacgttacgaacgcaataaattttggaaattgatgcttgaagaatactatcggcaaattaaaaatcgaattaaataacatctatgcaaatcatactgttatccggcggttctggtaaacgcctatggccgctttccaataatacacggtcaaaacaatttatcaaactgttgactgcgcccgatggctcgaaagagtcgatggtgcagcgggtggtacggcaattacgagaaaccggcatctgtgattcgattactgtggcaacaagccagtcacaacgggatatcatcatcaaccagcttggagaagagattcctgtagttacggaaccggagcgtcgcgatacattcccggctatcgctctcgcaagctcgtatttggcctacaaacgaaaatgttccaccgatgagattataatcgtcatgccttgcgacccttataccgaaacaggttattttgaaacgattcgcaggatagcggatgcagtgaaaaacaatgtagccgaactagtattgatgggaattaaccccacatatccgtcagcaaaatacggatatgtagtgccagtcaatgatgtacagaacaaaggaatatttcaagtatcacgctttacggaaaagccagatatgataactgccgagaaacttatttcagagggtgctttctggaacggaggcgtattcgcttttcggttggggtatatgacagatattgtaacccgacacatcaaaaccgacactttttcagaaattcgttctcgctatggggaatttccgaaaatcagttttgactacgaagtcgctgaaaaagcgcagtcggtagccgtcgtaccttttgccggagagtggaaagaccttggtacatggaatacgttgactgatgaactatcggaacacaccatgggcaatgttgtcatggatgaagaatccgaaaatacccacgtcatcaacgaacttggactgccaatcatgtgcattggcacacggaatctagttatcgcagcatcaaatgatggaatcctaatttcggacaaagataaaagcgagaacatcaaaacttacgctgactgcctacaacatcggccaatgttcgaagaacgtcgctggggtgaatacaaagttgtcgataccgccgagttttccgacggttacaaatcacttaccaagcaactgaaaatcaaatccggtaagagtatcagctatcaggtacaccgccatcgcgatgaagtctggacgtttatcgacggcgagggagaactggtactcgatgatatcaggtcggttatcagcagaggcgatacgattacaatcaagaaaggtgttaaacatgcagtcagggctatctctgaattgacgttcatcgaggtgcagtccggaaatctacttgcagaagaagacattgaacaatttgactataaatggtaaaatccttcgttaaaacctctgacaaaagaatgaagttggtttacaagaaagttatcgaacctcaattaggcaacctgatatccatattgaaaaagaaatgataatctatagcattgattattatcaacaagatcaagattgtactcaatgtggaaaacattcggaatgtatttgccggtaaaatgataaaatatcactatccatatgtaagtaagtatatataccggacacaggatcttgcgaaagtagcttcgttttcagattctaaaccgcagaaacagcattacgcaaaaattaatgggttggaaaaacttattataaatactggtaatgaaccttttcattgatttttctaatgaaaaagaccatccttcaatacatgaccgatatctatcaggaagatattcccaaacatatccttcaagaaaacaagatacgcctgaattcttttttcctggaacaggaatccgtacagaagaaagggactcagtttatattcagatatgcattctactccgttgagaaaccccgaaagatcacgaagcagcatctattgaaagaatatgcaggggtgcctttggaaaaaaggagcgtacaaccggaacaaatacccgatatgaagcaatatagtgatataatactgtatggagatgccagctctcctgaagcacagcaacagctggcggaatacctccaacaacataattcattaaaagtccagttgtctttttttgacaagagaaatgattccactagcaaggatgaacaagccatcgcatatgcggaactacagaaggcgctatttttttgccaaagaaaaaagatacctctcctgttcgtttccttaaaagggatgatagacgacatccgttttctcaatctgctggaggagagccatgtcgatttcagatgtatcgattttccatggttctgcaaggagaatctgcctctgataaaggcagttgtgctatatgaaaagttggaaataagaataaatgtataagatatcaagcttacagattggacttcaatgttgcagcattgaggtttatgagaaacaattctaaatatatttctgtttggcgaaatcttattctaaaaggaactctaaataaaagaatccaccttcagatatctttcttcacttatcctcaaagtatataatccaaacataaatatcagacctattttccctataactgagtaataaaaagattattccccaacaccgtaaacaaagaaataacagaagcactttaaaatggtgtatctaactcacttttttaaggataatatccctgttacagttatctgtagcaggtgatcctttcaaattgggcattagatgcacccttttccttattccaacaaatgcgcctcttgtaacctcaccaattcccaatacatcttcaaaaacatctccagatacaccttcagactcgggaaatagacgaaagacttccagcaaaagaaaggcacatgaatggccgttcattcggaacctccatttctggatagcgtttctttgtccatccaaaataatctctatcgggacagaacaataaacaaaagcataaatatcaggcaaaattgtcccgataaaagaattataacatgactattgaagatgaaatcctccaatacctgcactatcatcctctatcaaacagggttgagataacgcttgggataaccaatcctcccagtggcaggattgtaaaaagactactggccgatgccgtaaccaaaggaatgatagaagtactctaacaatagtagtgccactattttataagcagcactgcaattgttccttaccccagcaaatgcacctcctgtaacctcaccaaccccaaatacatcttcaagaacacctcctgatacaccttcagatccgggaaatagacgaaagacttccgggcaaaagagaggcacgtgaatggccgttcattcggaacctccatttccggatagcgtttcttcgcctggtcaaccgccatcttgttcagtgaagccacgaagttagcctggcgtatcggattccatttcggggtttcaagaatcaccatcccatctttccgctcaggaataaccaaatattcatcctgcacgttacggacgtaatagcacacaaaagacaaggcctcatagacattatcccctacatgaataccgataacccgttcttcaaccggtgtaccggcaaagcattccgcaatctgtttcatggcatacccatgcaacaaggcagcatcagaagccaacagataagccggtgcggtacgctctcctcccttatcgatggcagcaaagacagaaggactccaacagagatggatgagctttcctttttctttctcacgaagggaagcgacacataaacggttatcaaagaccaaacgggcttctttcgtttccggatggaactggaacacgttccgtaccctgtccggcttatggatatccatcatcagatagccctgccaaccggacacgtgctttgtcttcaagacggtttcgctttcctccacatcgaaaagataagacaagagcttttctcgcttacaacatacgaagagagaaagctcgtcctgttctttcatctgctgcatatccaaggaaagaacaaaagccaattgccaaggagtaagctcggaaaagccatgtaattcaatacaagacaacgcatccttctccggtgagtaaacgacatatccccggccacctatctcatatctcaacatgaaatccccctgttcagtgggatgataattctgtaaaacggtctgataattcataaagcaaatatattaagttagtattcatcataatgagaaatcgggaccactcttgcgtttccgtttctttttggacggtatgagatcatcctcttgcgacttcttcccgctgccggtaatgtcaagttccggaatggccataactcccccaccctgcatatagaaagcctcacgatccacccgctcacggaactcccctaccctatcgatatgtggcgagagaccgacagccacaccatcgaaatgcttctggatattctgataagtgagcttacgggaaagatccgcacctttaaagacatgagcattttccacgttttccatataaaaggaaatcccgtatgcgcctttgctgtttacatgttccgtcacacggatcgattcttccgccaaccttttcttaaaatcctcatagcctaaagaagcgttcaatgccttaaacacatggtcatagagataatgcttctgttcatcggcgctcatgccccggccatcaaaacgaatattaccaaaacgatatttctgaggaagtgaaacgtccttcaggtaaaagcctgaatccttgatgccatagacataataggatttgtccttcttggtgaccagacgcatatacaatccttcttgttccaggttccttcggaaatcggatgtactttcggaaaaagagtagatgcggtcaagctgttgtaacagttcatccttgaacaaggggttgaaaaaacctcctttttccagcaatgcgaaaaggttgtcatagctttcatcccccaataggacacgccattcttcattggccaattttatttcttgcaagggtttattcaaagaccggtatgtatcggattgttccaggacagccgataccttatccttgtaattataactacgcatggctttcttcaaggccgcatcgaaataatagttacggtattgcgcctctcccaacgtggttctcttgcctccttccctttccaaaggcaacagaccgtacttctgctccagttcccttgagatcttttcggaacggctgtaattatttccggaaggaatgcttttgccttcttcatcaattgtggtcagcagcacatgcacatggctgtgtgccttgtcggtatttaggacaacggcataacaggactttccgtaccccatcctctcgatatattccccggcaagagaaagccactgttcatcggaaaggctttctcccggatagaggctcagaataaattccgcataaggtagtttcacccggtcattcaactgggagataagtttcatgtaggctggcatggcggccagttcgtcaccagtggaggtgtaaagcacttttccgtttccttccttgaccttggaaagctggtattcaattttccggctcatggacaggtgggatgagaaagaaggttgtatctcggctatcataacaatttccggttaatggtttctacatccgaaaggtattggttaatccgatccaatgaatacaatatattttcatcggacggaagcgtattgatatgtttggcaagctggttgatattggctcctattttacgaagttcatatatcatttgcacatcggttttcgatatgcttctgcctttcaaggcagactctctgataaaggaagaaagggattttccctcttcctttgaacgttgaagaagctgttctttctcggcttccgtcaagcggatctttatacttatatctcgattctctttcatatatacagagtatgtgagtgtaacgaacattggtcggcagctcggctgtcgcaaggttttttgtacccacaaaaacataccttgcattagcaaagatatacaataatactcagctgtgaaacaaaaccagacaaaagtcttgatttcttaatccagattaaccgctcactttgttacaaagtaactacgcacattgtaacaggcgaacggaaagccattagttacaaaatacataattactaattatattattacaaagtatgaacatacatacttaattataagattaagtatgtacatatttatatttatatttatatatgtaattacttatacaattaagtaaaaaagtgtataataaattaattataaaagtatgcaattatttaatttattatttatatatttgcgcacatacttaaaaacgtacattatgggacaaatattaccaggagtagtcgtagcttttgagaatcccaagggcggggtagggaagtctacgctgacagctttgtttgcaggttatattcattcgcagtcaaacgaagaggggggcttatccattgccgtggtggatatcgacgacatgcagaacactatcggaaaattacgtgaggacgaagccgaggacggaatcatgaaaaaggaagaagaatatgaggttatcaatatctcttcctcagagttcatcaaccaactggatttccttcaggacaattacgacattatacttgtcgattttccgggtaacctgaaacaaaacggtgtagttgaaacgctgcacttcgttgacgtgatcatcattcccttcgaaccgaaccagaccgatttaagacctacattgaccttttactataacatctatgaagggattatcgaaagccgtcgaaagattggtaaaaagactaccgtgcgtggtgttatgaaccgtgttcttccgaatgtgctggagttcaaagaaattttgaaaaataaaaaaaccttgcctttcgagttgatgcaaaactacatcaaggattcaagggttgactatcaacgcaatttaagtacgctgagtaaagcgtaccatcatccctgtgatgctttctgtgaagaggtattggaattaatctgtaaccatataggagaataaagctatggcaaccaacaaagaaaggacatcatcagccgccatgagaaaactcttgctgcaaagcgccagtaagaaagagcaggaaatccagcagatcggaagtgttgcggaaagcactatcccccaacctgcgattgagcaccccatccatgaagaggtgaaagaatcggctccagtcaaagaaaccgtccaagaacctcagccggaacaaatggaaaagccggaatccaaaccttccgtgcagtcttctccaaaaacagaagaaagcaaagtctgcggaaaaaaattctcggaatatctggaagagcgaaaattaaagaacaccgaagtaatccggatatccagcgaaacccacagaaagctgaagcagattgctatggccactggattaggaatgcacaacatcgcaaacaacattcttgaagacatattgaccagccataacaaggagattcaagcgatactgaagaagtatatgagcatctgattctactttcggaaaaatatatacgcctgttcgactgcatccgtcgggcaggcgttatttttgcacaccgttttagtgaaggccggcattgaaccgggacacttttacacaactgcggaaaaatccctttgcctattatcctggacaatatgttaaagaattcaaacctctacttgtttccacctcaaaattttttccgaaagtaagaatacggtaacaaaatcatttcttcgttttatttaggtttttagggatttaagtatttgtgggacacttttacacaactaataagggaggttttccgtataatcaactatattattgcaagttagcacttactggcatcttctcgtaaccgggacacttctgcacaactaaccgactattcgggacacttctgcacaactgaacaggaaagtcgggatacttttacacaactagaatctgcattcgggacacttttacacaactaaatcaggaatccgggacacttctgcacaactaaaccggccattcgggacacttttacacaactgggggatcggaaacagccgtagtcgggacacttttacacaactaaatcaagaaacagcacgaaaaaaatgctttggaatcttcatttatagggagttagattcactatctccgtaaaaaaacgtatctttgcatcagtaaacaacaagtgtccgcctatgaaggaaagtaatacacaaaaagagttgagcagagtccccaggactctcagcgagtcttccaacacgaaagtattggaagttctatttgatgcaggcggcactgtcatgtctgacattatcatttacgtggcatcttcacaaatgaaagatctgttcggcgactgctggttctccatcaacgatttttgtgaggtcatggggtatgaacgaaccaagttgcaacgaaaactgaccgagaagcagcttgatttcctgttcagcaaccaacgtccggtatatatcaccgaacagaacggccaaaagatagagcatccgatagagaacacctttgaagcggcgttataccgtttagggacatccaacctcagtgtagcatacgccatgaacggcaagacgcaatataagttcattcaaatactggaccgctttgagataaaggataacttcggcacgaaaaagcgcaccaagcggaattacaacgtgcatctgagcaaagatctgatgaatactttgcttaccgaatacaatctgctggaactgaaagactaccgtaacctgcccaaccgcaaaggctaccgcaagttttatctgaacctggcgaaaatgatttacctgatcaagtataagattgaccaaggacaagcaccttatttcaccgttacggttgaccaacttgccaaggaatttgatgtaacggtaaaggacaaccatgaccggaagaagaaggtgaccagcatcttaaacggtatcaacaaaaagctggagagaaccaaattccaataccagtacatcaaaggaaaaggggagaagtggccctacaccgtacagtttttctttgaccaggaaacattggaatatttcgacgaaaagataaaggcgatactgacctcgcaatatcacgatgcgcttaaatcatgcttcttgttaaacaagaaaggcattcccgtgagcagacattatcaatataaggatttctttaaattgggaaccggcgaatattatcatgaatttaccgcatggctttattctgaagaggacaaggagattaaggagaacatctaccgggatatctatataaaggtagtaggcattcgtccagaagaccttgccgtcaacttaaatccctaaaagttggaacaaaaaccataaaatagtatctttgcagcggattgtcagaaaattggcagcccgctttttacatacgtccgtctgtctaacaaaagagtggcatctatcgttaaggaattaacaacaacaggcgcatgcctgtaccagtatgaaactggtacggggcgtgcctttgttgttggaacgccacgtccatgttagagggtacgtttccgtacccttatataaacataaaacaaattcaatggttcaaacaattgccaccctgatagatgagacgctcatggtaatgggcgcccatcttcacgtgcggatgacagacgaagaaaaggcgtatcttgatgctcatttcgagcttatccatatcaaaaagggagaacacctcgtcaccaggggcgaggaagtatgctacctctattatctggaatccggcatcgtccagttatggtttccggacaaagagaatagagagatttcagcacggtttatccaagccaaagagttcatcaattttttcctttcacatgaagaacaccatgcccactacaatatcaaggcattggagccatgcaagatctggagattgcccaaaaaagatcttcatcagctatatgagttatccatcaatttcaacaagctggccagaatacatttggtaagatccatcaaccgcaaaataataagggaagaggagttttacacactggatgccgaagcgcattacaaagcgcttttggccaatgaaaaatggctgttacgttcaatacccttaaaagacatagcaagttatatcggcatcacgccacaagcattgagcaacatccgaaagcgcatataaaccaaaccctataagccgggcaggacagttttacacaactaatcctatccggcttttttctgtagaattattccacacctgccggtttacggcacatgtattttttaatgcacattaaataaacacgaaaggccctttaaaagcccttcataaaatttgtcctcccgtatataatctatatgtttggagcgaaaacaacgcgataagcaccttgattcggttctgccgacaggaatccgcgtaaattggaaacaccgtatgagacaaatagaaaaatatataacattaataacctaaagagtaattcccatggaacacatcagactgactgctatcagccttagcctgctgttatgcaccgtaagcgcttttgcgcaacgccattatgagaacatcccggcacttgaattgaactacggcactaacctgttcggcaatgcaggcaactattacaacctgtccttttccagatacatcaaccggacaagctattggaaagccgggtttagctattttgagaaaccttacgaatatacagccaacctaccgcaagtctctaccttgaacccggaagaaacgattcccgaaacgatacatgacaagggtaaggacttttttgtggacggcggttattacagaaccctggcctgcaacctgaaatccgtttactggggcatcggcctgggaggattcatcggtacagaatacgtccgccaccccgataaggaatacaacttcatcatcggcccgaaactggaaacggaactggaagtattcatcctgccccgaacggcattgcttgcccgcatacaacaacattggaatcccctatccattgacaagtggaacactgtctggaacgtaggaataaagatactgctctactaaccgacaaatcatatcaccatgcttattatcatattgttagccgatacaaatgtatccggcctgatctccttataccgtgaaataggcgccatgctgataggggtaggctttctatgtgccggactagcggtacttaaaaagctgataagcaaccacgagcgcaccaaagaggccatcatcacctatatcacggcattggtcacttggctcattatctggcaactcttatgaacgtagtggatttgatactggttgccatactcgcctgtgtcacgcttcacttttactttcggaaaaagaagaaagcactttcttccggaaaggagaaagagaagccgataagggaggcggtgcgcaaggaagggcaggagagagcctgtccggtcatctgcgtggtatttcagcctgagctggaagaagaggaattggctgccgagatagccgatatgtacctgcatggaagagcctactactactcaggcaaaccactgccggaacagccgaaagaagagcccatatccatcaagtataaggatgtgcaatgggagagactgaaaacgattcatgtttaattaaaaaataggaacaaaatgaaagcaatcgaaaatgtaagagaaaaagcgaaccaagtcattaaccgctatggaaaggttatcttcacctttctcatattcttcacgctgttgggaacggcacaagtggcggaggcacaaagcggcctgaagattaacagcctatccgaagtgacagacaaagccaaagagggtgcggacaccattctggacgtagccaaatacattttggcggcggtactcggcatcgctctggtctttgtcatctattcgcttgccacgaacaatccccatgccaaggaatacctgctcggctggatcatcgccgtggtagtcatcatggtagccttcctgattatctaaaaacgaagagccatgagaaccatgcgtaaaatcaacaagccgatcaagttcttcggtctgtcatcgggacagttcgccatcttcatgctgctgacggccatcatcatcatcgtgagcatattcaagcagctgcacccgatactcatcatcggaatcatttccgccattctgtttctatccggtctgctgttccaaaccttgaaaaaggaacacaaggccggtaacccggactacctgaccggcctccggatcaagaacgccaccccccggcagataacggacaaacggcagattttcaaattcatcctaaaacagcaaccatgataggaatcatcatactcatatccctgctaatctgtgcgctgtgcctgctgattgctctgctgtatatccggcagacagagatagaggtgaaggacaaatccgtggatctggaaagtgtcttgcctatccagaccatcacggagaacgccgtcatcaacgggaacggtgacatcaccgtcggctaccggctgcttctgcccgaagtgttcaccttgtcggaaagcgaggcgcaatacatccatgagcggttggaggctcttttgaagctgcttccggcaggcacggtcatccatcagcagaatttctactatacggggcgataccatcatgcagaatactcttccaatgccctgatagcggagaacaaccgtcatttcaacggcaaggagatactgaacagttacaccaacctgtatgtgacgttcacgaacggcagccgaaacggtaagatacgcaaaagcgcatcgggcacctcgctgatgcgaaagctgcactacccgttcaagcaaccttataaggaatatcagcaacggctgacagaaatggaagcctttctgatgaactttgagaacggtttgtcgtccatccagcagtttgagatacgcaagatggatgatacggaactgaacaacgccatctacgactacgtcaacctctcttacgagacaccggaaaacgatgccacgcagaagagcgtcaaccctatggctgtcagtgaaagcggaagcatgaaaatagggcagcagcacgtttccatcctttcgctgaccaacgaaggcgagcatcttcaggaactggccgtgccgcacaccggcaagtcgaaggcatacgggggaaacatagagataccggacagcatacggagcaaatgctcgatgctgtaccccgtaggacttggcctgccgttcaaccacatcgtaaacatcgtgatagagataaccgatccagatgccaccgtaacggccatcggtgcggagaaagacgcgctgaactacatcaccaacttctaccctccggcggcagagaagcaacgcgagcaggcagccttctgcgatgagattacccagttcgactaccagaccgcctataccgccttcaatgtcgtgctgaacgatacagaccgcacctcgctcatgcggaaaaccgcactggtacagcaaggcttcagctttatgaaccaaagttcgtgctatgtggagaacgccgagctgtgcaacctgttcttctgcaacatacccggcaatgccagggccaattaccggggcttcgtcaacacgaccaagcaggccatctgctatctgcaaaaagaggggatgtacctttcggacgagaaagggcatatctaccatgaccgtttcggtactcccgccaagataaacctctgggattatccggcgctgaacaacaagaaccgcatcgttatcggcccgtccggttccggtaaatctttctggctgaacaattacatcctgcaaagctatgagctgggccgggatgtgatgatcattgacatcggcggctcttaccgctcgatgatagccttgaaccggggcaaatacttcgactctaccgagcagaagaaatttgcgttcaaccccttcttgtgtgaccgtgacaagaacggcaaatacctgtacatcgacaccacggatgccgagtctgccgatgaccagataaagaccatcgtcgccattatcagctacatttggaaggtacgtgaacccatgctgcctgccgaaaacgccattctcaggaaatccgtcatcggattttacgactatgtgaacaattcttcaataggagagaagcatgagcgtatcttcccgacgctgataacttaccgggcttatctgaaggaagtgttcagcaaacggatgaccgagtttgagaaacagaaattcgagatagaggagctgttgcttttactggaaccctatacggacggagagctgtcattcctgctgaacgctaccgagaacgtggatatcgtgcatgaccggctgatagccttcgatatggaagatgcctctaagaaagagtactttccactcgttgccatcatcaccctgcaaatgatcgtggataaaatcaagaaacgccaggggtttgccaaagagctaatcatcgacgaagcactcgacttcctgcaagacgagaaattcggagacttcatcgcctacctgtaccgaaccttccgtaaaaaggagggaagcatcacgctggccgcacagaacatcctgtttttgaaaaacatgccgtccagtatcaaggactccatcatcatcaactgcgcgaccaagattatcctcgaccattcagaacaccggcagaacctgccggaagtgaaagccgtgctttccatcacggacgaagaggcctatatgatcgagtcgttgcagcgcacggaacgctggagagagtttttcatcaagatgtcgaacgatgccttcatcttccgcaacgaggtgtccgacttcgccgccgtagccttcgattcgcgccaggcgacagtagtacgactgaagcagttgttcaacgaaagcggctcgacctatacggccatcaaccgctatctggaggaaaggaggaaaaagtatggatgacgccacccaagggctgaccgcccttctaggctggtcaaccgacttcaacggcagcgcatacaatcttgccggaagcattgccgccgcacttttgggcgttgcgctcattttcgtggtatgggcactcgccacgaaaaaggaaaatgccaagagctatctgacagcctggctggtatgtgtcatattcaccctattattcatcaccaacaaataaccgtcatgaaaagaatcattctcatactcggacttgccgcctcgatagggctgatgggaaccggcagtgttcatgcccagttcgtcgtgcatgatcccggccacaccctgctgaactcaacggaatggatcgccaatgtcaagaaatgggttacacaaatcaatgaaatgatcgatgcccaggaactgcggctcggcctgcaaaagatcgaccagttgaaggaactcaaatcattgaaagagcttgccgacctgctggacgacgtagcctgcctgagcagcgactacagcttttacctgaacgtaggatcgaattaccactgcctgaaatttctcaactttcagcgtgtgaccgtcaatctgagcctgagtaccgacctgctgttcaaggtggccaccgtgaccagttacttctcgatgaactcggaagggcgcatgtcctttatcgagcaggtgaaggaatcggtggaaaaagccgccgaagagatgcgtgagtttaacgaatccgtgcgttccacggtcatttacaaatccatgaaggggcataaccggaagacctattaccagggacggttggccgctttcacacgacacaccaattaaagcgttatgaatcaagataattttctctggggacttcagatcacggacggtctgacgatggaactcgtttcgcaaatgacagtcatcgccttcggtgttggtgtcatctgctttatctgcaacctagcatacaactatctctatcacggagccagccagctgttaagcccgaatgaggacaaatttcccgacatgatggaaatcgcccgttgcctggtactgttcttctgcctaagcatatacacccccatcgcccaaaccatcgtaggcacgatggaagtaatcaacgaagccacctcgctgacctccgagcgtgcgcaggaatttgcccagttcatggcacaatcagccatcgaacaaggagagatgattgccgaatacgacaaacacagcctccagtcggaggtagcagccggagaagacagcaccggcgccatgcagcacgaactggataaaaagatggaagaggacgaaatgaccggtgtacgctccagcgtggagaagattgtgcagctgctcaaccccgccaacctcgccacccttgtgcttcatggcatttccgccctattggtaggaatcatacaagtagtcatcttgggtatcggcgtggtcattgtcaagctactggtcattctcggcccgtttgtctttgccgtaagcatgttgccggtctttcagaaacagttgagtatctggttcggtacgctctgctccgcctgtatggtattcaccgtcatcaatattctgaaccaaatcatatggcagaccttcaaggccatctatacggaaagtgccgacatggtggacgcagctacgcagcagatacaatatttaggaatggatctcgccctgattggtgcttattgcagctgtttctggctatcctccaaaatcgtaggacacagcgatgccgggaaaatcatttcgaaaaccgtgtcaatcgtcaccacggcggccaccatcgccctgatgggaggcgcagcggcaggcggcaagctgaccaacgtaggcggtgccgcctctatcggggcaagtttcataaacgacaacaataaaaaatagaactatgaatctgatgaaattcaaaggagcagatgatgcggtcaagctgactatccggctttcagccgggtactgcatcattctgactatcgcttttgccagcagtatcatcttccttatcaacaaaatagaaaaagcatacggccaggctctcgtcatcgacaggcagggagaagtctatgaggcaagcagcctgtctgccagcgatatgcggcaatacgaatacatgaaccatgtaaagaccttcgtaacccactggtatgcctttgacgagagcagctacgagaagaacatttcgcttgcgctcaacctcataggcaacaaggggaaggagctgttgaacgagtacaacgatgtgaatatgctgaactcactcatacaaaagaatatccgttacggggtacgcatcaaggatgtagagattaacacacaaacgatacccgtttccggaaagataatcttcacgcagaccgggtaccgggcacggggaagcatctcacgtaatatcgaagcggagttcaccatctatgatatgctgtcccgcagcgaggaaaatgcgcacggagccaagatagaagattggattgtccgctattccgaacccgtggaaagcaacggcaccaacacatcgcaggcagcttctccgggcaagaatgaaaaccagtcagaaacctctaaaccaaccgaccatggaaccgaataaacttatcaaagacaagaacaagctgttgatggccatcccggtaatcctgggcatcctcttcctttatgtattcttcatccgtgaggacgggaacgtgccgtcagggagtgacagacaggccgcctcgcaagcctttttggaaccacagtcggaaatggccgacaaggtgaacgacaagatggaagcctataagcaggacaaactggaagagcaggagaaggcacgcatcctgaaagagtctcaggtcaaaggatctgatttttacttcgagctgcaaaaccagcaggagcggtatgaccgtgccacactggagcgcatccgccgtatgcagaacgatccgtacagcgaagtcatggcagaatacggaggtggccggaacggacgcttctctcatcagctggaaagccaactggacggactggaggacgagcaggcgctcaacgagattatccgggaagccaagaagaactcacgcatccgcaaggaactggaagaatccgacaaataccgcaagcgcatgtatgaacggattgtcaattatgaccaagagggaaaaacggagaaagccgctgccaacccttccggccatccatccgccgacagcctgatgcaaaaaggcccgatctaccatgccgaaaacggcaagcgggtacgccgccaaccgacctccgcaccgggaaacagcaacctcttcagggcttgcatccacggcgaccagaccgtagtcacgggcagtacggtacggatgcggttgcttcaggacgtaaccctatccggcatgaagataccggccaacacgctgttttacggtatcgccactttgggagccaaccgcctcgatgtggtagtcagcaacctgaaggtaggagacaacctcaatcccgtatcggtggttgtcttcgacaatgatgccatggaaggtttgaacctgcccaataacctgaaagccagtgcagccaagcgtatggaacaaggtcttgtacagaacattgacatgccgctctcttccatcggcacgatggccagcgaagtgaccagcgtagtcaacgccaccacccaggtagccaagcaaatcttgaacatgagcctctcacaagtgaaggtacatctcaagtccaactacgaaatgtatatccaagaagagagtcaggaatcgaagttgcgtaggcaagccgtgcaagcggagttacagaagctctatgagcaaatggaacaagagaaaacgaacaagaaaaatcatccccttcaaacattgatagacaaattatgatagacattctcaattacctgcttgcgctgtcagcggtctttttcggctatcggatctacgtatcacgccggaacggacgagcctttaaagaaatccgtccgctgaccgtttctttcggcattaccctgcttcttctatggggcattaccgtattcaccgcctttttttcaagaaccgtttaacatatcgacaacatgaagaaatatatttatctactgttttactgctttgtgtgcagtctgccgctcttcgctcaggaaaacggcactccccggaaacaagccatcagccaaaaagacatctttatctctttcgactgtgtgaaacacctggtatttcctgtgcaagtatctgatatcgccatcggcgaacaggagcttgtcatggccagccgggtagaagaggcgccccatatcgtcaggctctcggcgcaagcggaaggattcaccgaagagaccaacctgaccgtagtctgcatcgacggaagcgtttacacctatcacatccgctaccttcccgaaggcggcacggattcgtacccgaacatttacgaggacaacgggaaatggcagcaccatgactatcaggcagaagtcagcgacctccatctggccgagttcttctttccggaggacatcgcttacggaacgcccggcaacgaggtgtccttcactctggccgcctacaacaaccagttgaaagtatcaaccgccaaagatgccgtggcatattccaacctgtttgtggtggataaggccatgaacacttaccacatcaccatcaaacggggcaatacctccgtattcacctacaattttgatgaccagcgcaaatataccgcccatgtggatgtgaacagcgaggaaatggaaagatgcatccaagagctgcgcaccaagaagcgcaacatctacagcctgggggtcatcgagaacaagtttgagttgtcaatggccaatctgtatgtgcatgaggacttcatgtttttcatctttgacctgaaaaacaaatcatacatcgactacgacatcgagtttgtcaaatgtttccagcgtgaccaaaagaagagcaagaacgccatccagcaagaaacgaccatcgaacctatctatcagaaagattttgatacgaaaatcaagggcaagagccggaaccggctgatacttggtttcgacaaattcacgatacccgatgataaggtattcgagatcgagatttacgagcgaaacggcgggcggcacatcaagctggccgtgttgaacgaatacatcctttccgcagaacccttatacaagccacagccatgaaactgagagaagcattagacacctatatgttcgacaacgtgggacagttcggcggcatcgccgaatcactgggctatcagaccgaataccgggacggatatttccggttccgcaaagacggggaagagctgagcatgagcgtaagcgaaatcagggaaaaagccggagcaaagtacgatgaaagccttcgtgaccaatcaaaagaacgtgtatccgccctttttgacaaggaacgtgccaatgatcctaaatatgtcgccgagctggagaaggatggcatcagcatcaagcggtgggagaacctgaagggacatgacaaggacggctttaccgtcatcgaccatcgcctgaaggtatgctacaccggacagtcgctctatgaatacgcctacaagcaagggaacatcctcgacgggaaaggcaccaagctggaaaagggtgtcatgtctgatttgatggagatacacggcaaaccggggaagctccgtttcaacgatgacggaatctccgtattctaccgcaaagaggcgttggttatcccggacaaggtgctgggaaagaagttgggcaagaaagagaaagaacagctgcttgccggtgacatcgtacccatcaccgtaaataagaaggacatcctgctgcaagttgaccgggatctgaactccgtcatcctgcgcaccaaccaggaaatcaagattcccgacatcatcgggcagaccagcgaatatggcggctacaagttaaccaaagccgacaaatacctgctcgccaacggccatgcactggagaacaagctgctgcacagtccggaaggctacttcattgccgacatccaactgacggatgacaggaaaggagtcatgatacagaacatacagagtatcactcccggcaaggcacaagagctgatcaaggccatgacccccaaactggaagcccatgcggccaacatagaagctgcaaaagagcaaaaacacgaagaggggcgcaatatggaagccgagtttaaggaagcggtgggcaaacatgactttgaaaaaatcgggaagctcaaagaggaaggatataaacccagtgaagagtttatcaaaggaatcggtaaggaacacggtctggatgaaaggcaaacccatgaagtcatccagctgttcggcaccaagccggaagaacagggcgaacatgaaaggcaggccgcacgtctgttggatgccgcacagaccgacaactttcatgtcatccaagagatacagaaagaagggtaccggctcactcaagaagaccttacccggatgcgtgaaacgggtgtgcaagccaacacactgatagccgtacaaaagattttcgggatggaaggcagcacaaagacactgggagatgtcaaactggccagcacacccaaacccgacaacagcaaggaaatggcccgtccgatagccagcaccatcaaccgggctttcaatgacttataacctaaaaaatcaggaattatggattacgatgaattagtacagaaaaacattgcaggagaaatcagtgacttagagtttctacttgcacaggaagagcttgcacaagcctatcaagaagagatggctgccaagcagcaagagacaaacaaccaaacggccagagaatggctgcttgattacgagaacagaaatctataccaataaatcatggatacagcaagtgataaagcattacagcgtttcgccgaactgatgatcgaaaagataaagcaggtggaagacaactggcaaaagccttggttcgggataaagggtgggggacttccgcaaaatatcgagggaagaacctacaacggagtaaattccttcatgttgtttctactttcggaaaaagagcagtacagcctgccggtctatatgaccttcatgcaagccaaagacaacggccttaacatactgaaaggagaaaagtcattcccagtcatttactggaatttctcagtaagagacaagaacggaaagaaaatacctttcgacgtatataagaacctggataaaaacgagcagcaggaatataaggtcacgccgtttctgaagacatacaatgtgttcaacgtacagcagaccaatcttcaggaaacgaaaccggagaaatgggaagcattgaaggagcaattcaagataccggccatcaaggacgagcaagggatgctcaccgtgcctctgattgatgcgatggtacgggaacagcaatggatctgccccatttattccaaggaaggaaatagtgcttaccatgcaaggggagaagataaccatatcgtcgtacccctgaaggggcagtttaaggacggagagaatttctactccacactactgcatgagatggcgcactcgactggagaacctgagcatctgaaccgggaaaaaggcgtgattttcggagacaagcaatatgccaaagaggaactggttgccgaactcacctccgctaccgtcgggcaaagcctgggaatatccacccatatccgggaagaaaatgccatgtatctaaaaaactggctgggagccttgaaagaagatcccaaattcatctacaacatccttgccgatgtaggaaaagccagcaatatgattcaggaacataccgcacggatggaacagtacctcacaccggaggaacggttcacgcaggccgtcctgcaagacaaccgtccggtattggagcagatgaaaaacgaaggttttaccccttcatcacggttattggaaagtgttgcggcaaaccatcctacagccgacaaccttgaaacgctacacagcactttcggcatttcgctgccttccatggaagcggagccagccatgaaaaatatgaatgagccacagctcggattataaacttttaaaaaccatcattatgtttacaggacaaattatcggttatgtcggtgcggatgcccggcagaacaagaacggaaaaggattcaacttccatgtatccaccaagtacaagaacgtgaacaacgaggaacagaccctatgggtatgctgtttcgtgaattacgagagtaaagtctttgagtatctgaaaaaagggacacaggtatatgtctgcggcgatgtgtatgccgatgtattccagaaggatgacggtagccacatcccatccgtcagcctgaccgtctcacgcattgagttactgggaaaggcagagaaaaaagagagcggtgacggaacggcatccggacaaccccaataacagcaacggccatggaaagagagaagaaagacctgtcattcatcctgatcctgctatccacgctcatcgggacagccgtactgtttcagtgggctatcgttacgggattatacgctccactacgtaatccggccatgtgggaaaggctgatggagaaggatatcctattccggtttctctacgttatcctgatcggaggcctcgcttttctctttccggttggcaaagtgaaagacgaaaacaagaaatgggtttacaccagtatgacactggttacggcatccatgctggttgtcggattcagccggttatcagcgtggtataacctatttgtatttcccattctattcgtagcgtacacgctgcttgtcatcaagactctgccttatttcatccggcgtcatgcccaatccgatgatagcattttcgggttaagccgggaagaatcggctttctacttccgctttgaaaccgcctccgggccgctggtcatccataagccgcagcagaatgtctatatcgacggcggtccgggaagcggtaaatcagagagctggatcaagggaatcatctaccagtgcgccgagcgcaactatgccggattcgtgtacgattgggagggtgatcccaccaaggacaagtcacccatcctctcacgtatcgcatacggaagcatcgaacatttccggaacaaggggatggaaacaccccgtttcgcctatatcaactttgtggatatgtcacgcacggtcagggtgaacgtactttctccgcaatacatgtcaaagggaaacgaatcgctattcatccgcaatatcatcatgacactgatgaagaatctggaagcaagctggaaggaaaagaccgacttttgggccaacaatgccatcaactacgtctattcaatcgcctataaatgtttcaaggaaaggaagcttggtatctgtacgctgccccatgtgatagcccttgccctttctgacagcaacctagtattccactggctgtcggaagatcctgaaatcgcattgaacatgtcctccatgctgaccgcctggaaactgggtgcacaacagcagacagccggagccgtatcatccgcacagactccgttggtactcctgaacaacaaatacatcttctgggtgttgtcgccacttcccgaagaagagttctctttggatataaccaacaaggaacacccaacgctgttatgcgtaggcaatgcgcccaccatcaaggaagccgtttcccctgctatttcctgcatcggcagcgtcttgatgtcacagatgaacaatcccggcaaagcgaccagcatattcatggtagatgaatttccgaccatcctgttgcaaggcattgacactttcatcggaaccgcccggaagcacaatgtcgctaccattctcgccgttcaggacttcaaccaagcggtcagggactatggagagaaaagtgccaacatcctgaaagcctcctgcggaacgcaggcttacggtatgaccggaaatgagaagaccgccaaagacatcgagaacttgcttggggagaagaaagaagcgcaagaatcttattcacaccaagccggtggcaataacagtgtcacggagagcctgcaaaaagaaaaagtcttaaaggcaagggacattgccggacaagcagccggacacttcattggcaagattgccggaggcaagccgccattcttcagcgtgcagatggatatgtgccgttttgaagagaaggagataccccgtttctccttaccggtcaaactgggcaacggcaaagaagagatggaactggaaatcctggaagagattatccagcagaactacatcaaaatcattgaagatgtcaacgccatcctcaaaaagatagaggacaaattaaaagaaaagtcagcagttccgccaaccgggacacacaagacagaacaaaaaatcatccgataacattcaacaaaagaatcctaccatgagaaaaattcattcattattagcggcagcctgcttattggccgcttcatgcaacaaagaggaaatccaatcggaaacagacaaagccggcatgtatcacatcaccgtagccgtaaccggttcctcacccaaaggcagtgtgcatatatataatcttgacggcgtgagattcaggaacgaacgcaccggtacctccgcagcttccgtagatgagagtttcaccgataaagcggaatacagcacggaaaagcctgtcagccaaattaccgtgcaaggcattctctattcaaaagagagtgctatcatcaccatgcagataaaaaaagacggggaaagcgtattcaaccagagcaaacagttggaggccgttcccggtatagacactactgttgatttggtttacagtaccttgaaataaaaatgcagacgaatcaaaaaacatatactttctcttccatatttagatgatatttcttatctttatgaaagataatctttctcatttataatctaagctcagataaaatgagattcaactaatccagtcaacgttatgaaagtcgatttcaatcagataaaaacaaccatttctctgcccgatttcctgctggaactaggatggaaaatcgtggaaggctcttccaactcctgtcccaaaatgagcaacggaacgcataccatcgtcatcaagcggaactcgcagaaccaatacacctattgggacgtgcatagtgacagcgtgcgtggccgcagtatcatggatctgatgcaggaacatctatttgaaacaaccggaaaaatgccgtccttgcgcgaggtgggggagatccttcagaactacatcaacaccaaccgcatcacgacacccgaaaaaagccggtatgaagtaggtaacacaagcatgagagcggacgaacttcaattctacttgagccagctacaaccctacaagggcaattatctccagaaaagaggtatcctgaaagaaagcattgaaagccggttcttcaaagacactttctttatccgtgaggtaaagaacaaagggagtgtttaccgcaacgtgtgcatcaagatgtacaatgaaaacggtgtgcaagccatttctcaacgaaatgaaacattcaaagggattatcggtggcaagttcgactgtctggcgaccagcaaccatgacaaaagccgcccgatagacattctctacattggggagtcatttatagactgtatctcccactatcaattacgccattccggaaacgacctcaatcttgtatatgtatctacggaagggacattcacggaaggacaaatgaggctattacgcctgattcttgacaagaaccaggtaaaggagctccggagcatctttgacaacgacaaacaagggcacaagtacactctatggctgcatcgttactttcatggcgatacgactgatgtcgagagcctgagtaacgatgaactccgcaacaaggtacggaaactgaagaacgtcgaactttcggaaaacaaggattggaacgatgatctgaaaatctcgtgtggcatctgttcctccacggaggacggccagtaacctcatagatttgctccatcacataatacgacaacctataaaatcagatcaatatgaatatcaagcatttatttttttgtatgctgctcattgccttttcctcatgcagcaaacccggctatgagaaggccattgcggaatgggttcagacagattctcacggcacctggacggatttaaagttcgaactactggaagtgttggaaacagaagacgtcaccgtatcggacagcctgtgctacctgaacaacaaaagcgcacaattatccgctgtcatacagaaagcggaaagtccccgtgccttattcaaaccgtccttttccgcctatatggaagccgaaaaaagcctgaaagcaacggatgccatgaaagccatgtacctgcaccgtgacagtacggaagttatcggcaagatattaaaatgcaggtatgccatcgtccagccacactcaggggtgcagcagaaaaagacggcttctttcctattgtcccccgacatggaaaaatgtatcggcaaactaaagccgacaagcaaataatccgagcgtaacgatgtgtagcgacaacgttttttggggttcttttttgggcgtcttccaaaaaagaactcccacacatttagatgtgtgggctattcattacactaccatcctttcccttatcaacggtatattatcccgtaccaaattcagaatccggtcatgataggctgataattggttagactttccacgacactggcacacctccatcctgctaagtgaaaactccaccgtttccatgcgccttccatccaccgttgccgacattatcaacgaatcttctctcttataataggcgttgctgaatacacaatgatgcagcaactttccctctttgtaaaagtccgaaaggctttccaatacccgaaccataatatttccatccgcaaacgaaagattaaagaaacgtgatttggcagcaatatagtctttttcatccttttcagaatattttttcttacatttccccatcacccaatcatgcgcttcttctacattcaacggacacaaataatgaggatttctcgcatccaatttattttctatcagcatatccacatagtccagccacaagtccgcatcatgtatcacatagtcatgtcttaaacagatttttacatacgtccaatacttatctataccgtattttctctctaaaaatctcaagaacaaattcatttgccctgccttatataatatctccatccgattatcagttaataatgtcataaagaaggaactcggacaaatatcataaaaggcacccttaaatccattcctcgtaagttcgggtatcactttcattctcggatagataactgccgggcaaatatcataaatacggtcatgatgcacattccgcttacgcaattccaaagaacttccatatatccatgcatcgtaataaaatatagacatgccccgcagcaaagacagcgtttctgtcttgccctctttattcatccaacactgtaccgcctcaattataaagtaattagccggagacccttttttcagccggcagtccaccataaaaaaacggataacttgatattgcttgtatgtagtaatcacacaaaaatattctttatatacagccgtccttttcctgctattctccaatttcaggttcataccgcaatgaggacatttacagtttttcttatcttccttatcccgccatgtatgcccacaatccaaacaaaagcaattcccctttgcatcacgcttgaaataatgcacaaagcaatgtttataggcataacgcttttgagcctctgaaacgggagctaacttcctgctcccattcacgatttccatttgtaattttgtcttgggtttcatatcaaaaaagagttaactgggtttgtacttcggtgttgttctcacgtttagcttgttgacgcttcttcaactttgccaattcttcctcctgcaattttttgatagcagcctcacgagccgctttcttttcttcctctgacaattcaacatgatgatttacgactacattacatttcaatgggctacccacctcaatattatcttcctgataatagtgcaacgccataccaaaaatttcatcatcactaaaaccacagcaaccgcttttcttcacttggtttaaaatataggtaatgcaattatctatattctttgtaggtttttgatagactggagcaaacagactatccaccgctgccatattatcaaggtatgccttgatggtacttttaaattgttctgacactttcatagtatatcatttttagatttcatttcacaataagccaatttcacgagaaacaaggagaataggcaaataagagccaacaacgtaaccgacacaacctttatcggacttggcgttattaccgctccgacaaacatagccactgcacaaagagcgatgatgaccgaaaaaacaaattgaatgatttgcatatacttctgctacttagtttgttaaacttctaattttatgcttcagctagatttaaagacctttttttaaaacccctttccgggatggccttttctttctgccgactttttttttgagctttcatgccccatctgagtttatgagccttttttttacggcacacaacaataaggaaggagggattaagaaaagttttggacgacaaaaaatgttggggacagcgaagccgtccggcgttatttttttcgggacaaagggcgaagaccggaactctttcgtatccatccaccgaaataaatttgccgttcaaaaacaaaggatctcagatggagctatgaaaaaagcacattaggggaggcagaaaacaaggaaaagggcagtacggaaagtaaaacaaaccatacggttttgcttgcaaaaccgtattcctatctccctgccacaagtgacaggggggggaacgggttagcaacggactgccgggacaaacggtaaaaggaaggaactgcaatacggaagaaggaggttgtttcggcaatgccgaagctccggatgatgaccattgcaatcccgcccacgtttggaacttctcttttctggtttgcccataatcagccgcatagcggatgactacgggcaaaccgggaatgagaacagtcattccgatgaaggggagggtggggaagaatactgcgtgaacgcaaaaacactctcggatatgtagcaaaaaaagcggcactaggccgcttcaatcatttgcttgcttttttctttttagagacagccttctgtttaggctgatccggtttttcttcttctttttccggagccggataaaacttggtggctaccatcacaatgcggttacgcttctccccacttttagaatccgtccattcttccggcttaaagtagccttcaacggttatcagctcaccttttttcaatacatcgaaggaatccagtgcttcattctttctccaggcttcaatccccatgaaagcggaaacataagaggtttcttcacctgtcttgtctgcacggctgaccgcgatagaaaagcgtgctacgcttgctgtttcaaaactacggatttctgcatccttaccgataaaacctgttactgcgaatgaattttcaatctttttcatatctctgattttttagaagttaattaatcaattttacagtgcaataactgattgttggctttgggggacaccatgaaaaaagatataaatactctttttatgctggccggaaaaaggaagatttgtaacttttttattggtgaagatggcagcaaataattcgggttaaatacgctttttatgcaaggcaaaaaaaggaagatttcagacgaataacaacgtggtgtttgtgaatcgtccccttatccccgtaaaaggggttagcaacaatctatatttgcaacggaaaatgatttgacttccctaaaaaatgatatgaaaaagacaaaacttgaaaatcagcaacaggtttggaaaggatgcaaaaaacaaccggtcagacagcaagcatggcacattccgaaaatatggtcagccgcctatcgacacaccggaagaaacctctgcaattccttttaaaaaaatgaagccgaagaatgaagcatacaatattccacgtatcgaaaaaagtgactgcacgataaaatgaaaggctgcaacggaagaacagacttgcggattctgcggggagaacataaccatacaggcatacagccactacaactgtttccggaaaaagaagattatacaaccggaaaaacagaaaggcatccactcggagaaaagcaagcaaacgattgaagcggactgccgatttagcggcgaaatatccgactacctatatacagccctaaaaggctggggcatatgggtaagcaacagactgccgggcaaataaaaggagagtggcatagccgccggaaagaggttgtctcgatgtggccgaagctccgaaagcagaccggatatgcctctctcctttgccttccccattcctggatttcacacaatcacggagcctgcgagtgactatgagaaatcctgaaacggggacagtcactccgctgaaagggtgggtgggaaacatgtgactttctccaaaataacaaataggggtataaagatctcaaaagaaaagaaagccgttccagaaaagactggagcaactatcaccatctactgttctttaagttaattgcagcaaatccaaatcatcagtgaccaatccatccaatacatgttggattttatcaaatatagccttatctatgccatacgtggcgcataacgattgaaatttgcttacagcatcgaacacctgtaatatcttcttttcgggctcctctacaaaatcctcggcaaagttgacgaaatcacttgtagtcaaggcagaccttttgcccatcacgcccatcgaatgaatgtgtgctgaagaattttcccatgtatttgccgtgaacattacatcatatgcaggtgataaacgccatacccctgccttatccatgataaacgatatgttcttattatgatcatcggatatacctgcgacataattaaataccattctgataaatatctgatctttgtcttcctggggaagtttcagagtctctgctatccaacacagcttcatataatcatctgcacccggcataatggccgcaagggtctgactaaagagcttttctccattcttacgatcaaatctttccgttacgaaatgatttcttccatcaatttctttcaggaagcatggcatcatgttgattcccgccgcctttgccatttcgctatataccatttctatctctgtggtaggagagtcatctgcttctttaaatttgatgatatactgcttaaaattttcaggcaaatccacctggccggaacgaaactcttccgtttcgagattataggcaatcactgccttcgggcgcatgccaccggcagaagttccaagatatatcaactttttcatcgtgaggctatcctccggtgatatgacagcagcatctcgatcattatatattttagaagccaaagttgccaatgatgacatatttactgactcatggatggcatcatcattaaattccggttcaaattccaatgctcccatagccctcttgccaatataagagagcttcaatagaggcaatgattccgtaacctttatattattatccgtgagccattggtcaaatagggaagccccccatttgtcaggaagcgcatctgcaagaaattccggaagcccttgatataatttatctttattcccatagaaagacgcaaacaaaggggttctcttagggtgtgtggaagggcatatatcataatcttgtttcctatattcatccgtaaattggaatacagaacaatgcttttcaaagtcccaattcaatttgccaatgcaagtcccccacagatatacattcactataatcggctctttcttcataccatcttacgtttaccgttaattctttgtattcttttacctgttttttcattgattaggaaaggggagtctggaagttccggaaccaaaccgacaacgccttcaagagttccacttatacgcaaaatcttaagcaatgtacttagggcaatatcacttactttacaagattctattctcttaatagtaacgatagatactcctgccttatccgcaaattcttgctgggaaaaacagcagctaagtcttatagacttaactctcttgcagatttcctttacaatacattcatctgaaaattcgtatattgtatatgtatcatataatcttttcatagaaaaacatatttaggtatcatttttgatacaaaaataccgataaatctgaaaatcaccaaattaagaaacactttttttataatcttctgccgcattagcaaacgattgaagcgaccttgtgccgcttcaatcgtttgattgctttttctttttagtccgggggttcttatttttccggagtcgggtagaacttagtagctaccatcacaatgcggttacgtttctccccacttttagaatccgtccattcttccggcttaaagtagccttcaacggtaatcagtacatctttttgcagtatccaaaaagcatagcggtcttccatcttactctaggcttcaactttcataacagaggaaacaaatgttttttcttcatttatcttgcctatgcgactgaccacaatagagaagtgtgcaacctttactatttcgaataaatggatttctgcatccctacaaatcctgcctgttactgcgaatgaattttcaatctttttcatatctctgattttttagaagttaattaatcaattttacagtgcaataactgattgttggctttgggggacaccatgaaaaaagatataaatactctttttatgctggccggaaaaaggaagatttgtaacttttttattggtgaagatggcaacgaataattcgggttaaatacgctttttgtgcaaggcaaaaaaaggaagatttcagacgaataacaacgtggtgtttgtgaatcgtccccttatccccgtaaaaggggttagcaacaatctatatttgcaacggaaaatgatttgacttccctaaaaaatgatatgaaaaagacaaaacttgaaaatcagtaacaggtttggaaaggatgcaaaaaacaaccggttagacagcaagcatggcacatcccgaaaagatggtcagccgcctatcgacacaccggaagaaacatctgcaattccttttaaaaaaatgaagccgaagaatgaagcatatcatattccacgtatcgaaaaaagtgactgcacgataaaatgaaaagctgcaacggaagaactgacttgcggattctgcgggagaacataaccacacaggcatacagccactacacctgtttccaataaaagaagattacaccaccggaaaagcagaaaggctccactcggagaaaagcaagcaaacgattgaagcggactgccgatttggcagcgaaatatccaactacctatctacagccctaaaaggctaggacatatgggtaagcaacagactgccgggcagtcactccgctgaaagggtgggtgggaaaaaactaagtggacgcaaaaaacaaccttaccattgggggataaacttccccctattttcacttcacatattctttaccccacttcaattgattcaacaaacttcaacaacaaagcgactgttaccgtatgaaatgaaagctgattgaacaacttatgcgctttcagcatctcaatagcggcttcagccgtaacaactctctgttcataaagccgaattgtcgcatataactggtcatttgcgacaggccccattattaggtcatagtcaccgttttctcttcctctgcggttgttgacaacaaactccagccattcttttgtcgcacccataaaccgaagaaccggatattccctatcaagaatatcatcgggaacttcataaacagagacgattgctttttcgctctgttccctgttcttcttcaacaaagcccatttttttgcttgttcaaagttggttgtcgtataaaatcccttcccaaagtccgtagccttccgtcctttctgtatattagggcgtttcacggtaactgtagatccatgaaatagtctcattttcttttattgatataagtcgttatagtatctaatatatattcggggtcttgggtatgaagcatttcaaaagtctcatccaaaaaatcaaaaaccccatagtccgaaaacaacaacaaggtttcttccgcactttgtttcttttcctccctataattctcaatgcagaacatcttgaaaagcaggatcttcgtgtcaccgttataccgtcgtttttcttctgttttttccttctccaatgtttcataaagcgacaatgtacttgaataccataacttggtactcttatccagcaaagatttatacaacttggaagaatatatataatacagtgcatcgcctaaaggcaatgcctttttcttcatgaccagttctaccagctctctcatcacgaatgggagcatggttgagtcaagttctccttgatttttatgagtaatttccatattcttgttgttattactttagcatattttcgaaaacaccttcttcacagttctttatacacacctgacactcggccaccacttctcttaatattcgggcacattcttcattcgaatgcccttgcagtaattcataggcatatcgcatcagttcattagcttccattgtttccatccttatcaataatattcaagttcatcattattttctgcaacgactccatatttggagttcctaaccaacacacacctatgcaaaaggtcatattgttctctgtatctgaaaaacgcatattgttttaccttttacaaacattgttgtcccattaaaatctaaaagagttctttgaaatatttgaaatttagttagttacagcgattttccgagcgaacggacttgaatttgtagctttgcatcagattaatccgatggcatatgttccaagacaaatacgttttcgctcaattggcttcatttctgaatcgaagtaagtttaaccgcatagtcaccaagtatgatggtgataaatatgtgaagcacttcacctgctggaatcaactacttgctttgatgtttggtcaactttctaatcgtgaaagtctgcgagatttgatagttgctcttgaagctcatcattccaaatgttatcatttaggaatgggtaaaaatgtatcaaagtcatcgctggcaagagcaaatcaagatagagactatcacatctttgaagaatatgcttactacctggttagcgaagcacgacaaaagtgtgctaatcatattttcaaacttggcggtaacgtttatgctttcgattcgactactattgacctgtgcctttcagtcttttggtgggcaaaattccgcaaaaagaaaggtggtatcaaagtgcatacattatatgatgtggaaacacagattcctgcattctttcatatcacggaagcatccgtacacgattctaaagttatgattgaaattccttatgaaccaagctcttattacatctttgaccgcggttataacaacttcaaaatactgtataaaattcatcaaattgaagcctactttgttgtcagagcaaaaaagaatctcgggtacaaatccatccaatggaaacgtaggctgcctaagaatgtgctttcagacgcaagtgtatttctgacaggattctatcctaaacaatattatccagagccacttagattggttaaatattgggatgaagaacaagaacgagaatttacattcataaccaatgcgatgcatatatctgcgcttcaagttgctgaactttataaaaatcgctggcaggtagagctgtttttcaaatggctcaagcagcaccttaaaatcaaaagattttggggaactacagagaatgctgttcgaatacagatatatgctgctatatgcgcttactgtttggtggcaatcattcaacacgatatgcaactgaacagaagtacatatgaagtgttacaaatactgagcatctcattgactgataagactcatctgagagacctctttgataaaactaaatttcaaaatgacaaagaacgattcggaccaaatgggccaagtttatttaatttttaattcgtcccaattttaatgggacactaatgttttacaaaggtaaaacaattaagtaaaattcatctatcattgcttttcatatttattgtgtctttctcttttgcatcggaagtattagcacttacagcaaccagacagtatgacatcgccacgtttgatcataccgctggaaaacaacgatatacaatctgaatcaaaacagattgtatatcaccaatttctttttttgtgccttgttaaacgtataagaagttcctccggcagattttccatcccaataggcaatcagcctacaggcgtgtgaaatcatgtaatcattacggtgggcatagcattgggcataataatattcggatagaactaccaccttgtcggcttggcgcaaaatatcagcatacctctgtttgtcctctttgttgaaatacacatcttgcccgacataaggaacaaccgccaccaaaaccatatcgggatattgtttcctttgttcaagtacggtatgagcagccatcatgtcaaatccaaccgcacaaccaatatagaaaaaacggattccattctcatagcagaaacgtacctcttcattcaacgatacggacaaagcatatttatttgttcgtatcgttctatgaccggtaaaagcaacggacatcattttcatccatttatcacgtgcctttctacatatatccaacgaacctgccgaagtttcatacaccattccattcacctcataacgataagtgaaccaagtagtatctccaaagatatccttctgcttctctatataactctctttttctttcatcttataacatacggacaactgttttacctaaaaagaaacctcccaaaacctcacctcctattttttccaactgacatgcgaaacgagcatacgaaaacccttttgttaaaatatcgtcaaataccaagattttcttaccccgaaaaaagtccttgtcaaattctatcacttgtactttttgaagcgacttgctgtcaaatttctcgtgaatagccaaacgatctccactgacacgtatatgttcatacgcattgatagcacctgaaaacttacacacagccgaagcaaaccccttataacgaagttcattcttatcagcggaagaagccggaacacaagcaaaaacaatattcttaacatcatcaccaaaaacttgatgtaacttattcgctatcatccaagctatattcaaataagcttttccatccttaaaactccatatcatcttacgaatttgccattctctttccgttgcctgccgatattgcataggaagatactcaaagaaagaaaacatcatcttatgccattgtctgtctaaactaggatatttactctgatgtgccatagtcttttatctattaaaattaaacttatgcttcagctagatttaaagacctttttttaaacccctttccgggatggccttttctttctgccgactttttttttgagctttcatgccccatctgagtttatgagccttttttttacggcacgcatcaataaggaaggagggattaagaaaagttttggacgacaaaaaatgttggggacagcgaagccgtccggcgttatttttttcgggacaaagggcgaagaccggaactctttcgtatccatccaccgaaataaatttgccgttcaaaaacaaaggatctcagatggagctatgaaaaaagcacattaggggaggcagaaaacaaggaaaagggcagtacggaaagtaaaacaagccatacggttttgcaagcaaaaccatactcctatctccctgccacaagtgacaggggggaacgggttagcaacggactgccgggacaaacggtaaaaggaagggactgcaatacggaagaaggaggttgtttcggcaatgccgaagctccggatgatgaccattgcaatcccgcccacgtttggaacttctcttttccggtttacccataatcagccgcatagcggatgattacgggtaaaccgggaatgagaacagtcattccgatgaaggggagggtgggaaagaatactgcgtgaacgcaaattaatgggattaccagtaactccaagcgttttttgctacttttttggggtgcttgccaaaaagtagcggacagcaaaataccctcccttccctaatccaaaagaagggagaatgtgcttcattgaaggtatataggttccgttccctgattataacaatacatagtgttatttctgaaaccatcaaagcatatatgaaaatcatcgaaatcctgttccgtggccaaacgaaccttatcactcaacaaaaccatgcattgtttattgacagatgtagccaaagaggtagtacgtcccggctttatctccaatgccaccacataagaagtccttcgtggatagatatacccaataatttcctcattgagtacaaccaaacgaataacatcttcattcaaaacgggaatattattaattttgcccatcattgttataatataaatcagtttataatcattaaaatacaatatcattacaaatgatacctataatttttataggtaaacttttccaccgagaccacctcataaagatagtcttcatggcaagaagccattatacagttctcacattcaagaataggatttataactacacggaatttaatagtgccgtccaccagaacaaactccacccgattaaagaacccttgtagagaatgcccttccttatccatcagacgcactacttcacctgtaaaaacagccaattccttagcctgccatttcgctttacgcaaacaactgttcgccgctttgacgttctcattcacctcttttgttcttattgctttcataccaaaatcctttttacatatttatcttgtcaaaaatcaaaagtcagctgcgtagcccttgcgttgctctgaatcgacctcttcaattcagaattatcctccattgcattttcaagtttcctaataaaagaagtgtcacctgcttccgttatctttaaaataggcaaccatactccggctatcagctgtaaatctatatgataacttctccaatgctgcattgtcaatgtattcatccatgcgacttcaccgggtacgctattcatcatcagattgacaacggtcatctttacacaaatcaaatctatatccgagccataacaaaaaagccttcctccatcattctcttccgcacatttttttacagcggaaagtagcatcctgccggaaccacagcacgaatcacagaccgactgtttaggtttcagcctatttccccccatacatgccatcaaatcagcaacgtgtatcggggtaaagaactgtccgttattcccatgactgacacactccatgaacatatctcccaagacatcgcaaaatccttccgaatattcagacaccctataaaacatttgaacaaaaagttccatttcatatggcttatatcttttttccactctacgataatcctccgccaacatcccgacagacaaatagtaaagacaaacatccaaaaaatcccgaaaggcttcttcatatccccgactgaaagcaagcttttcataaagtttcattatctcctttggtatcatacttttctgacttcattattcacaacattctatattccttgtgccatagattttatcaaaagccgcttttatctccgagcgatatttacagtccttctcaaaacaaagttgttttgtccaaaaatcgaaatcaaaaccatcggtattatcaatcgttacagaaacataatcagtcataccactctgacatacaaccgtatgccgatttacacaaaagtggtcatttaaagcagtttcttttcgggtaatgcgttctaccatcttatctatccacttcatacttataatattttatgtaattgccccattccaagaggcagttacggttatactcattaaaaatcgttctcgttcaaaaacagcacatcgcctttcatcaccatccaattaatctcactcagatgatagccacaatgcccactcaaaaaaatctcaatctcttcagtggtctgcaatctcctgtctgggcttatcaccgcaacattaccggaattacaatccaatacagccagtttctcataagcccactcaccaaactggcagaactcgataaaattggtataggttatccgtatgctattgtttgcatcaaattcaaggggtgactttgtaatgaatgaacctgcatgattcaccaccacagaggggctaatctctgccaatgaagataagctgtcatcccatctaatctcataaaggaaaaatccttttggcaatgaattgcggtctatacgataactggaaaaaagaccgtctatcgtttcattaataactaactgttcataatctccttctaaatagtgtactcgtgacataactcgttgttttttgggattgttaaacttctaattttatgcttcagctagatttaaagacctttttttaaaacccctttccgggatggccttttctttctgccgactttttttttgagctttcatgccccatctgagtttatgagccttttttttacggcacacaacaataaggaaggagggattaagaaaagttttggacgacaaaaaatgttggggacagcgaagccgtccggcgttatttttttcgggacaaagggcgaagaccggaactctttcgtatccatccaccgaaataaatttgccgttcaaaaacaaagggtctcagatggggctatgaaaaacgcacattaagggaggcagaaaactaggaaaagggcagtacggaaagtaaaacaagccatacggttttgcctgcaaaaccgtattcctatctccctgccacaagtggcaggggggaacgggttagcaacggactgccgggacaaacggtaaaaggacggggctgcaatacggaagaaggaggttgtttcggcaatgccgaagctccggatgatgaccattgcaatcccgcccacgtttggaacttctcttttctggtttgcccataatcagccgcatagcggatgactacggg

SEQ ID NO: 97 - DNA, 49176 bp, Bacteroides uniformis
  source 1..49176: mol_type = genomic DNA
cggctgcaaagttactacaaaaaagtgaaatgcggaaagatatagtgatagaattgagttacaagggttttggttgaagtggcgataatccgtgaagccattacaatccctgccgaagccaaatcctgacgccgctacgttacttgttcgtaaccatgcccgaaaatgcgacaaacgggtacgaatagcgaaacaaggctctaaggaatagtgagttatccataactcatgcgaaaaatcaggttacggaaaaagattgcgccgttcctccccgttttgcgtaccaacaccggactcttcaccaactaattttgaaacccaaaaattaaggacaatgaagagtacattttcagtaatctactacctcaagcgtcaggtagtgaaaaaggacgggacagttcccgtcatgggacgcatcacggtggacggcagccagacacagttcagctgcaaactgactgtcgatccgaaactgtgggacaccaaaggtggacgtgtcacgggcagaagcacggcggcactcgaaacgaaccgtatgcttgacaagatgcgggtacgcatcaacaggcattatcaggaaatcatggagcgtgacaacttcgtcacggcggagaaggtgaagaacgcctttctcggactggaacaccgctaccacacgctgatgcaggtgttccgccagcacaacgaggactacgagaagcaggtggaggcaggcatgaaagccaaaggcacgctgctgaagtaccgcaccgtttacaagcacatgcaagagttcctcgacatccgctaccatgtgaaggacatcgccctaaaagagcttaccccggctttcatctccgacttcgagatgttcctgcgcacggacaagcactgctgcaccaataccgtgtggctgtacgtctgcccgttacggacgatggtattcatcgccatcaacaacgagtggctgacgcgcgacccgttccgcgagtatgaaatcaagaaggaggaaacaacacgcagtttcctgaccaaagatgagatccgcctgctgatggaggggaaactgaaaaacgccaaacaggaattgtaccgcgacctctacctgttctgcgccttcacggggctgtcgttcgcggatatgcgcaaccttacggaagagaatatccgcacctacttcgacgaacacgagtggataaacatcaaccgccagaaaacgggcgtggtgtccaacatccgcctgctcgacatcgccaaccgcataatcggcaaataccggggactgtgcggggacggcaggatatttcccgttccgcattataacacgtgccttgccggtatccgtgccgtcgccaagcgttgcggcatcaccaagcatatcacgtggcatcagagccgccacacggcagccacgacgatattcctctccaacggtgttcccatcgaaacggtcagctccatgctcggacacaagagcataaagacgacgcagatttacgcaaagataaccaaagagaagctcaatcaggacatggagaaccttgccgcaagattgaacggcgtcgaggaatttgcaggttgcaccatctaaaaagaaaagccatgaaacgtgacacaatcatcatcgaggacaaggcagtcagcgtaaccggtaacgacgtgtggatgaccgccaccgaaatagccggattgttccatacgaccgtcccggcagtgaacgccgccatcagagccgtccgcaagtcggacgtgctgaacgactacgaggtgtgccgctacatgcagcttgaaaacgggctgcacgcggacgtgtacgcccttgaaatcatcatcccggtcgctttcagggtgaatacctacaacacccacctgttccgcacatggctggtgggaaaggcactctcacaagagaaacggcagacatacgtgatgttcatacagaacggaaaagccgggtattgctgattgcacataccccataagacaagtaaacgggtagcaccacaaaaggtgtcacccgtttactttttcatgaaaccgcctcactccagcggcttgcggtagttcgcttccagtaccccgcgcagccccgtttccgggtaaagcaccttccctcccaaaagtatgaagggcaacacgcggttgttgcggtattcctgcaaggtgcgccggctcacacggagcagttccgacacctcgccgtccgtcaggtaacgttccccgtccagcggaggacggtagctttccagaaatgcggacagccatttcgagcctttgcgcatatcctgcaccacagaggctatcggctcgtcttccatcgtaaaaacatcgttgttctcgttcatcataacttcggattcagtgggtgaataaatcaaatcatctgccgtgcggatagagcgtgccgacaagcggtatcagccgcttcacctcctctggcttgtaatagaacctgcggtttatctgcgagtagccgataagccgcctgtcacgcagcgtctgcaacgtgcgcgggcttattctcaactgcccgcagacctcctcgcccgtgagccatctttccatgcgccccgtgtcgcttttgcgcctcagggcggcgaccttctccgagagtgcgccgaatgccgccaccatcatctcgaaagtctttttctcgatagatactatttccatattcatgtcatttagagtttgccgcaaaggtaacgaaacggcatacaagacgtatcgttttccgctgaaaggctgcctgttgcgccgtttgaccgggttacggagccatcttccgcaaaaatcttacgtgagtcacgtagtgagttgttaaagccccttttgtttattgccgaattttgtcgcagaaacaaaaagaaaggactgaacatgaaagtgataacaatggaaagttccgcctacaaggagatgatggcgcagattgcgaacatcgcagggtacatccgcgaggcaagggacgagaagaaacggaagcgggaaaccgaagacaagctgcttgacacggcacaggcggcgaagatgctcaacgtgagcaagcgcaccatgcagcgtatgcgcaccgaccaccgtatcgagtatgtggtggtacgcggaagctgccgctaccgcctttccgagatactgcggctattggaggacaacacagtaaggaacgaggaagggacaatagacaccctgttccacaaccacacgctgcgcacgggcggcaaaccaaaaggaaggaggacataggtcatggaactgctcacacgaaacaacttcgagggctggatgcagaagctgatggaacggctcgaccgtcaggacgaactgctgctggcgatgaaggctgaggggaaacagcccactatcacggaaagcatccgccttttcgacaatcaggatttgtgcatgttgctccagataagcaaacgcaccctccaacgctaccgcagcgtaggcgcattgccctacaagacgctgggcaagaagacctattacagcgaggaggacgtgctgacattcctttccaaccatatcaaggacttcaaaaaggaagatatagccttctacaaggctcgtatccataatttctttcataaataacccattaaaacatttttcagatggcaaagaaaaaagacgaaaaggacgtgctggtagtccgtgacgagaagacaggcgagatcagcgtggtagccgggctgaacgcggacggcacacccaagcgcacccccgcaaaagcggagaacgcgcagagtttcctgcaattcgaccgacatggcgacgtgctggacaacttcttcaagaacttcttccggcagtgcaaggaacccagccgcttcggtttctaccgcattgcggcagaccaagctgaaaatctcttagaggtgatgaagcaactgctgaaagaccccgaagcgaacaaggagctgctcgcccctcacaaggtggacacctccgactatgagaagaaggtgcaggaagagatggcagcacaacagacagagaaacaagaacctcaaaaacaggagaacatggaacaacggaaagaacagcaacaggacaaatccgaacagatgcagggcaaacgtggctaccagcccatcgacgagagtaaaatcaactggcaggagctggaggacagatggggcgtaaagcgggacaaccttgaaaagtccggcgaccttacgaagatgctcaactatggcaagtccgacttggtaaaggtcaaaccgaccttcggcggcgaatcattcgagctggacgcccgcctctccttcaagaaggacggtgagggaaacatcagcctcgtgccgcacttcatccgcaaggagcagaagctggatgagtacaaggaacacaaattctccgacaatgaccggaagaacctccgcgaaacgggcaatctcggtagggtcgtggacattgtggacagggaaacgggcgagatcatcccctcctacatcagcatcgaccgcaagacgaatgaaatcacggacattccggcaagcagggtgcgcatcccggagcgcatcggcaagacggaaatcaccacgcaggagcgggacatgctccgcgccggactgcccgtacgcgacaagctcatcgagcgcaacgacggcagaaagttcgtcaccaccctgcaagtgaacgtggagcagcgcggcgtggagttcgtgccgggaaccggcaagtcgccccgtaccgcacagacacaggaaaccaaaggcgacacatcgaaaagtcaggcgcagggcggggaaaatgccgcacagaccaagaaggagcaacgccgcaacacgtggacgaacgaggacggcagcatccgccccatcagcaaatggagcggcgtgagcttcaccgaccagcagaaagccgactatgtggcgggtaaagccgtgaagctggagaacgtgaccgacaagcagggcttccatgccacgatgtatatcaagttcaacccggagaagggacgcccgtaccgctacgacacgaaccctgacaatgcacagcaggttgctccgtccaacgagagccgcacgcaggtggcggtgaacaacgatggcaagaccaacgaggctacaaagaatctgagagagccgttgcagaaaggtcagaccaacccgaaggacgcccgccagcaacagcagcaggagaagccgcagaagaaaacgggcaagggcatgaaaatgtaatcccgtgtccgccactgaatccaaaataaaatccaaagtatcaacaaaaaagaagaagacatgaagacaatcattgcagaaaagccctccgtggcacgtgaaatcgcccgcatcgtgggcgcgacaaagagagaggaaggatatttcgagggaggcggttatgccgtgacatgggcattcggacacctcgttcagcttgccatgcccgacggctacggcgtgcgcggatttgtccgtgacaacctcccgattattcccgacacattcacgctcgtcccccgtcaggtcaggacggagaaaggttacaagcccgacagcggcgtggtgtcgcagataaaagtcatcaaaagactgttcgacacaagcgaacatatcatcgtggcgaccgatgccggacgcgagggagagcttatcttccgctacctctaccactatacgggttgcaccactcctttcgtgcgcctgtggatcagctctctcaccgacaaagctatccgcgagggactgcggaaactcgaagacggcagcaaatacgacaacctctacctcgccgccaaagcgcggagcgaatccgactggctcgtgggcatcaacggcacacaggcgttatccatcgccgccggacacggcacgtattccgtggggcgggtgcagacaccaacgttggctatggtatgtgaacgctactgggagaaccgccgctttacgtccgaagcattctggcagctccatatcgcaacggacggttgcgacggcgaagtcgtgaaattctcatcctccgagaaatggaaagagaaagaaccggcgatggaactatataataaggtaaaggcggcaggttgcgccactgtcacgaaagccgagcgcaaggagaagacggaggaaactcccttgctctacgacctgaccacgctccagaaagaagccaacgccaagcacggcttcacggcggaacagacgcttgaaatcgcgcagaaactctacgaaaagaagttgataacctatccgagaacgggaagccgctacatccccgaagacgtgtttgccgaaattcccaaactgctcgctttcatcggcacacagcccgaatggaaagacaaggtgcgggcaaaagccgccccgacacgccgcagcgtggacgacggcaaggtgacagaccaccatgccctgctcgtcacgggtgagaaaccgctcttcctctccaaagaggacaataccatctatcagatgattgccgggcgcatggtcgaggcattctctgagaaatgcgtcaaggatgtgaccactgtcacggcggaatgtgccggagtggagtttaccgtaaaaggcagcgtcgtgaagcaaaccggatggcgtgccgtctatggcgaggaaaaagaggaaattaccatccccggctggcaggaaggcgacacgctgacaccgaaaggctcgtccattaccgaaggaaagaccaaacccaagccgctgcataccgaagccaccctgctctcggcaatggaaacggcgggcaaggaaattgaggacgacgcactgcggcaggcgatgaaggactgtggcatcggtactcccgccacacgcgcctccatcatcgaaacgcttttcaagcgcggttacatggaacgctgcaagaagtcgcttgttcccaccgaaaaaggacttgccctcaattccgtcgtcaagacgatgcgcatcgccgatgttgccatgacgggcgaatgggaaaaggagctggcgcgtatcgagcgcggggaactgtccgacgacaccttccgcaaggagatagaggcgtacacacgtgagataacctccgaactgatctcgtgcgacaagctcttcggcagccgtgactccggctgcgcgtgtcccaagtgtggcacgggcaggatgcggttctacggcaaggtggtacgctgcgacaacacggagtgcggactgcccgtgttccggctgaaagcgggacgcaccctgtccgacgatgaaatcaaagacctgctcaccgaagggcataccaagctgctcaaagggttcaagagcaaacagggcaagagtttcgatgctgttgtcgcctttgacggggaatataacacgacttttgtgttcccggaggctaaaaaggacaagaaattttcaggacggaagaaatagtattaactttgccacttgttcagagtaatgaattgttcttcgataccggattacactcatactttggatttagtggtggcactcggagggataccgagtgcctttttcttcctttttccaaccgattatcccgttaattatcaatccgctaaatccaaagtaatgaacaacaagaagaaaaacgagggtcagaccgacttttcctattacggtctgtacctgctggactatctccgcacgaacaagtttgaacaggctgacgacaccgctttcatacgggaacgggccgaccgtgccgccgaaacgtatgagagggcacggcttgaaggctatcccgccgatggtgcgcaggaactggcgatggacacgctgctgcgcgggctgcattattcccgttacgccatcctccgcgaagtcgtggaaaacgagtttgccgatgaagtgccggaagagaagcgtgaagcctttgtcctgaaactgctgccgcttgtcggcaacgtgttctccgtctatgacctctcggatgacaatttcgccctgtcttccgattacgacctgctctacacggagctgacgggagcaaccgtcctttacttagacgaatatggcgtttaaccgcaaacagaaactgcgggacaacatcgaggcgatacggacggcattcatccttgacagggaaaataggacagcgacaaccgaagagcgtgccatacttcaaaggtactgcggtttcggcggtctgaaatgtatcctcaaccctgcaaaggaactgacggatgccgtccggtgggcgaaatccgacctcgaactgttcgccccgacggtggagctgcacaggcttatccgtgagaacagcaaggacgaaacagagtacaagcggtttgtggattcgctgaaagcgtccgtgctgaccgctttctacacccccaaagagataaccgacaccatcgcggacgtgctggcagattacagcgtccgccccgcccgtatgctcgaaccgtcggcaggtgtcggcgtgttcgtggattccatgctgcggcacagccccaatgcggatgtgatggctttcgagaaggatctgctcacgggtacaatcttgaggcatctctatcccgaccagaaaatgcgcacctgcggttttgagaaaatcgaaagaccgttcaacaattatttcgacttggcggtgtccaacattccgttcggtgacattgccgtgttcgacgcggagtttcagcggagcgactctttcggcagacgctccgcccagaaaaccatccacaactatttctttctcaaaggactggatgccgtgcgtgacggcggtatcgtggcgttcatcacctcgcaaggggtattgaatagcaccaagacctccgtgcgtaacgagctgttcagtcaggccaatctggtatccgcgatacgcctgcccaacaacctgttcacggacaacgcgggcacggaggtgggcagtgacctgattgtcctgcaaaagaacctcagcaagaaggaaatgtcgcaggacgagcggctgatgaccgtgatacagacggacacgaaaaccgccctgaccgacaacgcctatttcatccaccacccggaacgcatcgtgcatacgatggcgaaacttgacacagacccctacgggaagcccgctatggtttatctgcacgagggcaaggcagcaggcatcgccggggatttgcgccgtatgctcgacgaggatttccattacaggcttgccatgcgcttgtattcgggttcaatccggcaggcaggaacggaagaaaaagttgccgttcaaaataaagtagagcgtcctgccataaaattggaaacagtatcctcggcgcagacggtggaaactccgacagaaaagccgcaacccgcagatgaaaagccggagatagaaccgcgcccgcaatattccgcaggcgtgcagctcaccctgcttgacctctgggggatgacggaagaggtcagccaaccgaaaacctccaaaaagaaaaagacggtgaaaaaggcagttacggcaaagtccactccgcccaaaccgaaagtcacggttacaccgacagctccaactgcaaaacccgcaatggagaataaggaggtgaaagcggagaacaccgccaagcctgccgacccggacgacatctatgccacactggactgggataccaatcctcccatcaacggtttctatgaaatgatgatgggtttgacgccggagcgtaggaaagaacttcgggaactggcaaggcagcataacgagaaacaagtggcggaaaagacggaagtgaaagccgtgccggaaacttcccgtgagcagccacgacaggaggaaacacagccggaggcagtcgccgcacctgccgttacagataccccatcggaagcggtggggactttccttttccccgacatcgaagcggaaaagccgaaggaggaagtcgtggacctttctccgcgtgcctaccaccgcacgccggagatgcacctgcgcgaagggtcgctggtggctgaccgggggcgtcataacatcggctacctgaaagacatcacgccatacggggcgacattccagccgctcgacctgaaaggataccagaaggaaaaggcgttgttgtatgtgtcgctgcgtgacgcctacgagcgtctgtaccgttatgaatcgctccggcgcgaggcaaatgttccgtggcgagagcatctgaatacctgttacgatgagtttgtcatgcgctacggcaacctcaacgccaagcagaacgtgaagttagtgatgatggatgcgggcgggcgcgacatcctttcgctggaacggatggaaaacggaaagttcgtcaaggcggacatcttcgagcatcctgtttccttcgcggtggagagccatgccaacgtaggctctcccgaagaagccctgtctgcgtcgctcaacaaatatggtacggtcaatctcgactatatgcgggagataaccgacagcacggcggaggatttgctcactgccctgcaagggcgcatctactacaatccgctcgtgaccggttacgaaatcaaagaccgtttcatcgccggaaatgtcatagagaaagcggaacgcatagaggcatggatgggtgacaatcccgaaaatgagcgtatgccggaggtgaagcaggcgttggaggctctgaaagatgccgagccgcagcgcatcgccttcgaggatctggacttcaatttcggggaacgctggattccgacgggtgtctatgccgcctacatgagccggctgttcgacacggaggtgaaaatcgcctattccgcaagcatggacgagttttcggtggtgtgcggctaccgcaccatgaaaatcacggacgagtttctggtgaaggggtattaccggaactatgacggtatgcacctcctaaaacacgccctgcacaacacctgccctgacatgatgaagtccatcggcaaggacgagcatggcaacgacatcaagatgcgcgacagcgagggaatacaactcgccaacgccaagattgacgagatacgaaacggcttctccgaatggctcgaagagcagtcgccgcagttcaaggagcggcttgtgacgatgtataaccgcaagttcaactgtttcgtgcgcccgcgctacgacggctcccatcagacctttcccgacctcaacctgaaagggctggcaagccggggtatcaagagcgtctatccctcacagatggattgcgtctggatgttgaaacagaacggcggcggaatttgcgaccacgaggtgggaaccggtaagacgctgataatgtgcatcgccgcgcatgagatgaagcgtctgaatttggcacacaagccgatgattatcgggctgaaagccaacgttgcggagattgcagccacctatcaggcggcatatcccaacgcacgtattctgtacgcttcggagaaggacttttcgaccgccaaccgtgtgcgcttcttcaataatataaagaacaacgactacgattgcgtcatcatgtcgcacgaccagttcggcaagataccgcagtcgccggaattgcagcagcgcatcctgcaagcagagcttgacacggtggaggaaaacctcgaagtgctacggcagcagggaaagaacgtgtcgcgggcgatgctgaaaggattggagaagcgcaagcacaaccttgaagcgaagctggagaaggtggaacacgccataaagtcacgcacggacgacgtggtggatttcaagcagatgggcatcgaccacatcttcatagatgagagccaccagttcaagaatctgactttcaacacgcgccacgaccgtgtggcgggattgggaaacagcgagggaagccagaaggcacttaacatgctctttgccatacgcaccatacaggagcgcacaggaaaagacttgggtgcgaccttcctctccggcacgactatcagcaactcactgactgaattgtacctgctgttcaagtacctgcgcccgaaggagctggaacggcaggacataaggtgtttcgacgcttgggcggcgatatttgccaagaagacgacggattttgaatttaacgtgacgaacaatgtggtccagaaggagcgtttccgctacttcatcaaagtgccggagcttgccgccttctataatgaaatcacggactaccgcacggcggaggatgtgggcgttgaccgtcctgccaagaacgagatactgcaccatataccgcccacgccggaacaggaggacttcatacagaaactgatgcagttcgccaagacgggcgatgccaccttgttgggcaggctgccgctttcggaaacggaagaaaaggcgaagatgctcatcgccacggactatgcccggaaaatggcactcgacatgcgcatgatagacccgaattacgaagatcatcccgacaacaaagcgagtcactgtgccaagatgatcgcggagtattatcaaaaatacgacgcccagaaaggcacgcagttcgttttctctgatttggggacataccagccgggcgacgggtggaacgtctattcggaaatcaagcgcaaactgacggaggactacggtataccgccaagcgaggtgcgcttcattcaggagtgcaagaccgacaaggcgcggaaggcggtgatagacgccatgaacgccgggacggtgcgtgtgctgttcggctctacctctatgctcggaacgggtgtgaacgcccagaaacggtgtgtggctatccatcatctcgatacgccgtggcgaccgtccgacttgcaacagcgtgacggacgcggagttagggcaggtaatgagattgccaaacatttcgccgggaacaacgtggatgtaatcatctacgcggtggagaagtcactggacagctacaagttcaacctcctgcactgcaagcagactttcataagccagctcaaaagcggtgcgatgggtgcgcgtaccatcgacgagggggcaatggacgaaaaatcgggcatgaatttctcggaatacatggcgttgctctccggcaataccgacctgttggacaaggcgaaactggaaaagcggatcgcatcgctcgaaggggaacgcaagtcgttcaacaagggcaagcgtgattcggagttcaagctggagtcaaagaccggcgagttgcgcaacaacacggctttcatagatgccatgacggaggactggaaccgcttcctgtcggtggtgcagaccgacaaggagggcaaccgccttaatataataaaggtggacggagtggattccgccgatgagaaggtcatcggaaagcgtttgcaggagatagccaagaatgccacgaccggagggttgtacacgcaggtcggtgaactttacggttttccgataaaggtggtgagcgaaaggatactcaaagagggattggagttcaccgacaaccgcttcgtggtcgaggggaactacaagtacacctacaacaacgggcatctggcgatggctgacccgttggccgccgcccgcaacttcctcaacgcgatggagaggataccctccatcatcgaccagtacaaggcgaagaacgaggtgctggagatggagataccgcagttacaggagatagcgggtaaggtgtggaagaaggaggacgagctgaagcagttgaagtccgaacttgccgcccttgaccgaaaaattcagctggagcttgcgccacccacgcccgaagtcgcagaaaaggagaatgaagggcaacagctcaagccggaagcggaagatgtgaggaacaggcaggcgcaatatcccgaaaatgcaccgccgcagatacgcagtccggcggatagtatcgttgccaaccatgtcataatcgggcgtccgggactgtatgccaaggaggaaacccggtccaaaggattgaaaatataacctaaggaattttatctgaagtattaataagggctatcccaaaaggtctaaaagtaaattttatcctttctgcaagtatctataggatggcaactgcatttttttctttttgggcagcccttattaaaatttattcttattttaggttatatacattcatgtccatttatgtaaaaaattcctgctgaccttgtttatgtcttgtcagtcaccatttgcaaaaccatatttgaccctcaaagaggctgaatttgataagtaacttgctacatactcataataaggagctaaatagaacacgaatgggaaatacacaaatgctaaactaaagaagatattggccaaaataaacgctataccgagagagaaacttgatttttcaacttcctaaaacggtgttgttcaaacatttctacttatttgtacttgccagttgaacctacgcttccctaataaaatgtctatggtaaaaagttaaaaaatcctcccacttttgttagatatatttttttgtgtaattttgtaatcgttatgcggcagtaataatatacatattaatacgagttagtaatcctgtagttctcatatgctacgaggaggtattaaaaggtgcgtttcgacaatgcatctactgtagtatattattgcttaatccaaatgaatattataaatttaggaattcttgctcacattgatgcaggaaaaacttccgtaaccgagaatctgctgtttgccagtggagcaacggaaaagtgcggccgtgtggataatggtgacaccataacggactctatggatatagagaaacgtagaggaattactgtccgggcttctacgacatctattatctggaatggagtgaaatgcaatatcattgacactccgggacacatggattttattgcggaagtggagcggacattcaaaatgcttgatggagcagtcctcatcttatccgcaaaggaaggcatacaagcgcagacaaagttgctgttcagtactttacaaaagctgcaaatcccgacaattatatttatcaataagattgaccgtgccggtgtgaatttggagcgtttgtatatggatataaaaacaaatctgtcgcaagatgtcctgtttatgcaaactgttgtcgatggatcggtttatccggtttgctcccaaacatatataaaggaagaatacaaagaatttgtatgcaaccatgacgacgatatattagaacgatatttggcggatagcgaaatttcaccggctgattattggaatacgataatcgctcttgtggcaaaagccaaagtctatccggtgctacatggatcagcaatgttcaatatcggtatcaatgagttgttggacgccatttcttcttttatacttcctccggcatcagtctcaaacagactttcagcttatctctataagatagagcatgaccccaaagggcataaaagaagttttcttaaaataattgacggaagtctgagacttcgagacgttgtaagaatcaacgattcggaaaaattcatcaagattaaaaatctaaagactatttatcagggcagagagataaatgttgatgaagtgggtgccaatgatatcgcgattgtagaagatatagaagattttcgaatcggagattatttaggtgctaaaccttgtttgattcaaggattatctcatcagcatcccgctctcaaatcctccgtccggccaaataagcccgaagagagaagcaaggtgatatccgctctgaatacattgtggattgaagacccgtctttgtccttttccataaactcatatagtgatgaattggaaatctcgttatatggtttgacccaaaaggaaatcatacagacattgctggaagaacgattttccgtaaaggtccattttgatgagatcaagactatctacaaagaacgacctataaaaaaggtcaataagattattcagatcgaagtaccacccaacccttactgggccacaatagggctgactcttgaccccttaccgttaggggcagggttgcaaatcgaaagtgacatctcctatggttatctgaaccattcttttcaaaatgccgtttttgaagggattcgtatgtcttgccaatctggtttacatggatgggaagtgacagatctgaaagtaacttttactcaagccgagtattatagcccggtaagtacacctgctgatttcagacagctgaccccttatgtcttcaggctggctttgcaacagtcaggtgtggacattctcgaaccgatgctctgttttgagttgcagataccccaagtagcgagttccaaagctattacagatttgcaaaaactgatgtctgagattgaagacatcagttgtaataatgagtggtgtcatattaaagggaaagttccattaaatacaagtaaagactatgcctcagaagtaagttcgtacactaagggcttaggcatttttatggttaagccatgtgggtatcaaataacaaaagacggttattctgataatatccgcatgaacgaaaaagataaacttttattcatgttccaaaaatcaatgtcattaaaataatggagcggtcaggaaatttctataaggcaatacggttgggatatatacttatctccattcttatcggatgtatggcatataatagcctctatgaatggcaggagatagaagcattagaacttggcaataaaaaaatagacgagctccgaaaagaaataaacaatatcaatattcaaatgataaaattttctctattgggtgaaacaatactggaatggaacgataaagatatcgagcattaccatgcacggcgtatggcaatggacagtatgctctgccgtttcaaggccacctatccagcagagcgcatcgatagtgtgcgcagtcttttagaggataaggaacgacagatgttccagatagtccggttaatggatgaacaacaatctattaacaagaagatagccaatcaaattccggttattgtacagaaaagtgtgcaggaacagtccaaaaagccaaaacgaaaaggtttcttaggcatattcggcaaaaaaaaggaagtaactccagcagtatcaaccactatccttcattcggtcaatagaaacgtaatcagcgaacagaaagtgcaggatcgccaattgtcggaacaagccgacagccttgcagctcgtaatgcagaacttaacagacaactgcaagaattgatttgccaaatagaagaaaaggtacaaaccgaactgcaaagccgggaaaacgaaatagttgccatgcgtgaaaagtcatttatgcaagtaggcggtttaatgggattcgttcttctattgttgttaatttcctacatcatcatacatcgtgatgcaaaaagcattaaacaatacaagcacaagacaactgatttgataaggcaactggaacaatccgtacaacggaacgaggcactgataacgtcaaggaagaaggcggtacatactatcacccatgaactgcgcacaccgctgacagcaataacaggctatgccggactgatacggaaagaacagtgtgaggataagtccgggcagtatatccaaaacatactgcaatcctccgaccgtatgcgggatatgcttaacactttgcttgacttcttccgcctggacaacggcaaggaacagccccgtctgtcaccctgccggatttcagcaatcacgcacacacttgaaacggagttcatgcctgttgccgtgaacaaagggctgtccttgtccgtgaagactggacacgatgccattgtattgaccgacaaagagcgaataatacaaatcgggaataacctgctgtcaaacgctgtcaagttcacagaagaaggcggtgtttctttgattactgaatatgataatggagttctgacactggtcgttgaagatacaggtacaggcatgacagaagaggaacagaaacaagcgttcggtgcgtttgaacgtctatcaaatgccgccgcaaaggagggtttcgggcttgggcttgccataatgcgtaatattgtgtcgatgcttggcggaacaatccgtttagacagcaagaaagggaaaggcagtcgtttcacagttgaaatttctatgcaggaagctgaagaacagcttggatatacaagcaatacacctgtttatcataacaataaattccatgatgttgtcgccattgacaatgatgaggtattacttctgatgctgaaagagatgtattcccaagaaggaatacactgcgacacttgcaccgatgctgcggcactgatggaaatgatacgccagaaagaatacagcctgttgctgacagacttgaatatgcccgatataaacggtttcgaattgctggaactgttgcgttcgtccaacgtgggcaattcaccaacaatcccggtggttgtggcaaccgcttcgggcagttgtaacaaaggggaactattggcaaaaggctttgccggatgcctgttcaaaccgttctccatatcggaactgatggaggtttccgacaggtgtgccataaaagcgacaccggacgggaaaccggacttttccgccttattgtcctatggcaatgaagccgtcatgctggaaaagttgataactgaaacagaaaaggaaatgcaggcggtacgggatgcagcaaaagaaaaagacctgcaaaagctggattccctgatccaccacctgcgcagttcgtgggaggtgctccgtgccgaccaaccgctgaatgtactttacggattgcttcgtggcgatgctctcccggatggtgaagcgttaagccatgccgtgactgccgtgctggataagggagtggaaataatacggttggcagaagaggaaaggagaaaatacgaagatgaataagacaaaaataattgtggtggaagacaacatcgtgtattgcgaatatgtctgcaatatgctgtcacgggagggctaccgcaatatgaaggcttaccacctctcaaccgcgaagaaacatctgcaacaggcaacagataatgatatcgtggttgccgacctgcgtctgcctgacggcagtggcatagaccttttgtgctggatgcgaaaggagggaaagatgcagcccttcatcattatgaccgactacgccgaagttaataccgccgtggaaagcatgaaactcggctcgatagactatattcccaaacagcttgtggaggataaacttgtccccctgatccgttccatactgaaagaacgtcaggcaggacaacgccgtatgcctatattcgcccgtgaaggttccgcctttcagaaaatcatgcaccgcataaggctggtagccgccaccgatatgagcgtgatgatatttggtgagaacggcacgggcaaggagcatattgcccacctgttgcatgacaagagcaaacgtgcaggcaagccatttgtggcggtggactgcggttcactctccaaagagcttgcaccgtcggctttcttcggacacgtcaaaggtgcatttacaggtgcggacaatgccaagaaaggatatttccatgaggcggaaggcggcacgttgtttctggacgaggtaggaaacctcgcgttggaaacccaacagatgttgctccgtgccatacaggagaggcggtatcgcccggtcggagacaaggcagaccggaatttcaatgtccgcatcatcgctgctaccaatgaagatttggaggtatcggtgaatgaaaagcgttttcggcaggatcttctgtaccgcctgcacgacttcgggataaccgttcctccgttgcgtgactgtcaagaagacattatgccgctggcagagttcttccgtgatatggcaaacagagagctggagtgtagcgtgagcgggttcagttccgaagcacgtaaagcgttgctgacacacgcatggccgggcaacgtgcgggaacttcggcagaaagttatgggtgctgtattgcaggcgcaggaaggtgttgtcatgaaagagcatctggaacttgccgtgacgaaaccgacctctactgtcagcttcgccttgcgcaatgacgcggaggataaggagcggatattgcgtgcgttgaaacaggcaaacggcaaccggagtgtcgccgcagaactgctcggcataggcaggacaacactatacagcaaacttgaagagtatggacttaaatataaattcaagcaatcatagcccgtaattcactgaatttggctatctttgcataacatttgagaaaaacggcgattggcaggagcttttcgccgccaacatataggataagaccgcaaggcgtttcaagcgaaaatctggtaaattggaactacggagacgattgcgtgatgcttatgctatgcttacgcatagcgtgcattcacgtactctccgtaaaggctttaccagagccatcgcttgaaggtagtgtgaattgcacgctacttttttacccttgcctaacgaaaggaaacgattatgggtaaagttcagattctcgccgtactgacgatggacggatgtctttcttcagagttatatgataaagcacatcaggatttgtgccttgaccgttgcggtcttgatgaaatcaggaagaaagccttttaccgtgtgacaccggactattccatttcaatgctgcacgaatggagaaaagactgcacaaacatccgttacctcgcggaagccacaccggacacggcagactatataaacggactgctgcggatgcacgctgtggatgaaatcatactatacaccgttcctttcatatccggaagcggacgacatttttttaagtcggctctgccagagcaacactggacgctttcctctttgaaaagctatcccaacggtgtatgtcgcattatctatatccttgataaaaaagcaagatagccaaaatgtgcggcaagcatacatttctattttcaggaatagaataaatgttccgattacaaacaatttaagtcggagataatttgtccttgtgaaaaaatactgaattttatacctctgaaatccagcactttgtaaaattgagtgttggattttttattttctgccgcgttttttgccaattatattcatgtgcgcacgcagaaaacaaagtgtaattttcaaaattgacagaaccatgaattatttcttgctggcggaaaccgactttttccgcctgataaacgaagccggcgactgcaatatggaaacggcatacacggctttcgccacccaagtgatcgaactgtgcaacggcggcatggacatgaaccttaccgtcatcgcgcttgcctacatcgaaatcgagttgcagcaccatcccgtacgtaatctgtcagaagaaaaaagagagattgccgcctacgtcagcaaggctctgtctttcgtaagaaagatgcagaaattccttgccacgccccaagtgccaccactaatatccgccaacaacgcaacagaaaccaccgccagccttcttcaatggacgggcaatgccatcgacctcgtggaacttatctacggcatagacgtgatgggctgcatcaacaacggcaatatgccgctcaaacagctcgccccacttctctataagatattcggggttgattctaaagactgctaccgcttctacactgatatcaaacgccggaagaacgaaagccgcacctatttcattgacaggatgcaggaaaaactgaacgagagaatgttgcgtgatgaggagttggagcggatgagaaaataaaaaaatatccattacatatgagaagacaggaatactcgtatcctgtctttttattttcatttaattatatattaattagcacaatatatgtgagtttttcattcctataaggacaaatttcagaaacgtatgtctggtaaattattgagtcatcatagtatgaacatatatcattactaaaaacaatgaaacaacttccataagattgtggttgtaaaaatcgccatttaatagcccgttttttttgtaaaattcgccaattaaaaaaatatgattatctttgcattatattttataaggtatggaaacagtaaatagaatacttcaagagaagattacagcacgaatcgcgcccaataaagcagtactgatttttggtgctcgccgtgttggtaaaacggtaatgatgcgtaaaattgtggacaactattcaggtaggacgatgatgctcaacggcgaagactacgacacattagcactattggagaatcgctcaatagccaattatcggcatttattggatggtattgatttgctggctattgatgaggcacagaacataccacaaatcggtagtattctgaagttgatagttgatgaaataccgggaataagtgtcttggcaagtggttcttcgtcattcgatttgctgaataagactggtgaaccgttggtcggccgcagtacgcaatttctccttacaccattctcgcaacgggaaatcgcacagacggaaacggcacttgaaacccgccagaacctcgaagcgcgcttgatttacggttcctatcccgaagtagtaatgatggagaactatgaacgtaaaacagactacctacgtgatattgtcggtgcatacctgcttaaagatatcttagcaattgacggcttaaaaaattcgagcaagatgcgcgatctactgcgattgatagcttttcagttgggcagcgaagtttcttacgaagagttaggtaaacaactcggcatgagcaagacgaccgttgaaaaatacctcgacctattggaaaaggtcttcgttatctatcgtctgggggcttattcgcgtaacctacgcaaggaggttacaaaagctggcaagtggtacttctacgacaacggcattcgcaatgccattatcggggctttctcaccgctggccattcggcaggatgtcggtgcgctgtgggagaactacatcatcggagagcggcgcaaagcgaacttcaatgagggactgcacagggagttctatttctggcgcacctacgacaaacaggaaatcgacctgattgaggagagtgccgacagtcttaccgccttggagttcaagtggggaaataaaatgccggccgcaccgaaagccttccaagaagcctatccctatgccgagtttcatgtggtaaatcgggagaattatttggagttcgtataatcaataaattacgtatatggaaacaaaactacaatccaaacagcaatatccgcggtttatccaaaataaaccgtgtggtattgacaaattcgatggaggttcgcaagaaaggttggcaaaaactattgctcgccatttttgtcagaatgattcattggatgaggaatgtactttacctcgaattatcggcatcgaaggtatttggggatctggaaaatccaacgtggttaaaatgttggaacgtgaattatcagacgactattacttttttgagtatgacgcatggggacatcaagaggacttgcaacgccgctctatattggaattgcttacaagcaaacttattgatgatggtatcctatctggaaatgcaacaataaaagtcaaaggtggaggtacgaaaaccgtatcatggtctgaaaagctgaaatatttattagcccgtaaaacggagaccgtaaccgaaaaatatccccttatcagtaatggtatggttgcggcatttttggttgcagttttaactccgatatttacatttattgcgtatgcagtaaaacctacacccacaacatggtggttttctttattgtctattatcatagctgcactgccagttcttattgcattgtgcgtttggaaatgggcatatagcaaagatcataaatatggatggagttatatgttagctatttatcaagataaagtcgaaaaggacgtttgctatgagactttgagcgaagacgaaccaacggtttacgagttcaaaacatggatgtaagacatttctgattttatcaaggaaaaaggacaacgtaaattagtccttgtttttgacaacatggatcgtctccccgctgaaaaagtaaaagaattatggtcttctatccatacgttcttcgccgatagcggttttgaaaatgtttgggctgttattcctttcgatgaaacacatttagcttgtgcattcggagatgagaccgacgaacaaacgaaacaactgaccaagtattttatcaataaaactttccctattgtttatcgtgttgctcctcctgttattaccgactatcgaagtatattcaacaaactgtttgttgaagcatttggagaaacagaaaatgaagcgaaagaaactataaatcggatattcagattggtaaatcctaatgccaatgttagggaaattatatcatatatcaatgagatggtcgctcttaaacaagagtggtgtaacgaaattttgatgataaacatagcattgttctgtttgaagaagacggatattctggcaaatccagtagaacaaatattgtccggcgactatctgaatggcattcaaacaataattaacaatgatctgcaaacacaacgcgaaattgcagctttggtatatggtgtcgatgttgaagatgctcgacaaattccattgaaaaaatatattgaaggctgcatcaacggagaagaagaccacgacataaatcaatatgcagagactaataaacaatttgacactgtattagaagaagttatacaatgtatggacaatgcgcttatcgataagattatacattgtttgcataaattaactcgaaagagcgatgttattctgcgtgtatggcaaagaatagcacaattgaaattaaaagaatccatagagaagcaggtgttccctgtcgaataccaagaactgctgttgcatttagacacggaaagccaaaaccatgtgattgctcaattatataagaagatagttcggttcaatgacttcaatggcggcgactatttcaaaacgttagatgcaatagacaggtttattgcgcaaaataagttggcgtgcgattttacgtcattgattgaagcaaaaacagtcaagccaaatacatttatcgattatattcaagctgcaaatgcaacagatgctgcctatcgggataacgcgacaactaaagcatataaatattatcaagtagcaacaaattcggaggcgctcgataattatttggcaaacttactacccgataatttcgaccatgcagatattgtaaaaacgttaaaagataattctacctatacgtttccaacgcttttgcaagcgatcacgaattgcattgatgaacagaatgtaaataaagataatataggggctatatttacaacctatcgtttattggcatctgacgaagaaagacctttacctgtaacgttagattcaacctacataaatcagttgcattctgaattagaaactgatggccgaaacattaaagagtctggatattacgatttagtcgccatgcaattggcacatggtcattccgtttccttaatagagggtggagatataaaatatgttgcagaactcatggactattatgtggatcatggagacttattagtaaatagtgtgggatggaatataccgctattaaatgaaacactacaatacatggtaaatcataaacttggctataaattattgctctcagacatattgccccaatttgaagatattaagaacagaataggtgtaacggatgaggtatttatcgagcatttagcagagtggaataccgatttggataagtatatcactaagaacaatattaaagatgtaattcctgacgcatctttttacgatttgaccactaaaataagcaatgtcctgaccgatcatatcaataaaatagcgttcgaagcgttgtctgaaataagtgttgatacattatacgcccaaagaacagcacatacatcatattattggtttgtcgcaataaaacatttactggctaaaatcaaatccttgccagataacttgactgaatttggcaaaaagattctgatggatattgcttctggaactcaaagtttgaatcctttccctaattgtttcaagaatatagttgaaagattggataaacgaaaaattaaatcgacagttaccgatataagaaatgatttctgcatcggtaaaaagactatcaatgcaataaagtttcaatttttcgaaacatggcttagatcgcatggtaatttgaaaagtcaagctggagacgttattgataaaatagtgaaacctgtaatttccgatggggcatgccgttcattgattctgcaaaacaaagatttttatatggatttaataaatacagcaggggatgatgcttatgaattgaaaaagagtctccgaaacctcatacaaaaagattcagatccgcaattggttaaatttgtcaattcgatagattcagtacctgaggttgaaaccgcgtaagtatttgtctaacaagtccgaattttacgattttacccgtcagaactgaagtgccccccaaaaaaattgtatccaacttttgggggtcacttcaaacttcgatagggataattttcaattttggggacttgttagacagtctcattatctggtagcagtttacacagcaccggatcgtttttgatacgctccagttcctcctgcacaatctgcttcacctcttccttgatgcgccggtagttcgcctgcaccgtttccttcatgcggtcgttgccgtcctcgtccgtgaagtttgtaatgacgggaattttcttgtaggcactttcttcccgtttcaccttttcggcatccaccacaatctcgcaatgaaaaatcttctgctcgatacgctcgttgaagttgtcggatacagaaccgacaaacattccctgcgtaagcccggaaatcttactcggtggaatgagcgcgtccatctgcgtgttgatggaggtggaaacatcctgccggttgatggagatggactgccgtttctgcaacaccttaccgaaccgctcggagagcgtcttggctgtttcccccaccacctgaccggagaaaatattgccgacagtgttcatcaccactttcgcctctttgtccccgtagtcacgcactaactggctgaaatcctgaaagcccagacacacggcaaccttgttgcttcgggcggtagctataagattgtccaaccctttgaagtatattgtgggcaactcgtcgatgatgaccgatgacttcagcatccccttcttgttgatgagcttcacgatacgggaattatacagaccgagtgccgcaccgtagatattctgacggtcgggattgttacccacgcagaggattttcggctcttcgggattgttgatgtccagcgtaaactcgctgtctgacatcacccagtagagctgcggtgaaatcatcctcgaaagcgggatttttgccgacgctatctgacccatgagctgctccgcagcccctccaagccacgcatccatgaacggcgaaaggtagttctccagctccggataagaggtcagtatcggaaatatatcctcgtaacggcggttcagaaactcgatagcatggggaaacgtgcaaaacttcccgttctgatagattttgagataccagataatactggcaaacagaatgataggtgactccacgaagaagtcgccctgcttttgcacccacgttttattgaggttgagcattattgtgtaggcactctcataggcatccgtaatatcttccataaaatccgggtgaatgggattgcaccgatgagagcgtcgcgggtcgtcgaagttgatcacatagaacttcggctttaccttgtagccgtccgggtggttcagcaaatggttgtaggcaatagtagataggtcgggatacttgaaatcgtagatgtattgactaaagcccttttcaatctgttgcttgataaaattgtttaccacggcataggacttgccgctgcccggcgtacccaacacgatggacgcacggaagggattaactacattgatccaaccgttgttccagcgtttcctgtaatagaaacgtgtcggcagattgaccgaatactcgctttcgataagcctcgtttcctgcatgaaactctcgttctcgttgttgaaaacatcctccatcaaattgtgtttcaacaggcggctcatccacagaccacccatcaacaggcagacatagcccgttccaatggtaaggacatacagtcccgtcaccgcttcaagcggcagcggcaggggcagcaaccaccagttcaggaaaaacagcacgaacccgacggcaaatgctgtccagattctcccccaagtgattttctcacccttgacacccttcgtacccagacaggacaaggcaagcaaaaggacggaaaacagcttcgtgtagagaatggaatggaacagccccgccgtgcggtcgaagttcagaaggattttgtccaccacgccgatgttcacgccccacagccggatggcttcgtagcagaaccagtacacgttcatgaccactaaaatgatactcacggcacgcagaaaatccatgattttcgccaatgccctcaaatcgtcttcttgttgtgacatacattgattttttaattgttgatactctgattacatacccaagcccttgcgttttttcttctttttgcgcttcatcgcccggatgaaagcctcttcctcggcatctaccgccggaccttcgggagtgagcaagcccataccgcccgatatatcttcactgtcgtaggcggtctgcccgtgtgccttgtccgcagcatccacagggatggatagcggtatcggcggttgtccggcgtatggcagggtgaagtgttcctgcaaggcattcgccgaaagctccttacccatgcgcgaaccgttcagcacgcatcccgtgcggtggtcgatgaaggtagccccatagatgcgcccttcctctgtgtagcgcagtacggtgtcgatgcccttctctttgagttgggatacaaatttgtccttgtcataagtgccttgcagcacggaaaggacggtgcgtttcgtcatgtctgccagtttcctatccttgatttccgatttggaacggacaaacttcttctgtacggcttcatagcctgcggacttcccgaaaagcgaggatttgaacgggttgcccaccttgttacccttgtcgtccgtgacggaatagaccagcccgtgatactcccgtccgcgcacgttgcccctcgcttcctccaccgtcatattatataaggaaaggagcgcacggtattcgcccatcgtctggaaacggtactgcccattcagagccttcacggtgttgcctacctgcttcttcacatcacctgccgatgcggccaccttgcgcaacggattatccaatctctgatttttacgttctgccggatgcaatccgtacttctgttccagttccctgcggatacggtcgctgcggcggtagagaaaatcccggttgagccttttcccgttctcgtccacgttgaccgtcacgatgtgcaggtggtggcggtcgatgtcctcgtgcttgaatacaagataaggctggtttccgaaaccgagtttttccagatactcgcgggcgatattctgcaactcaatatcggtcagcacatcctccgggtgcgggttgagagagatatgcaccaccggcttctcgatcttcatctgcggtggcaggaaggtgagaaaaccctccatcgccttgcctatgtccaccgttcccgaaccgtcattgtagatgcggttggtggtgagaagccgcccctgcgcctcgttaatcttctccccgttgtaggcaatcgcgccgtacaacgaacttcctacactgatttttgcgaccattttgcctccatttcccttgaaagttccacaatccggcggctcagtttcacgagttcgacggtgtgttgctctaatttgtagagcaacgccatcgcctttttctctgaaaaatgcagcctcagttccttcacgacttggttgtaattcgtacccacggcacggaattgtgcatgaaaatccgacagtttggtgtaatagtccaccaacgtcttgtccaccttcagcaccttgaacggttgcccgaagaagtgcgctttgaggaaaacagaccgtgcatagacacccgattttccgaacatggcgaggaaacggttgtgttcctcctcgttgaaacggacggtgtaccggtacaccgccggatcaagtttgggatttctccctgatttgcttttccttttctctttcatattactttggatttagcggattgacggcataagccgccgcttcggattacagcaccgcagttctgaaaggcttcccgacttcggagggaaagcccgccccctgcaagggcaagtgcttttcgtggctgctcaaaatattttgagcggctgaaaagacatcttgctatgttcaggtgaacataaaaatccgtcaggggacggattgggaaaatacctttcaggactccgggccgcgcgtcatcggcgaaccctgctgtccgggtgcaaagttacgcccttaaagcggtatcggacagatgcttgacccggtcaatgactgccaaccggcgcaacgtgccgccacttgccggagaagtgatacaggttccaaaatatacttgtttatttgcagcatgattcaagaaacgaacgatttgaagatatgataaacggaacattcaaatacccggaaatccgcttcttcggatacttgccgaaacggatacccgaaccgtcggaaacccggttctccgacaattcggtgacgtatggattcaatgacttcatgacgcaatgtcgtcaatcaccatttgtccgacgcaccgcttcaccacagaaccggatacgcgacgacccgcctgcgtgtgtagtcacggaagcggatggtgcgacagccaaatccgtatggaaacagaaaaacaaatcatcaacaattaaaataaatggaactatgagtaaggaaatcttcgttgcattcgcaacacagaaaggtggcatcggcaaatccactgtcacggcacttgccgccagctacctgcacaacgtgaaaggctacaatgtcgccgtcgtggactgcgacgacccgcagcacagcatccacgggctgcgcgaacacgaaatggggcttatcgacagcagcacctacttcaaggctctcgcttgcgaccatttccgccggatcaaaaagaacgcctacaccatcgtcaaaagcaatgcggtgaacgccctcgacgatgccgagaggatgattgccactgaggacgtgaaacccgacgtggtgttcttcgacatgcccggcacactccgaagcaacggcgtgataaagacgctctcgcagatggactacattttcactccgctgagtgccgaccgctttgtcgtggagagtaccctgaaattcgtcacgatgttccgcgacaggctgatgactaccggacaggcgaaaacaaaggggctgcatctgttctggacgatggtggacggcagggagaggaacgacttgtacggcatctacgaggaagtgatagccgaaatgggctttccggtactttccacccgcttgcccgacagcaagaagttccgccgtgacctttcggaagagcgcaagagcgttttccgctccaccatcttcccgatggacacggcactgctgaaagggagtggcatccgggagttttccgaagagataagcgacatcatcagaccgcagtgagcatgggcagcaggaaagtgaacacggaaggcatcgacgaggaactgctgttagcctccatcgggcggcgcacacaggacgggacactgcgccccgcacaggaagtacccgcagctgcaccgaccgaagaggacaccgccgcaccggaaccatctcctgtgcaacccgtaacacgggaaaaagcgcagagggaaagtggacgccggaaaaggcaggacgaggactacaacgagctattcctgcgccgcaacgagataaagacccgccaatgtgtctatatcagccgtgacgtccacggcaagatcctcagaatcgtgaacgacatcgccggaggggaaatctcagtaggcggatatgtggataccgtgctgcgccagcatctggaacagcacaaggagagaatcaacgaactgtacaagaaacaacgtgaagatctgatttgaaaatggaaaaagaaatgacaccgaatgaaaaaagaccacagcaagactgcggaggtatgtttacccaagtgcaggcgagtgtggaaatactgtcgcctgtcccggtaagcggcaaatgcagtgagaaggactatgaacgcctgttcatccgcgacccggaagtaaaggcacgtgaggggaagatggcgtatgtgcgcccggagtaccacgagcgtatcatgcgtatcacccgtgtaatcgggcatgaccggcttacgctgtccgcttacatcgaccatgtgctgacgcaccacttcaaccagtgcgaagatgcgataaagagcctttatgcccgaaattacaattcagtattctaaccaaaaacggaaggatatgaattacacaatcagcatgacagacattctgctggcggtatcggtcggctgcaacctctggttcctgttcctgctcctttacgagcgcatcatggacacgcggattgtccgcttcttcaagggcattgtcggattatggcggtcactggacgggaatgaggctaaacgcatagcggcacacgaggaagtccctgcggaaaaggcggacatcatcggcaagagccgtttcaggatggcatccacccggacaaccgctgccataccgacgcaagaagccgccactattgaaaaaggcattgagctgtcggaggaagaggctacttttgacgacggaaaaacgggaaacgcatcccgcccggcacaagtcccggaggaaaaactcgatgagaccttcacgagcataccgccggaggaactgggatacggggacgacgaaccggaagaggacgcctcggacacgccacgggcttcgggcagcagctttgacgagattgacgacgcctgcaagaccgccaaaaacccggacgcgacacaggcggaacgtgaaaaggcggctaaggtgttcaccgacatggagggcacggagttgtacgagaaaatgatggaaggctcttcggagataggcatccgcatcaaggggcttatcgagattcggctgaagaaatctgaaaaggagttcgtcgtgccggacaacatcgaggagttcgacattcgcaactatgtatgacaacaataaaagaaatgaacatgaaagaatgacatcaacccacgcggcgaggaaacgcaaggcgcatccccatccgcaacggacacgcccacgtccgtggaaacaaacgggcatccactaaaaccaaagtaaagaaacaaagtatcaaccgcccgacaaaggaccatccacccttttgacggcaaaaaacaagaacagtttatgaacaagaacatcttgaaaaacagaaaagcaatcctctccgcggcacttgtcatcgccgcaaccgcctccgctttcgcgcagggaaacggcatcgcgggcatcaacgaagccacctctatggtgagttcttatttcgaccccggaactaaactgatatacgccatcggtgcagtcgtcgggcttatcgggggcgtaaaagtgtacggcaagttttcatcgggcgaccccgacaccagcaagacagccgcctcgtggttcggcgcgtgcatcttcctgattgttgccgccaccatcctgcgctcattcttcctttaataaataatgtatggctgaatacccaatcaacaagggtatcggccgtccggtagagttcaagggcttgaaggcacagtacctcttcatcttctgcggaggtctgctggctctcttcgtcctgttcgtcatcctctacatggtcggtatcgaccagtggatatgtatcggcttcggcgcggcatcgtcctccctccttgtatggcagaccttcgcgctgaacgcccggtacggtgaacacgggctgatgaaattaggagcggcacggagccatccccgataccttatcaaccggcggcggataacccgtctgttcaaacgacaacgaaaggaagaaagacaatgaggaatacatcgaaaatgacaacactggaaaacaggttcccacttttagcggtggagcatggctgcatcatctcaaaggacgccgacatcacggtggctttcgaggtggaactaccggaactttacaccgtgacgggtgcggagtacgaggcgatacacagttgctggtgcaaggctatcaaggtgctgccggactactccgtcgtccacaaacaggactggttcatcaaggaacgctacaaaccggagcttcagaaggacgacatgagctttttaagccgctctttcgagcgtcacttcaacgagcgtccgtacctgaaacacacctgctacctctacctgaccaagacaacaaaggagcgtaaccggatgcagagcaatttcagcacgctgtgccggggacatatcatcccgaaggagctggacagggaaaccacgaccaagttcttggaagcctgcgaacagttcgagcgcatcatgaacgacagcgggcttgtcaggctgcgccgcctctccaccgatgagattgtgggtactgagggaaagacgggacttattgaacgctacttctcgctcatgccggaaggtgacaccaccttgcaggacatcgagctttcggcaagggagatgcgcatcggcgacaaccgcctgtgtctgcacaccctctccgacgcggaagacctgccgggcaaggtggctaccgacacccgttacgagaagctctccaccgaccggagtgactgccgactgtcattcgcctccccggtggggcttctgctctcctgcaaccatatctacaaccagtatgtgctgatagacaacagtgaggaaaccttgcagaagttcgagaagtccgcccgtaacatgcagtcgctatctcgctattcaaggagcaacagcatcaaccgcgagtggatagaccaatacctgaacgaagcccattcctacggactgacctcggtacgggcacacttcaacgtcatggcgtggagcgacgatgcggaggaactgaagcatatcaagaacgacgtgggcagccagttggcaagcatggaatgcgtgccgcgccacaacaccatcgactgcccgacactctactgggcggcgatacccggcaatgcggcggacttcccggcggaagagagtttccacaccttcatcgaacaggcggtgtgcctgttcacagaggaaaccaactaccgcagctcgctctcgcccttcggcatcaagatggtggacaggctcacgggaaaaccgctgcaccttgacatctccgacctgcccatgaagcgaggtatcacgaccaaccgcaacaagttcgtgctgggtccttcgggcagcggcaagtctttcttcatgaaccacctcgtgcgccaatattatgagcaaggcgcacatgtggtattggtggacacgggaaactcctatcagggcttgtgcggcatgatccgacgcaagacaggcggagcggacggtgtgtatttcacctacacggaagataagcccatcagcttcaacccgttctacaccgacgattacatcttcgacgtggagaagaaggacagcatcaagaccctgttgctgacgctctggaagtcggaggacgacaaggtgacaaagacggagagcggcgagctgggcagtgccgtgagtgcctatattgagcgcatccaatccgaccgtagcatcgtgccgtcgttcaacaccttctacgagtatatgcgtgacgactaccgcaaggaactggcacagcgtgacatcaaggtggagaagtccgacttcaacatcgacaacatgctcaccaccatgcggcagtattaccggggcgggcgttacgatttcctgctcaactccacggagaacatcgacctgctcggcaagcggttcatcgtcttcgagatagattcgattaaagaaaaccgcgaactgttccccgtcgtgaccatcatcatcatggaagccttcatcaacaagatgcggcggctgaaaggcgtgcggaaacagcttatcgtggaagaggcttggaaggccctctcatcggcgaacatggctgaatatctgcgctatatgtataagacggtcagaaaatattacggcgaggcaatcgtggtgacgcaggaggtggacgacattatcagttctccggtggtcaaagagagcattatcaacaactcggattgtaaaatcctgcttgaccaaaggaaatatatgaacaagttcgaccagatacaggcgttgctcggactgacggaaaaggagaagtcgcagatactctccatcaacatggcgaacaacccttcacggctctacaaggaggtgtggataggcttgggcggcacgcagtcggcggtctatgccacggaggtcagcgcggaagagtatctggcgtacaccaccgaggaaacggaaaaagtggaggtttaccgtctggcggagaagctgggcgacgacatcgaagccgccatccggcagcttgccgaaaggcggagaaacaaggaataactaaaaaacagaatgtatcaaccaaaaaagaaaaacgcgtatgaatttaccaaaagtgaaaatgctgcaagtcagcaagtgccttatcggattggcggtcatgatgctgcaatcctgcgacgtggccgacaaccgccgcgacatgctgtgcgggaactgggagagcgtggagggaaaacctgacgtgcttatctacaaggagggcgaagcctacaaagtgacggtgttccgtcgtagcggtctgcgccgcaagctcaagccggaaacctatctcttgcaggaggagaacggcaacctgttcatgaacaccggcttccgcatcgacgtgtcctacaacgaggccacggatgtgctgactttctcgccaaacggggactatgtgcgggtgaagccgcagccgggacatccgaccgaagaataacaaccactaaaatccaaagtaacatgagaacaagaataacaatgattatctgcctgtgcctgcttttcgcgggcagggcaagcgcacagtgggtcgtaagcgatccgggcaatctagcgcagggcatcatcaatgcctccaaaaacatcatccatacctccaagaccgccacgaacatggtgagcaactttcaggagacggtgaaaatctatcagcagggcaagaagtattacgatgccctcaaatcggtgaacaatctggtcaaggacgcccgcaaggtgcagcagaccatcctgatggtgggcgacatcacagacatctatgtgaacagtttccaacggatgctccgtgacgggaatttcagacccgaagagctttccgcaatcgctttcggctacacgaaactgctggaggaaagcaacgaagtgttgacggaactcaggaacgtggtgaacatcaccacgctctccatgaccgacaaggagcgcatggacgtggtggaacgctgccactcgaagatgaagcgttaccgcaacctcgtgagctactacacgaacaagaacatctccgtgagttacctgcgtgcgaaaaagaagaacgacctcgaccgcatcatggggctgtacgggaacatgaacgaaagatactggtagcctatgaagttcgacaaccttcatcagattttacgttcactttatgagcagatgatgccgctgtgtggggacatggctggtgtggcgaaaggcatcgccgggctgggtgcgctgttctacgtcgcctaccgggtatggcagtcgctggcgagagctgaaccgatagacgtattcccgatgctccgtccttttgccatcggtctgtgcatcatgttcttcccgactgtggtgctgggcacgataaacagcatcctctcacccgtcgtacagggcacggcaaagatgctggaggcggaaacgctggacatgaaccgataccgggagcagaaggacaaactggaatacgaggcgatggtacgcaaccccgaaaccgcctacctcgtgtccaacgaggaatttgacaagcaactggaggaactcggctggtcgccctccgacatggtgacgatggcgggaatgtatatcgaccggggaatgtacaacatgaagaagagcatccgcgacttcttccgcgagatactcgaactgctgttccaagccgccgccctcgtgatagacaccgtccgcaccttctttctcgtggtgctggcgattctcggtccgatagccttcgccctgtcggtatgggacggtttccaaaacacgctcacgcagtggatatgccgctatatacaggtctatctgtggctaccggtatcggacatgttcagcaccatactggcgaagatacaggttctgatgctgcaaaacgacatcgagcggatgcaggcagacccgaacttctcgctggattcgagcgacggggtgtatatcgtattcctctgcatcggcatcatcggctactttaccattcccaccgttgcgggctggattatccaagccggaggcatgggcggttacggtcgcaacgtgaaccagatggcgggacgagccggaagcatggcgggcagcgtggcgggtgcagccgcaggaaacgcagtcggacgtgtcggcaaattgctgaaataatcaatgtgcaatcataaattggaaaatataaatggaattcaaatcacttagaaacatcgaatcgtcgttcaggcagatacgcctgttcggtatcgtcttcctctcgctgtgcgccgtggtgacggtgtggagcgtgtggaactcctaccgtttcgcagagaagcaacgggagaaaatctatgtgctggacaacggcaagagcctgatgctcgccttgtctcaggatttgtcgcagaaccgcccggcggaggcacgggaacatgtgcgccgtttccacgagatgttcttcacgctatcacctgaaaaaagcgcgattgaacacaacgtgaaacgtgccttgctgctggcggacaagagcgtgtaccactattattcggacttcgcggagaaggggtactacaaccgcatcatcgccgggaacatcaaccaagtgctgaaggtggacagcgtggtgtgcgacttcaacgcctatccctaccgtgccgtgacctacgccacacagaaaatcatccggcagagcaacgtcaccgagcgcagcctcgtgaccacctgccgcctgctgaacgcatcgcggtcggatgacaacccgaacggttttaccatcgagggtttcaccatcattgagaacaaggatttacagactatcaaacggtaacaggacatgaaaagtatcagaaaatcaatgtggggcatgtattggaaactccacgacaaacggaaacgcttggcggcaagtctcaaagggtatctggacggcttgccgccggaaacacgccgccgcatcgtgctggggatgttcgccgccttcgcggtgcttgccctttacaccttcggcagagccgtctatgacatcggcaggaacgacggctcacatatggaaacgggacacgccggacgggtggaactgccgaccccggcggaaacaggcaatcacttaacaccttatttatatggaacagacaaagaatgaaccgacgaaagagaacaaagctgctcccgaaacggggaaaccgaaaaaggagcgcgaaccgctgacagaggcgcaacggctgaaacggcagaagatgatcgtgctgcccgctatggtgttggtgttcatcggggcgatgtggctgatattcgccccgtcctccggcaaggagcaaccgccgggaacggacggatacaacaccgagatgcccgacgctgacaaggcgaaccggcagattatcggcgacaagctgaaagcctacgagcatggggagatggaagagcgtcaggagagccgcaaccgtgccatcgggcagctgggcgacatgttcgaccgcgagatagcgggaacggagaacggagtggacttcgacctcgccaatccgggcggcaaggaagaaagggcaaagccagccacgccgcagaccatccagtcctccgcagccgcctaccgtgacctgaacgccacgctcggaaacttctacgaccagccgaaaaacgacaatgcggagatggacgaattgttggagcgcatcgcatcgctggagtcggaactggaaagcgagaggggcaaggcttcctctatggacgagcaggtggctcttatggagaagtcctacgagctggcggcaaagtacatgggcggtcagaacggaggacagccatcggcggaacagagggcagagccaactaccgtgcagaaagggaagaagaacaaggcaatgcctatcagacaggtggagcatcaagtagtttcttcactctcacagcctatgagtaacgcggagtttgtcgccgccttatcgcaggaacgcaaccggggtttcaacacggctgtcggcacggcggaggtattggacaggaacaccataccggcgtgcgtgcatggggcgcagagcgtgacggacgggcagacggtaaggctgcgcctgctggagcctatggcggtggcaggcaggacaataccccggggtgcggtggtggtcggcacgggcaagatacagggtgagcggctcgacatcgagattacctcgctggaatacgacggcacgattatccccgtggagcttgcggtctatgacacggacggacagcccggcatcttcatcccgaactcgatggagatgaacgccgtccgggaggtcgccgccaacatgggcggctcgctgggaagcagcatcaacatctccaccaatgccggggcgcagctcgcctccgacttgggcaaggggctgatacaaggcacgagccagtacatcgccaaaaagatgcgaaccgtcaaggtgcatctgaaagccgggtacagggtcatgctttaccaagaaaaatattgaaaacaataaaaattaccactaaaatccaaaagtaatgagaaaagtaatcatcatgtttgccctcgctatgggcatcataactgccaacgcgcaggagaatgtaaccgttgaaacgaccaacggaagtgaacaaccgaccttgacgaaggaggtctatccgcagaaggaggcggacggcgacctatatcacgggctgtcacgcaagctgaccttcgaccgcatgataccgccgcacggtctggaagtgacctacgacaagaccgtccacgtcatttttccggcggaggtgcgctatgtcgatttaggctcgcccgacctgattgccgggaaagccgacggagcggagaacatcatccgtgtgaaggctaccgtaaggaattttcccaacgaaacgaatatgtccgtcatcacggaggacggcagtttctacaccttcaacgtgaagtacgccgccgaaccgctgttgctcaacgtggagatgtgcgacttcatccatgacggcagcacggtgaaccgcccgaacaacgcgcaggaaatctatctgaaagagctgggcagcgaaagcccgatgctggtgcgccttatcatgaagtccatccacaaacagaacaagcgcgaggtgaagcatatcggctgcaagcgtttcggcatccaatacctgttgaaaggcatctacacgcacaacggcttgctttatttccacacggagataaagaaccagagcaacgtgcctttcgatgtggactacatcacttggaaaatcgtggacaagaaggttgcgaagcgtactgccgtgcaggagcagattattctgccgctccgcgcgcagaactacgccaccctcgtgccgggcaaaaagagcgagcgcacggtcttcacgatggcgaagttcaccatccccgatgacaagtgcctcgtggtggaattgaacgagaagaacggcggccgtcaccagtccttcgtgattgagaacgaggatttggtacgcgcgggtaccatcaacgaacttcaagtacgctgaccatgagaaagtacatcgcaataatcatcgcgtcgcttgccctttttacagggcaggcgcacgcccagcggtgtctgccgaagatgcagggcatcgaggtgagggcggacatggcggacggcttcaatctcggcggcaaggacggcgggtacagcttcggggcggctctctccacctacacgaagaaggggaacaagtgggtgttcggtggcgaatacctgttgaagaacaatccctacaaggacaccaagatacccgtggcgcagttcacggcggagggcggctattacttcaagatactgtcggacgcccgaaagattgttttcgtctatgccggggcttcggctctcgccggatatgaggcggtaaattgggggaagaaggtgctgcatgacggctccacgctgcacgaccgggacgccttcatctacggcggtgcgctgacgctcgatgtggagtgttacgtggcagaccgtatcgccctgcttgccaacctgcgggagcgttgcctttggggtggcgacacacggaagttccacacgcagttcggggtcggtatcaagttcatcatcaactgacacgggcatggaaaggacggaaatagatgctgtcagaaggatgccgcttgcggattttctcgcacggctggggcatgagcctgtcagaaggagcggtaacgagctgtggtatcttgccccgtacaggggcgagcgcacatcctctttccgtgtgaacgtggcgaaacagctctggtacgacttcggtttgggcaagggcggcgacatcttcacgcttgccggggagtttctgcaaagcgatgacttcatgaagcaagcgaagttcatagcggaagccgccaatatgacggttgccggatgggaaaagcccgtctatctctcgaagccgaccgaatccgtttttgaggatgtggaggtcgctccgctgctccgctcactgctgacggagtatttagaggaacggggcatcccttacgccatcgcatcccgtcactgctgccgcttgaactacggtgtgcgtgggaaacggtattttgccgttggctttccgaacatggcaggtggctatgaagtcagaagccgatatttcaagggttgcatacctccgaagtctgtatcactggtaaaggcgaatgacatcccggctgacgagtgcctcgtgttcgagggcttcatggactttctctctgccgtgacgcttggtgtaaccggtaacgctgactgtcttgtgctgaactcagtcgccaacgtggagaaggcggcgggattgctggacggatacgggcgcatcggctgcttcctcgaccgtgacgaagccggacggcggacgcttgccgcacttaccatgcgatacggggaacgtgtcaccgaccgttcctccctctatgacggttgcaaggacttgaacgagtacctgcaactgacaacgaaaaaacagaaaaacaaccatctaaaaatcgaagaacaatgaacatactgaacaacagaaacaagagaacatcaatattcaaggcagtggcgttatgcctgatagccgccatgtcattcaccctcgtgtcatgtgacgatgacatggacatccagcagtcctatcccttcacggtggaggtcatgcccgtgccgaacaaggtagtaaaggggcagacagtggaaatccgctgtgaactgaaaaaggagggcgacttttcgggtacgctctataccatccgctatttccagttcgagggggaaggctcgctcaaaatggataacggcatcaccttcctgcctaacgaccgctacctgctggagaacgaaaaattccgcctgtactacacggcggcgggtgatgaggcgcataatttcatcgtggtggtggaggataactttagcaactcctacgaactggaatttgacttcaacaacaggaatgtaaaggacgacgatcttaccatcgttcccatcggcaacttcagccccttgttgaaatgatgcgtgtattcatgacaatgctctgttcacttctgacggtctgttctgtgtccgcgcagatcagccgccaagagggaacggacgggcaggcggcaatctaccgactgccgcttatggaacgtgcttttttatgctgccgctactttgaaggctggcactcagaaaaacactacccatacgtcggttggggtcacaaacttttgccaaacgagaagtattcggcacgaaccatgacaaaacgggatgcggatgaacttttgcggaaagacctgcgcaaatttgtcgccatgttccgtaaattcggggttgattcgattttgcttggcacgttagcttacaatgtgggaccggcgaagctgttaggcagcaaaacaatccccaaaagcaccttaatcaagaagctggaagctggtgacaggaacatctaccgtgagtatatagccttctgcaactacaaaggaaaacgccacgccatgctgctcaaacggagaaaggcggagtttgcgctgttgtatatcccataaaaggactgacaaaactggcaaaagacgtgccatatttaacttggcacgtcttttgctctatcacttgatagattatcgtaggattttctcgttaattgacatcgttgagccatttttgcctatcggtttccaaataacacttcaagttgtaagtgttgtgagagcaatacaaaacatagttattaaccataaaaagtatagcgaaattatgaagaaagtatttaggaaaattcagaaaggaacaacaaaaatgattgaacgtatcaaatcgttgggggaaatggagacgaagcagaaatgtgtagttcaacggttcgagattatcattcccctccaccaaaaaataacgacccaatatatagcctccgcaagttttacttgcggattttttagttatcgcagattggacaaaggtttctttgctactttctttgtccgccatcatgctcactgaaagaaagtagggcggctctcgccgccccgccactcaaaagcgtgtgtaaagtcccgtcaccatcgtgaacatttcctccagcatatcaaaatagataccctcgtgtacggcaatgtcctttgtcttgcactcaaaggtctttttgctgaacgtcctgcggtagaagcgcatattgtagaggtctgccccttcgtcatagatgatgtcaaggcggttggcacttgttttgttccttgcaaggctcatccgtaagccgttgcccatatctatgaaatcacggctacctgtcatggcggtgaagcgttttccgcctatctgctgtaatatcgtcttggctatcatatcttttgtttttagggttttaagtattggcggtgcgaacaccgccatcccgttcaaaattctcgcatttcggaaatgggggtctgccgttgtagccactctttcacacattccatattgtactcgctcgtgatgactgccgtatggctgtcggtggcggtgaaacgtgtgctttcgtaatcatctatccaccccttgagggtgtccgttccccacgctccggtatcgtcaaagataccgtccaatgccgtgataggttcgctgaacttgactatcagcgtttgataggtcgtgttcatagtctgtcctcctttcccttctttgcgttcagccacttgtcccgtgcggctcggcactcgtccaacgtgggtttgacacaagagaacaattctctgtctatggggtggcggtagtcgtactgcacaagtgtccgcctgcgtcttccgatacccgattggaaacgctcgtatttctccgtacctgcttccgcgcaggtgcttactccgttgatggtcattcgtgttgtcataatgttgctttttagatggttaaaaatgtactgacagaactctgttcttcatcaccatttcggggttgcttgtgtagcgttggtgcaggtagaaatggtgtgagccgaagccgtaaaggaaaaacttgtcaagttcgtgcttctcggcaaactcctttacgctctttctcaattccccctcactcgttgtgagagtgaggaggttcacaaattcaaggaacatcgtggggattgcatcatcccacacacaaatcatactttcaattcttacttccatatcaatgttgttttaggggttatgctatgccgctttcatccgctcacggataaggttggcgttcttgttcacaaggtctatgatgcgctcgtgatattcggtgtcctggttgtgcttgccgtggcactgcaccacttcgagggttcgcaagtccacctctacggtttcaataatctcatcgccaatccttgccgatagtatgagggtgtcggctttcttgtagtatccactgccaaacacgcagatgccctgcgtcttgccctcgttgtaatactcgtctatgctttcaagcaccttgacgattatttcctcgtccgtgattaccaagccgaagaatttggatttgttggcgatgaaatcctccgcatctttctttcgttggagttgtcgctgttgctcacgctcacgcctttcaatctcccaacggcgttgctctgcggctctttccttctcgtgtatggcttcaatttttcgggttgcgttgtcgtgtgccgccatgaaatcttcgggacagatgttcttcgggttacggaggtcttgaccgagttttttgagcatacgcagatagtcgcaccacattgagaggttgtctatctgatacttgtgacgcttggcaatcagatatgatgcccaacattcatcggcagtacgggtattgaaaagaaagtgtttcatgacctcaatctcaccgcctttcataagggtttcaattcttgggtctgaaagcaaggctttgaaaagacgcacgggggagatgccgtggaaatcgcccttgaagccgttacgtctgagttggggcaatatcctcatctttggatatgcacagcttcttgccaccacatcatcgtataggctgttgtgcggtcttacctccatatcgctgcctaatgcccacacatcgcaatagcagaaaaggaagccacggagcaacgccatgtccgtaaccttgccgtcgggtgaaatccaacgctgcacgacctcgtggcagtagaaacgcatcggttcgcctttcctgctctcgcatctgacctgcgccacgcggattacctgataccctttgcaggtggttatcacgctgaaattctgcgtttccttgtagatgcgtctgcgtgtgtcctgcactttgagttcggcatggcatttggggcaggtgcagccttcaagggtgtcgcatagtccgctgtcgctgtgccactcgtgaccgcagtcggaacaggtgatgttccctttcttggtgcggtagccgatatgctcaacgcagtggcggtatgcccaatctatttgtgtcgctgatatggggcgaaggttggcggaaagtcttgccacctctttctgtatcttggtcttcggtttcataagcctaaatcaaataatgagggttggggttggttttcttttctcgctgacggtctgtggcggttctgcaacttgcggagttcctcctcttggtatttgcggacagcgttctgacgtgcctccgccttttcctctgccgtgagtttcacaacgtggttcacaaccacttggcagtccatcggtttgcccacctctatctcgttttcctcatagtagtggatggcttgcccgaatatctctccgtccgtgaaaccgttgcaaccgcttttctgcacatagttcagaatgtgggtcacgcactcgtccatgttcttggcagggttgcggtacttctttgcaaatagcgcatcttcctccgcacgctgttccaagtacatatatatcgttctcttgaaatggtctgttcctttcatatcgctgtcatttttagattatctgtttcagtatctctctccaataggtcggctctacctcgctgagaaggaagtccatgaaatccctccgtgcgtccttgttcagttcgtggtacaatcttcggaaagtttcaaaattgccgttgatgtacgtttccaccatatacacgaagatgttgtccacctcgtaatatctgcactgctgcgctgccgtcttgctgtttctttttgccatgtcggtaagggttaaagggtgaataaccaaaggatgaagccaaagaaggcaatggtggaaaggatagccacgattacacctatcgccactcggaacactccgtttacaatctctctgatgatgccccaaaggatgccgaacaccccgaaggcggtgcgcatcatcaagccgcatatcgccaacccgatgtgttgcgccatttgtctgaaatttgccgttgccgtcatatcttcgctgtttttgatttttttgtttttaatgcggattcaagagctgagggagttgagtttcaaactatcttatctgcctctcgtttatccgacattttttttatgcgtctttctgtcgcatcggtcgttttcgtttcgggtgcttgaaaaggtagggattagggaatgcaaggtttttcggtcaaaatactacccgcagggctggagatttttaccgaaaacaggaggcttgaccttgctttcccgtccaatcccggaattacctttgcgcccagaacgaaaatgactgactgatgcggcttactgaaaggcgcaaaatggaggtaaacgaaaacagaggcagattgtgtagaaaaaaacttcaggggaaaatccgtaaaaaaaagaatcaccaaaaggaaaaagacatcaccggaagcgtgaaaagggcaaaccacaacaaaggaagtatgattgtttccgatccgacggaacttgttcagccgggtggcaacaatcattcttcccggtttgtccggctgtgtgtgggcgcctgtttcattcatggggcaggctgacacactctgcattcactttccgcttccggcaaaagagacagcgaaaaaagaaaaatcatttgaaaacccgtaaaagcacctcttggcataggcgcaaaagaaaggggcattgcttcatctgtctaaacatcgtttaggcgtgaggcaatgcccttttctccagctatgcggtagtcggcacacgtttgttccaaactcgttttgggcaatggtgtgccgacggacaataccgcttttacggaaaattcttatgaatgaggggataaaaaacgggagtttatatcaaaatctcgaattaaatagctacttttgcatacgaagagttctttgaaggttacgcaacgcgcagaaggataatgcagtagataactaactaaatcgtaacctattactatcaagagcaattaacctacgctcatttccaataaattacactcttttcgtaacttc

SEQ ID NO: 98 - DNA, 8943 bp, Bacteroides uniformis
  source 1..8943: mol_type = genomic DNA
atggagaagaaagacaagaaacagagggatatagtcctgtcgcaagacaatgcgctgactaccgcacgctacaagttcgaccttatcgaaaaacgtgccctatactccattatacgaaatatccgggcgcaatacatcgagaacgagaacggcagacgggacttattcgatgatctgattatcaccatacacgaggaagaactaaagaaatgcggtgacaataccaagatgcaaaacatctacgatgcgctaaaacggcttagaaatcgcgatatagagattaacaacgaaaaaatgtggctaagtatcggttttgtcaattacgtcaagcatatcaaaaataaatcgtattttgaggtgcaagtttccaaagaggtactaccctattacgtggaactcgcccaaaacttcacgagttactccatgacggtagcaatcgcactcaaaagcacattctcgcaaaggttttacgaactgtgctgccaataccgaaacgccgggttctttttctacacagtcgaaaagcttcgggaaatgttcatgttggaaaagaaatacaaacggggatgcgatttcaaaaggcgtgtacttgacgatccgcaaaaggaactccgggagttgtacaatgccggacaatgcgatttatacttcgagttcgagccaaagagctacaaaggcaaggaagttaccgaatacaaattctacgtttacacaaggcaaaccgaacaacaaaagctattggaatacgaaagcgcaaaacaggcgatcatctacataacaaccactatttcgaggttctctaaaagtgacaaaggatatgttaagcgtgtagtgaacgccgtacagttacacccggaaatagccgtacaggtggcgcaaaagatacaaaagaagtttgagcaatatatagacaagccagccaaacagataggggctatcatccgggtttgcttaatggaagattttggtatagaataaaaaacatacaagtatgaaaacaggtgataaagttatcgtaccagccgaaataaacggctatggcagagatttacgggcaatagttacagagatagagaagttcgccggggcaatattcgtaacagtgatattcaccgaaccatgtccggaagcctgcggaagaggggggggtgtttaccatgacttccagctaatagcaaggtgatttattttgctataatcgcaataaattgcaataatatctgtgataaattgctataataatacttataactacctttgcaacagaatatagcattttacagcaatggagaaaggacaggaaagcaagcaaaagaggaaaacaccgcttaccaccatagcgataagccaagagtacgccaaaaaattagacgagtatttaaacggtacgggtataactcgcaaagaatttgtcgagttgtccgttgattatttccaaagaaccgggttcgacctccggggtgaagcttttgacctctccccattagaaaaggttgccgggcggctggaacaatccgcaaagatcatggaacgacacaacgaggggacggaagcggtgcacctgcttctccaagctgtccgggaacagaccgccaagcaactcccagcgccggaactgatcgcccatgctgccgaagaaaaagcaaaggcagaagccaaaagcgaagaacaagaaagggagattgcccggctgcgctccgaaaactccgctttgctggagtacaaagaaaaggcataccgggaactatgccggatacgtgatgaacaaaaaaccatagggaagataaaagtaaatatagagttataaaagaacatttataaataaaaaaatcatgaataaagaaattttatttatttatccttttgccggattatgcagcacatgaagctgtgtacttttcacaggctattacagctgatgattttgccatgaaaaaaaatccaaaatatgtcaataaggttgtcgcacccaccttagaaccaataagttcgattggtggattccgcacattacccgattattcgtttgacacaatgcctgatgattatgtagcattggtattaattggcggttttggttggaatacacctgttgcagaaaaggttatgccaattattaaaagtgctattgaacaagaaaaggttataggtgcgatttgtaatgcagcttcattcatggctaagtgtggtattgaccgagaaacaacatcaaaaactttgcagaagtcatccgtaatacagaaaatctcagtaactttgtcctcggtaatcatagcaattattgtctgtaaacttttgatatttaacactctaagattacaacaatttttcgctaatcaccatttttcaggcacttatatttcgtcgaactcacgttaaattatttaatatacatacaatcttggatacttgcttagaccttattgctcttcaatatacttgcatgattgtgatggccatgcttgcattttttgtgtttgtgtcgcgctactatgtaacttgccgtaacagacagtttgagcagtcgcgttggatgattgttgtggcattactattgtttgttgtacactacatgtgtcagatgcggttgggttggcgacaacaggggaacgatgtgggtgttctgtttaatctgctgttttattcgccttcggctattttgttgtcatggtcgcagcttaatattctgcgcgctgggcatagacgttggagttttatgcgctatggcgttgttggatatgctcttatggtattgtgcatagtcgcaggtgttatttcaaatggcagtctgcatattggtcctatgctatatgttgctgatgctattcatttctttactctattgtattatacatgggcaccgctgagggaacttggtaatgttcaacgtcggctcgacagtgaacatggtaatcctgcagatgcctacctgcgcactatgcgctttggtttttttgtggtgtgtgcttttgctgtaatttcgcctctttatatattgtcgcggccgctgctctttgtctttggacctttgggattgatttcgctttcgctgtttattgttagttttacggcgcttggatttagtatgtccgagggagtaactgagattgttaccgagactaacgacgagatagccgctgctaaagtctttagggagattgggcctgagcgtattgccgaaatagatatggcggtaagcaaatggcgaagcgagggcggttttagagatagcaacttgacattatcctcgtttgctcgtcgcataatggttaatcgtaccgacgttgcttcgtatctgacttccatatatggtaagaatttccgtacatggctttcgggtattcgcgtggaggaggcaaaggcactcatggctgcacaccccgaatatagtaacgaggttgtttctatggagtgcggtttctcgtcgcgtgtgtattttcagcgtctgttcaaggaaaggacgggcttgactcccgccgagtggcgccgtcaacggtaatatactggttatgtgtgcgtttgctactgaatgtaaggtgtaacttttgtacgaaggttacataataaggcaaagtgtaacctttcttactgtgacgtatcctttctataagagtgacacacaagtgatgtctttgaggtttttgatggttgatgctcctgtatctttgcatgaggaaattcaaactattcaaatataaattctcaaaaacaattcactatgcaaaaaaactatctttatttaatggtgtgtgtcataggggctatgtctttagcttcgtgttccgaagattctatttctcctgatgctggtggcgatggcgatggcgacagcactaccgaagtgcctttggcacaagttgcaaaacccaaacctaacccttggcttgcacaggaagagtatagtattacgcacttcaattcggctcagactgatgctttctcgtctgctgtcaaggatggaactttcaatatcgatctttccaagtgtcagatgacatggagcggtcctgttaatttgatgactcttgcttcgacttcgcccaattatatgtggggtatgagtagcgaccgcgtgtcgtatcttgacataagcgacggcaaacttgaaagggttgccgaggctggcttgccagggattacaatgaagacccaggagcaactgacacgtataattgccgatcatgctacttacgacgaactttccaagacggttaccgatatattgggtccggcgccacaaatgtctatggccaacggtaattatgtcttgtgcgacaaggataactatgcttacaccaatgcaggtcaggtaatggcacgctatcgccttgccaatcctaataatcccaaggatggtatcatgttggatcatcagataagacttacgaattttaccttcggctcttttacactcgtaggcgctactatgacctatgacggacaccttgttgtggctgctcagaacggacttcttgtgctgaatcgtgctcttactacaatcgaagattcataccctcttccatcagaccagattctcaccaactctatctgcatcgacgagaatggcggtgtttacgtagcaagtaacagccgcacaccaggcggaaaaggccttatgcagaaactcatctgcaaggacggcaaaatctccacctcccaggctgatggtgcatggcaagcctattacgacggtggtccgcaagcaccatgtatcaaactcggacatggcactggttcaacgcctacacttatgggctttggccaagacaaggacaagctggtagttattaccgatggctctaagcgtatgaaactggtagctttctggcgtgacgaaatcccctcagacgcacagcaagtggcaggatacgacaagcgtatagccggagtgcacgaggttacatgtggtcttggaacatcaacagagtggatacagtctgagcagtctgttgtagtaggcggctatgacgcctttgttgtaaacaatattaatgttaccaatcaggaaataaacgacaagattattggtgtaatcgctattggtcctattgtcaaaggccctcaaggtgccgagtgtgtacgttggaatacaaaggagaaaaagtgggagagtaagtggacgcgcagcgatgtaagttctgtaagtatgattcctgccgtaagtatcaagtcagagatggtatttgtatgtggctggaacgatgcttcgggctgggaagttacaggacttgactggaagagtggtgccacacgtcaccgcagcatattgggcaagaacaaccgagccaatggtgcctacgccatcattcagtatcttgctaacggcgaccttttattcaactctgttgccggaccaatccgcgtaaaatattgagataatttaatcatcatataacagttatgtcaatacttcactaaaaaattaccgaagtattgtaatgacacacccgaacatattgaaatgttctatcagttccataaacaaggcttctgttctttattcctagatacaggtgataaataacagataagaaacagattataacaagcctccggcggggttttcgctgggggcttttgacctttgcacatataaaaagcaaaaagaaagcgatatcggagcgtataccataaaacagaccaccgactattacaaaacgatattacgtgcctaactgatcggggcagttcctccaccatgcggacaaatcccggtaacaaaatgacaaaacggacactcaccaaagaacaacatttttttcttttttcctaaacaccttccagcgaagcacagtgtatttgtcaagggcgaagggtaaaaaataccgcacgagcgaagcgagcacaggagattttttacccggagagtgaaacgtccctttacaaatgcggcgtgcggagttacctttgtgccggaaaatagaaaaatcacatgcccattccgaaacctctgctcctttttggcttcttcaggagttccagatcttcctcctgctgcttctttttgggaataggctgctcgatgtccggcgttttctccacctgttgatttttcgacttctccggctcctgccgggattgaagctctgctttgagtttgtcccatttctcctttctgatgcgttccgcacgttccacctgccgggctatttccgccggacttccgttcttgacggcattaagatagtcgaagctttcctccggctcccggtcaaaccccatgcgccgatcaaaagagctttcacacttccggaaaaaatccgtccggtcaaaacctcccttcacgttgccgcagttcttcttcccggtgtggttcgttttagggcttaacttcctggtgttgctccggtctttccggctgacgatgatatgtgcgtgcatatcgctgtcactttcaccgtcccggttgaaatggatctttgcataatattccacatcatcgcttttcaagccttttccgaagccctccgcatagtttctcatcacatcctgccgtatgtaccgccgtaaggcttccgcacactcctgcggagttctgcccatgcagcgcagctccttctctgaagggctgacagtgataacatagaactttgcgtcagtccggcttaacttagccttgttgttgtctatcttgaatgtgacctcccttgcgctcacgtagtcccggaactggttgaagaacggctgcacctcctcccctttcttcatcctctccaaatcctcatgctggagatagttcgtcaccgcaacacaactgcctgtattggcatatgtgccgttaccgcttccctgtatcttcacgttcatatcttttcccttttgttcttctcgttcttgtacaaggcttttatatcatcgaaaagcccggcttttcctttcgcatcgatatagcttgcgatataggagaagatcttctcctgcctttgcgtcacagcgtccagccttgcataaatggcttgttggttcttcagaagcatatccctcgactgaccgactgccttttccgcccggtccaaagcctgctcccttatcccggcaaggcttgcaaggtcacgcatgaataggtcattgtctttttggtattggctgaactttttttccgtaagtatcgagtccatgctcatggtcaccctcatacttgtactgcccatggcttcacaagccggacgcaagaaatcctgctcctgcttccggatgaacgctatcacctgatcacagcgtttgataagtttctgcatttcctttgccggactctcatgctcaaccgggttgatgccgtacttctcgaagtactccagcgcacaggaaaggaactctttctttgatacattattggactttgccagcctatcaagccgggcaaacgtttttcggtcaatggtgacagaagtggtggtttccttatccatacaattgcggttttaattgctgtttatattattaaatctctgatttccaaaggtatgattttaaccacaatttcaaactaattgcggttaaaaaacttaaacggctgatattcagccgtaaccccgtagggcaagaggaaaaacagggtaaagcccggtttcctcttgctgttctttcgactgccgagcaatcgacgaacaccctcccctgcggtacggcgaaagctcgtacaagggggacggggagaagtcggagcgaggcacaaagaaagaacctattccacaaacaaaaaaacacatcaaaacggcacaacaggctgcataaaatatcaatattttgtttcgctatatggaaacaaaatattatctttgcaacactaaaaaactttatatggaagcaaaatcaagattcaaggtcaaattatccaacgaagcccaagagtttttagacggattgcccaacaaggtacgtgagaagatcattagcaatattcgtaaatccacctttgtacttgatccagatttattcaagaaattggatgatacggatatttgggaattcagaacgttctataacaaaaccaagtacaggcttcttgctttttgggataaggacgataagataaacactctggtaatcgcaacacatgggtttatcaagaaaacccaaaagacacctcccaaagaaatagccaaagccgaagagattagaaaagattattttaattcaaaaagataaagcgtatggaagcaaagaaattttatacactcgaagaaatcgaggataaatacatcggagaaaaaggtactcccaaacgtgatgcctacgaagaagaacttaactcttttttgataggtgaagccattaaacaagctcgccaatcaaagaacttaacccaagaggaattaggtaatctgataggagtgcaacgggctcaaatctcccgaattgaaaacggtaagaatttaaccttttccaccattgcaagagtttttaaggctatggggataagtgctaaacttgaaatcggaagcatgggtaaagttgcgttatggtaactaactatacaacaaaaagttacattaaatccgggatgcgttttcgctcccggaaacttctcgttttatacattaaaagtcatatttatacaaaatttaacacgccaaaaaatcttcctaatccgttgcacttggctttacttgtttccactctctcccattctccggaaattcgtcgtatcaaaaaacacgctgaaaagtggagcgaagcgacctctataaaccaaaaaagaaacactccattgctttacggtaatttttagtttctttttagttacttttacggcatagcataacacattgtgctgtaatatcttacaaaggtcatctacgacaaatttccgagcatctacgacaaatttccgagcatctacgacaaatttccgaaaaaaacggttatctacgacaaatattctacgccatatatttgtttttgtcgtagataaatatttcctttgcgaaaagcattaaagtc

SEQ ID NO: 99 - DNA, 8329 bp, Bacteroides uniformis; identical to SEQ ID NO: 5
  source 1..8329: mol_type = genomic DNA

SEQ ID NO: 100 - DNA, 5731 bp, Bacteroides uniformis
  source 1..5731: mol_type = genomic DNA
gcattttcctcaaaatgagagggagaaatactttcatgtttttttaaaaagtcaatagctctactcatattcaatcctccttgtttaaatcaacgaaactatctttgtcaaaaactccattagccttaagaaaagctttgcatctattcagtttgtccaattccatagctgtatgctccttatcctgcatcaaatgtgtgagctttatagccccacccgtaaccacataaacattggcttcaagacggatggcatatatccgtaaccagcttgcgtgcttatccctgttccaattacgagcttttcttcttgtcaattccacacatcttgcatctgtgacatcaagaggcataaacaaaccgtccagattttcagtataaggaaactccaagataagttcttccagctcatccgcatcctcaaatgtgtctcgtatggcttccgaaactttttctatatggaaatacttccttaggtcttcgatgttgtctttgaaaaaatccaatagataatccgcattgttccatttttcaaacaatgaagtaagctcatcaaactccttgtccggctcctttacagcccacaaatggtcataacctccaataactcttacaaacttcataaatactactcttttcatgggcaaagataccaaaggaaaccaatataaacctataagtttagttatttaacaatcaatgctatttaaaagcgcaataagcgcccatttaaatgccacatatttacatatcagaacgtattaacacatattttaacacgcagaaaaaatgtcccatccatttttaacctcaaacctttccttcctttctttttctccatggcttttgtgtttttccgaaagtacgaatcgtgaattttaggctctaacaaccctaaaattctgtaaccttgtcttaggttattatcttgtattaaccttgtacgaaaaaaaacagattcataagttcttatatatcatcatgttaaataggcataaaaacatgatatagcaacaaatagtacgtcatacagcaacaaatagtacgtcaaaaaaaattagatatagcaacaaatagtacgtatatagcaattaaatcaatgcattaattgctatatctattttttatattatatttgcaaccgaaacaaacaatcgaaagtatggcaagaccagtaaaagcacaatcaaaagacataagacagagcaattatttcacaactgcaaagtatgattacactctgcaagagaaaatcatactctatcgtgtagcagaacaagcatttgaatacagagaagccaacaaagaatggttcgaacagcacgaaggagaatacatagctagagaccatgtttcctttagattgccgattacacacttcatgacaaaagaacaaaaagctgatggaggcggaaagtgttatgatgatgttgtggcagctttcaagtcattaacaagcaagcgaatagagtttcagacaaaagatgcattctcatttggtgcgttgctaaattctgccgacagagaaccaggtgaggggataatatattttactgtacataaatttgtatggcaatcagctttggacttcaccaaagggtttacaaaattcgatttggttgtggctatggaattgaaatcagcctactcaatgcgtttctttgagattgctaaaagatggagtgataccaaaatatggaacatttccgtagagaattttaaagaaatgtttggctgcaaggcaaaatacccaagattagagtctctcaaaagatgcgtaattgataatgctaaagaagaactggatagggttgctccttggtcattttcttacgaacagcacaaagtaggcagaaaggttgatagctttactttctacttctatgaaataccaaagaacaagagagaagaagcaacacacaaagaactgctttcgaagtacccgcaagctgccatcaggccagagactaaggattggctcaaaaacaagatggggttcaacatggggcaaatcagaagcaatgtaaagttaatcgacgagctgcaacgcatcttccaaaacgacacaatccaagaactggaagaaacattccaatacatagcgaaacagggattcagaccacaggagaatataggatggttcattcagaatctgaaaaaaaagatagaaaatgcacagtcttgattgttttgcataatcaaaattataatccaatataaaactattacgaaaatgacaaaagcagacttagtacaagagatttcaaaacagaccggaatagaccggaacgaagttttaatgatagtggaagcattcatggaaacagtgaaaggttccctgtcaaacggaaagaatgtatatctccgaggattcggtagtttcatcatcaaacgtaaagctgaaaaaacaggacgaaatatcggacagaacacaactctggttatccctgctcataatgtcccggctttcaagccatctaaagagttttcaaaaaagctatgttaaagtcctatcgcaaagaacaacgtaaacaattattttctaattttatggcagttaactaaaatcaaatggcttatgaaaaacattttgctaatcagttctttctgtatgctttgtataggctttagttcttgttcaaatgaaaacgatgaatttgtacaagacaataaagaaatgaatacgaggtctgttaaagctatacatacctttcctaatgtctcaagaattaaaacagaccctgatgtcgtaaaaaagatgaatgaagcatgggaagaaatgaaaaactatgctgctaaagggaaaagaagagaatatggcttttatatctattatgatgaatcctcagataaaattcattgtggaaagatgcaaatgggagacaatatacccaactgcgaaggcactcatgcatctatagaactaaagcctgattatcctgctcttgaatttcaaaatacagtttgcgctcatttccattgtcatacaacattgcaatactgtccatcttatgtatcaagagaaacagggccttcaataggtgatattaattttgccaatagtcagcagttgcctggtattttatacgattatgaagatgcaaaaatatatggcggtgatagcaaagataaaaaatataaaatgcagacgtttggtgaatatgcccaacgtcctgatagaatctattaaaaaaggaggtttgtttatgagagcattatatcttttaatttgtacaatgttttgtataaatgcaatggcacaacaagctaatttcgaagctttaaacagcagtgaaaaagaaaaacacttaatatcattatcaaacgatattatcaaacttttaggtccgggatactatagagaagtcactcctactattacagaagaaaagtttgaaagtagtgataaacgatcagaaatcagccgaaatattggacgcacatattatgaagtaacatatggttatgataatagcaaagaatcattagattttccattttcagcaaaagtaagcatttggaaagatactggtgagccatttgaggttatctttggaaacggttatggacgaaatttctttttcattacatatgatgaagtcttaaaacgaaaagtcataatggaacctgtaccatatcagcaaatcaaaagtcaaaaaacaaagattatcaatgagacacccataaaatagcaaaaatcatctttgtacatcgggccacttctcaaaagttttaggattatcatccgcaaaccgtcgatagactttctcacgtctccagattgaatcacattcagtttggagacgttcttctttttattttcggggaaattgtttatcttcgccgctgaggtaacctgcttacaggttgatagcgcactatcaactttgaacgccttcggctaaagttggtgcgctctccgagggggcaaggggcaagccccctgccgaccccatgccgcccccaacccaatccgtacgaccatggcgaagacatccatccacatcaaggcctgcgacaccgcaggatccgagctgcacaacaagcgcgagcggcagctctcctacatccgtcaggacctgacgcatctcaacgaatcatacagctataccgggcaaagcctggccgcagagctgaagcgcatccagcaggacgtgaagaagcacaccggacgaaagctccagaagaacgccatcccgctcaaggaaggggtggcggtcatcagcgacaccaccaccctgtcagacctgaaggagttctgcacccggtgccaaaaggagttcgggctggtgccgctgcagatccacgtccaccgggacgagggacacacggcagccagacaatggaagcccaacctccatgcccacatcgtctggagaatgtacaacgagcaaggccggaatgtcaggctctccaacgtggactgcgcccggatgcagaccatcctggccgaatgcctgggcatggaacgggggcaggcgagcagccggaagcatgtcgatgcactccagtacaagatagaggccaaaacctcacaaatcgaacaactgacggaggaagtggcggaactcagcacgaccaaagcagccaaagaagccacgatagacaccttcaagaccgtaggtgcgcacgtcgtcgatgcaatcacgggcaagaccaagcggaaagaagagggtttaaagggtgaaatcttacgtttaaaggacgaactggccaaaaaggaagcagagataaccaggataaagaaagaggctcaggaagccttaaattcggtcagaagccgatacgaaagcaaagtgtacggcctccagcaggataagcaacgggcggaacggtgggagaaagcggctgaagccaatgccgaacgctggagaaacaggttcttttccctctggccggatgcagcagctgccatcgaggcgattgtcaagcggtgcaccacaatgatacgtaccttcacaaccgcacacatcgcctccatcgagaaggccttgcgcaatgcccggtcgatggatgagcggaaaaaatacgccagtgacctctggaacatggccaaagacgagatgccgggcaccactccaaaggcatggatacaggagggaaagaaagacctggacctgctggtcgagtacggcccggaacagtaccaaaagcaggaacgcagccggacgcagaaccgggggatgcacctgtaacggcacaatacagtttctgaagatttcggcagctcgactgccgaaaggcgttttgtggctacaaaaccacaccttgcatgtggtttttcatcgcaaggcagaggggttactatcaaacaagttaaccagcaaaccaagcaacaagtcaacaaaccaactttatcactacggaacaaagagaagtctcacttgctgttttgtgtgtccagcaagtgagacttccgtatcaaaatatatggttcactttcggaaaaacaaagaagccgtttggggacatagacggcttcttcttaaatgaatcaagccaattccaaaacatccaacagcttgatgttgagtttttgctccagttctgcgatacttttaaaagaaaaattgactttcccggataaaatcttactaatatactgtggagatactcctaaacgctctgccagtccgtttctgtttaaaccattggattccatatactccactaaagacaaggcgatgttacgtgaccattccaaccaagcctcgttttcctttctccatttc

SEQ ID NO: 101 - DNA, 5513 bp, Bacteroides uniformis
  source 1..5513: mol_type = genomic DNA
tgtctatttctacctttttggctgttgcgtcctctatgcgcttcgtataggcttctacgcgcttcaattcttgaaacacaagttctaccgcaagctgcggatttactttgggcgttgtgtcctttctctttcgggggctgtactgtccctgcttataggtgtaatcctccgtctttgggtttgagggtgtttccataattcctgctgattgagttatacttcaattttttctgtgtcttctcgatgtgggcaagcgtatagcctttccctatctcgcttgccttgtattccgttccgctccggctcgttacatagtagccgttaagtttgccggtacttgcacgggcttcccttaccctgaagcccagtttttcgagttcccggctgaatccggcaaggtcaaatccctgcatccttgcaaggacaccgtccatagcctgttttatctcttccctgttggctttgcctatgtcctttgactgtaccaagttccgctctctggctatactgttggcggcttccgttgctctcttccctatccagttgtctttgtagagttctcccgataacgacacacggtttgccagtatatgcaggtgggcttgtctgctgttcttctccgttccgctgtgcttcacgatgatgtactgatggttcatcaagcccatgcgctgcatgaagtcgttgccgagcttcacccagtccgcatcggtcatgcctgcactttcttccactgaagggctgacctcaaaccgaaggcagttgttctttaccttcggaaaatcaacaaagtaaggtttcatctcctgcaccatctcttcacctgtacagccgaaaagctcatggcggtgtatctcggtggctgctgcctccccgtttatctctttggcaaggtcgtactccagtgctgccgtgccatgagatatgctctttccttttgctatcatcgtgaaagtatctttttaagttcattgattagtgcctggttctcctcgaacacttccctgtactggcgcccaccgaagtagttattcagacgctggagtgttcctttcagtcgggctatctcccgaaacagttccctttcttcttccgtgtacctctctttgggtcgtccgcccagtgcgagtgtacggcagtactccgatgtgctgataccgcatcgggctgcctgttccgcaagtgccgccttttcaagtgcagtgcagcggaatgttatcttttctgttcgatttacttccatgtcgcaaaggtaatcttaaaatccttttgagcaaagcgataaaggcaagaatgtccgacaaggacacttcttgctatatatacacataccgcatgggaatacacacagcgctaacacactgcatagccacacacttttttcttttttccctgccattcccacaacggaacacggagagcggtcaagggttcgagcggaaaaaaccgcacagcgaagctgctcaggatttttttcagatccgaacttgcgaagcccttgacggcttcggagtgtggagttacctttgcagaccgaaaagagaaaaaaaacacagttcgcttcactaacgctgactggtcaaaggataccctgttcagatatgattttttttagaatagatacacttacggtagagaagtctgacttatcatagacatccacaagataaacacgaccttcactttccgatgcacaaatcgtgtatgtgataacacgtgctcccccagacttaccctttcccttagaaacaatggcaagtcttattttacggatacctgggctcagttcatccccctgcatggggttcttttccaatgactcgataaaatccttcatgtcagccttaaaagacttatacctttttgcaaggattttcgcttccctctcaaaatgtggggtagtctttacttcaaagctcatcaagaaatgcgtttgcgctcttggctggctgctcaccagcttcgattcgtttcacttcattcaagccctctcttattcgagtggctattttttcttctacggacactggcaccagtttaaaatcaccgatacgtgaagtcagaaagacggattctccctgaatagcacgaagaagggtcgctgtctgattcgtccgaaatttgctcaatggaattacttgcatatatcttaaacttttttgattgtgatacaaatgtaaccattgctaccgatattgtaaccaaattaatatactttaacacgcggggggaaaagcttcaataaccgcacaatcccccaacccccttataagggggctttgtctttgttttcccttttgtttttcatccgttttttccgaaagtttggaagcaatctcaatcttatgagcctgtttctatcttaacatcgactatctatgtctatcctcgcgcgcgcgcattatgcgagggaaaagccctccaagtacgacataaagaatactttaatacgacataaagaataaaaattaacactttaaaaacgacataaagaataaaatatacgacctttatttgttgaggtcgtactttattcgtatatttgctgcaaacctataaaacagcactatatgaaaccaactacttacattgattgggacggtctgaaagatattccgttcttctactgcgatacaaaggaagatgaggaaagcaaagacttcgacatatactatcaagggaaactggtactgcatgactacaaccattgcggacactacctctacacagctgctgtgctgttcagcagaatcaagaataaaacggcagactgggtgaacctgcgcaacctttggattctgcgtgattgcgtgcgtgagaattataatcacggcataggggtggacgacattatctttggagagaattttgatggcgagaacctctatacacttacaccgcttactaagaaacgcttcgattatttgtgtaggcgtattaaggagcttgacccatacgcaacaatctaaaaaagcaagtcctatgagcgaaaacctaccaaacaaagccgtattccagtcctatatatggacatgtgccaaatacgatttcagtccttacgaaaagcgtatcatatatcgtcttatcgaatttgcccaacgatggttggaaggtattaaaatcaaagaccatatgcacaaaatcgagccgacagactgcggtgtaaatatcactatgcctgtggcggatatacttcgagatgaaacagacaacaactataccaaagcaaaggctgcatttacctcactttcaaaaaagggggcggagtatgaagatgatgagatttggttctatacagccataatagagcaccccaaaataaagaaaggcacaggcgttgccactttccatgtctatgagcctgtttggagagcagctcttgatttcactaagggttttaaaaaatatgaacttgtaaccgctatgaaattcaaaagtgtttatgccatgcgattttatgaactcatgtcaggacaaactacacctttgtttgtgccgttagaaggttctgacgggcttcgggaaagattcaatctacaagggaaatatgaaagggtaaacgactttcgcagaaaggttattgatgtcgcaaaaaaagaacttgacaagttctctccttattcgtttgtggctaaggaggaaaaggaagggaagaaggttattggatggactctgttccctgttttctttgaagatagagaagaccctgcactacaggagcaagcacgaatggctaaagttacggcacggctccagttagaaaacaacgtatatgactaccttaaattctcctttgccttcaagtctgatgaaatcaacaagaacaagaaaacccttattgaagggcagaaccgcatccccgattttatgggattcttgggagaattgaagaaaggcgcacggctggcagaaaaccctaaaggatatgttattggcgctatcaagagaaaactcaaagaaatatagttaaaatcctgtttcagagaacaacgagaccaattattttctaattttatggctgataactttaaactaagagcttatgaaaaagattttatttttaagtgcatttttatttcttggatttggacttaattcttgttcggatactgatttaaattctccaacgaatgaagaaaatcaacctgtagagaataatacaaatgatattattaataatttagaatcatcttttgaagtaaaagcaagagcagaaggtgagcaagtttcttaccctgattattattgtggcagctattttaaagatggtatcttggtcataaaagtaaaaggcacaaatataaaagattataaaaaagaccttgaacaaagatgtaaaagccatctattcattatagaagagggcgttaatacaatgaatgaacttttgcaagttagagattttattaatagcaaagatgaaattggagtatggaaaaaattgggtatttctgcttgcggcatagatcctaaagacggaaaggtcgttgttatgttagaagatgcttccgaagcaaacatcaataatttcaaaaatgaagtaattaattcaccgctaataaaattttggcaactttctttttctgaaggaaacacctctttagaaagcaataaacaaaccagttctttagctataaccccaacccccatgataccaggtgcggatttttattgtgcccaaggtggaggaagcgtaggctatcgatgtgtttacaaaacaaaaccgtgtattgtaaccgcagggcatacagtcaaggctgttggtaataagattatagatactcaagatttaacaacaaagttaggagagtgtatcgagtgcgatgttacaggacatgatttggctgtatgcactcttgttgataaagttagctcatccaatattttcaagtataacaatacaactattcaaattgtggacggaacctatgacaatgtaaagaaagacaatatgatagcccttaaaggattttatcattctggtccaggcaaaattattgtagaaaaaacgaaattatcaggaagaacttttaccgaatttgcagttgcaacatataaatcacaagatggagatagtggaggtttgatattcagcccaaatactaaaagagccgttggaatccacattgcttctggtgaaataaaagttgatggtacatttcaaaaagcaggggcatttcttccatgttcagctattaaatggaaatatggaacattacctaagaataattaatataagcacagaaaagcaagaatgaaatttcattcttgcttttctgtttgttcctgctgataatattcataatacctcttgtagttgtccctgtccttggctgcatccacccataggtaacacatcagacaggcgaacaatagggagaaaacagcacaaaggattgaatacatagaagcgttcttgtccacatagctgccgtttttcattctgtttccctgccgttcaaagtccgccaatacgttttttaggcgattttcggcactttcaaggctttccc
